United States Patent Application Publication US 2019/0348154 A1 - sequence listing, part 73

SEQ ID NO: 275442 - DNA, 612 bp, Morganella morganii
atgcccgtgatccacctggttgatgatgatgttgctgtgacacaggcgtgtcagtttttgctggagagcctcggttatgaggtgtgtgtctggaatgacagccggacatttattgcacaggcaccgctgcacacttacggtattgtgttactggatatgcgcatgccgcattttgacggctgccgtgtgcatcagatccttcaggagcggcacagcacgctggcggtgatattcctgaccggccacggcgacctgccgatggcggttgaacagatgaaactcggtgcggtggattttctgcagaaaccggtggccacacaaccgttgcaggcagcactgacccgcgccgccgcggtaaccggcaaagccgtggcctgtgcccgaatccgtgaccgttttcagactctgacgccgaaagagcgtcagatcgccggttttgtcgcacaaggactgatgaaccgggaaatcgctgatattgcccatgttgcggtaagaaccgtcgaagtgcaccgcgccaaagtgatggaaaaaatggcggctggcagcctcgcggagctggtcacacagctcaacagcattacggacgctgaaaacagcaccgcagaacactaa

SEQ ID NO: 275443 - DNA, 942 bp, Morganella morganii
atgattacagctcctgaatttcaacgctcgtttctgcatccccgctactggctgacctggtttggcctgggtgtactgtatgtactggtgttgctgccgtatccggtgatttaccggctgggcacccgtctgggtcgtctgtccatgcgttttctcaaacgccgcgcggagattgctgaccgcaatctgcaattgtgctttccggatatgccggaagaaaagcgcaaggcgatggtggtggcgaattttgaatccgtcggcatggggctgtttgaaaccggaatggcctggttctggccggactggcgggtaaaacgctggtttaaggtggaaggccgcgaacatattcagaaagtacaggcatccggacaaggtattatcgtgataggcatccatttcctgaccctggaactgggcgcacggattttcggtatgctcaatccaggcatcggggtttaccgtccgaacgataacccggtgatggactggatgcagaccaccggccgcctgcgttccaacaaatccatgcttgaccgcaaggatgtcaaagggatgatccgcgccctgcgtgacggacagattttgtggtatgcaccggatcacgactacggcccgcgcaaaagtgtgttcgccccgctgtttgccgtggagaaagccgccaccaccaccggtacttctattctggtcaaagccggtcgtgcagcactgatcccgttcacaccgcggcgcctgccggacggaaaaggctatgaactgctgatccagccgcctgcggacggttttccggaagatgatgatgtggctgccgcaacctttatgaaccatgttgtggaaaaagaaattttacgcgccccggagcagtatatgtggctgcaccggcgcttcaaaacacggccggaaggcgaaccgtccctctatcatgaccgggataaagtccattaa

SEQ ID NO: 275444 - DNA, 1233 bp, Morganella morganii
atgcagaacaaagcccctaaccgtaactggaaacgaaatctttatgttgtgtggttcggctgttttctgaccggcgccgccttcagcctgatcatgccctttctgccgctctatgtggaagagctcggggtgacagaccatgaggaactcaatctgtggacgggggcggcattcagcattaccttcctgttttccgccatcgctgcccctttctggggcaaactctctgaccgcaaaggccgtaagctgatgctgctgcgctccgcgctcggtatggcgattgtcatgctgctgatgggctttgcacagaatgtctggcagttgctgtttctgcgcgctctgctcgggctgctgggcggctttgtgccgaatgcgaatgccctgattgccacccaggtaccggtcaaacgcaccggctgggcactgggcacgctttccaccggcgctgtcagtggcgcacttatcggcccgcttatcggcggttttctggcggatcacaccgggttgcgtcctgtcttctatatcaccgccagcgtgctgtttatctgctttttcgtgacactgttttttgtccgcgaaaacttcacgccggtgtcacgcaaagatgccctcaacacaaagcaggtttttgcagcgataaaaaatccgcgcctggtaatctgcctgtttttcaccaccatgtgtattcagattgcggcaggttcggtcagcccggttatcaccctgtatatccgtgagctgggcggacatactgaaaacctggcgtttatcagcgggttaattgcctctgtgccggggctggccgcgctgatcagcgccccgcgcctcggaaaactgagtgaccggatagggccggataaggtactgatcgccatgctggcagtgtctgtgtttgttattctgccgatggcctgggtcacccattactggcagctgggtgccctgcgttttctgctcggcgccgtcaatgccgctctgctgcccgccgtccagaccctgattatttatcatatcacccatgaaattgccggacggattttcagctataaccaggcactgcgcgacgccggtaatgttacaggaccgttaatgggcgcctgggtggctgcgcatttcggcttcgcatctgtcttttatttcaccgctgcggttgtactgtttaatctgttttattcgtggtggtgcataaaatcgcagagcgccccgaaaattaaaccggccgatatcgggtag

SEQ ID NO: 275445 - DNA, 1524 bp, Morganella morganii
atgcaatcaacaacaaacaaaaaacgtactttcttcgggcacccttacccgctcagctcgctgttctttaccgagatgtgggaacgcttctccttctacggtatccgtccgttactgatcctgtttatggcagccaccgtctatgaaggcgggatggatattccgcgtgaacaggcttccgctatcgtcggtatttttgccggtgcgatttacctgacctccctgccgggcggctggctggcggataactggctcgggcagcgcatggcggtctggtacggctcaatcattattgcactcggtcacctctcgattgccctgtcggcaatctggtcaccaaagctgttctttgtcggtctgctgtttatcgttatcggtacagggttatttaaaacctgtgtgacggtcatggtcggtacgctgtacaaacaggacgatacacgccgtgacggcggtttttccctgttctacatggggattaacatgggctcctttatcgcgcctctggcgaccggctggttagtccctaacttcggctggcactggggcttcggtatcggtggtctggggatgttagtggccctgctggtgttccgcttctacgcggtaccgctgatgcgtcagtatgacggtgaagtgggtctggattccagttgggatcgcccgactgtcgcgcgcaaaaatgtcggtaagtgggttggcctggcggctgcggttatcgctgctgtcactgtcctgatcgcctccggcgttatcccgttcaacccgatgctggttgccaccaacatggtttacctcatctccgggatggttattctctacttcatctacctgtttgtgtttgccggtctggaaagcagtgaacgcatccggttatttgtctgttttattctgttagtcaccgccgccctgttctggtctgcgtttgaacagaaaccaacatcattcaacctgtttgcgaaggattacactgaccgtaacctgttcggttttgaaatcccgaccgtctggttccagtccatcaacgccctgtttatcatcctgctggctccggtgttcagttggttatggccggccctggcacgccgtaacatgaacctgagcagtatcaccaagtttatgttcggtgtcctgttcgctgcgggtggctttgcagtgatgatgatggcatccgagcgcgtgattgaaaccagcgccggtgtctcaccgatgtggctgaccttcagtattctgctgctgaccctgggtgaactgtgcttaagcccgattggtcttgcgaccatgacactgctggcgccgatgaaaatgcgcggccaggtgatgggtctgtggttctgtgccagtgcgctgggtaaccttgcagccggtatcatgggcggtaatgtccgtccggatcagctgatgaacctgccgggcttcttctcacacgtttctgttgccctgcttatctgtgccgcagtgctgtgtgtgctgattgtgccggtacgcaaaatgctgcaaagcgcagacaacaaatctgcctga

SEQ ID NO: 275446 - DNA, 720 bp, Morganella morganii
atgaaacgacctgttatctcattacgtagctaccggcaggaaaccctggagcacagtcatgatgacatgtggcaactggtgctgggcggcagcggcgcaatggaactgactgtcgacagcgacagcggttcggtggagcagggacggatggcggcgatcccgccggggtatcaccaccgtttctgcggcaccggtcataaccgccaggtggtacttgaactgcctgcggacagcctcttcttcacttcccctgattctctgtggtctgtgctgccggatgccacccgtacttatgtggactggcttatcagttatccgcagatgattgaacagcatccggaaagtgcgcgtatcctgctggcagagcagcttgcggcgcaactgcagccggacgggcaggacaggcgctggctgcatactctgacacaacagctgaccgcgcgtcctgattacccgtggacggtcagtgaaatggcgtcgtgctgtgcactatcggccagtactcttcagcgccgcctgctggcggccaccggtaaaaccccggcggtttttctgactgaaatacgtctgcgccgggcacatcatcttatctgccataccccgctgacactgccggaaattgccctgcgctgcggttacagtacccaatcttccctgaccagtgctttccgccgcttttacggcgatacaccggccagtctgcgcataaaaaaagggtga

SEQ ID NO: 275447 - DNA, 342 bp, Morganella morganii
atgacatcagcagaaattgaatgggccgattttgaaaaagtggaattgcgtgtcggtgtggtactgaccgcagagcttaatccgaaagcccgcaaacccgcctatatctttactgtggattttggggagtgcggggtgaaaacctccagcgcacaggttaccgcattatacaaaccggaagaattaactgggcgtcaggtattatgtgtgtgtaattttgccccgaaacgggtggccggagttaaatcagaagtgctgataaccggcgctgctaatgcggacggagatatcgttcttgcggagttttccctgccggtacctgccggtcaccgcctgatgtaa

SEQ ID NO: 275448 - DNA, 738 bp, Morganella morganii
ttgaaacgcctatttttcagacaacggcgacgccgtttgctcatcatattacttgttttcctggcgattctggcaggttacggggtatacaacgccattctgatgaaggcaaaaggcgttgaagaacattacactcaccgcggagagattaaacagtattctctccgtgacggcagccagctgaagctggacaccgaatcccgtgctgtggttgcttacgataacggcagccggtcagtaaaactgctgtccggacgggcacgttttgccgtcagcgaaaaccgtgaagaacagcgtccgttcctggtcaccgctaatggtgtgcgggtggaatccggcaacggtaactttgtggtggatattgctgataataaagtctccgtctgcccgctggatgaaaccgtgaccacgttttttgacggtaaaaccgaaaccgtggggccgggacaacggctggagattctgccggaaggccgggcaaaagtattccggcgccagtacaccgatatcgactggttatccggctcactggtgctgaataatatcccgctgtcagaagcgattgagatgatcaacagttaccgcgcggtgccggtagttctgctgaataatgataagaaagatattattgtggatcgtgtgctgcatctcagccgtctggatgaagaggttgaggagatgatgcgttccctcgggctgacccgtgaatcgctgccgggctcagaggcttaccgctga

SEQ ID NO: 275449 - DNA, 648 bp, Morganella morganii
atgctggatattatccattacccgctgtttttactgtccgtttttatctttgcagtaacgccggggccggatattgcctatgtactgggacaaagcctggccaacggccgcaaagccggtattttgtccgcactgggggtgatgctcggcagcagtgtgcatgctattgcaggggccgtcgggcttggggcgattattgctgcatcaccgacactgtttaccgtgattaagtatctcggtgcgctctatctcgcgttcctcggtgccaaaatgatcctcggtacactcagaaagcgcgggcagaccgctgatgataatgaagaagtggttattcagaaggcagccgcaaaatcgattctgatccgggggtttatcaccacactgaccaatccgaaagtgctgctgttttttattgcctttttcccgcagtttattgcggcaggcggcagttattatgcggaatctttcctgctgctcggcgcaacctatgccctgctcgggttctgcactgataccacgctggcactgattgccgggacactggctgcacggatctccggcagcccgaaagcgcattactggattgaccgcctcgtcggtactacctttatcgctctcggtctgcgtctggcatcagtggcccgctga

SEQ ID NO: 275450 - DNA, 585 bp, Morganella morganii
atgaaaaatatctttattattaacggttcaaaagaattcggcggctctgacggcaaactgaacgatcacatgacggatatcgcccgccgccatctgacagaaaaaggcatgaatgtccgcgttacccgtattgatgacgggtatgacgatgaacaggaagtactgaattacctgtgggcggatgtcattatttaccagatgccggcctggtggatggaagggccgtggattgtgaaaaaatacattgatgaggtatttacacagtctgatgaccgttttcatattaatgacgggcgcagccgccgtgacagcagcaaaaaatacggctccggcggtgtgctgaacggcaaaaaatacatgttatccgtaacctggaacgcaccgcaggaagcctttgaggatgaaacgcagttctttgaggggcggggtatcgacagtgtgtatttcccgctccacaaaaccaaccagtttaccgggatgacatcactgccgacattttcctgttttgacgtggttaaaaacccgcatattgatgcggatatccgccgctatctggctcacctggatgtgaatatcgcaggctga

SEQ ID NO: 275451 - DNA, 888 bp, Morganella morganii
atggaaacggatgatcgcctgagctgcctgaaacagttgttacagactcataccgcagagcgaagcggcgggtgggatacggccgttcccggtctcgcattgtgccggtggacggctccgtcacaggcacaaacctggacttatgagcccggtatcgcgcttgcggttcagggcgcgaaacggatcacactcggagataacacgtattgttaccgtcccggggatgtattgctgacatccgtggatatccctgcgatagcgcaggtctgtgaggcgtcggaacaggcaccgtttctggcactgctggtcagtcttaacctcagcgaccttccggcactgatgcaggaaagcggctttcagctgctgacttcagaacctgccatgccgcaggcagtgtgtccggtcacagaagcgttgctcagtgcggtctgccgcctggtggcgctgctggaaaaaccggacgatatcccggtcatggctccgcttatccataaagaaattctctattacctgctgaaaagcggccagggcgcacggctccagctgatggccgcacataataaacagtgccgccagataagcggcgtacttagttacctgaaagcgcattttgatcagccggtgtcggtggagacactctgccgccgggctcagatgagcgaatcctcttttcaccgccatttccgccgggtcacccggatgagcccgctgcaatatcagaaatggctgagacttaatgaagcccgccgtctgctgctggtggaatcggcggatgcttcggaagcggcttttcgtgtcgggtatgaaagtgcctctcagtttaaccgtgaataccggcgcttattcgggttaccgcccggacaggataaaaagcgggttcttctctga

SEQ ID NO: 275452 - DNA, 927 bp, Morganella morganii
atggcaatatcagcagcagatatcaccgcaggtctcggacacgtaaatactatcgccgaaagcggtgcacttaatggcgggctggctattcttgatgaaaagatcatggccgcagaacgcactaaaattgcgcagtcggtaaagaaaatgtatgcgacctatatttctcaggcgctgagcatcagaacgcataccgcagtgatggtcagtgcggacagcacacagcgcacacacctggacagagaggttatcggcggcaaaaatctgctggcggaaacggcggattattatgaaaaaggccgggagcaccgctcttaccgctttatgcgcaaagcggcggatatcgggcgtgtgcaactgaaacagaatctggcctccgggctgaccgcgccgctggcttttattccggacggcgggattagtaaaatggtcgcatcctgtgcgctgacggtgatggagcaggggaaagcgatacgccgcgtgcgcaaaatcaagcattatattcatgataaaaaagaggttgctgcagaaatcggtgaggttgaggcacaacgcaaatccgccaaatggagctgtaaaaccctcagcaagctcggcggcgatttacagcgcaatctgtataaactgaaacagtccgtggtggtgttacagagccggggactgagcacacaacagcggattgaccaggtgaatgctcacagccacaaccatctcggcagccatgatttatccgtgatccggggagagctgacggatctggcaatgagttttcatgaaagcctgcattatgtcgaaaaagtcaccaatatgtgcaccctgctggatgcggcgagttgtgaaattaaagcgcatatggcgaatatgctggaattactggaagcgacagaatccaccctgatgtcgcagggggataatttctttcgctga

SEQ ID NO: 275453 - DNA, 294 bp, Morganella morganii
atgaaaccggcggccagaagcggcgatatgcatctgtgcccggcacagacaccgcctctgccggtgccgcatgtcggtggcccggtactgcccgctccggcgacagtactgattggcggcttaccggcggccacgctgggacagatgtgtctgtgcattggtgtgccggacagcatcatcaccggcagtatgacggtgcttatcaacaacaaacccgctgcccggctgggcgacagcacggcgcacggcggcacggttgtcaccggtctgccgtcagtgctggtcggcggataa

SEQ ID NO: 275454 - DNA, 555 bp, Morganella morganii
atgctgaacaaaatgccttacagcagcgcaatgctggtgatgaaaaattattccccttccggggaagccgcagcgctggcggcacaatatccggcaccggcggattttctggtcgccgcgcagcagcaggcacattacggggatgccgtcctttttctggcgcacggactgccattgaaagaggcgctttggtggggatatcactgtgcgcagcaactgacagaatggagtgagcaggagcagcgtgtgctggagagtgtcaggggctggataacccgctccggtgaatctgagcgccgtgcctgtggtgatgcggcaaagcagcagggattatcctccgcagccggatggcttgcacaggcggtgttctggagtaccggcagcatgctggatgccggacagcccccgttaccggcgccgccgtttttatatgcacaggcactgagcggtgcaataaacctgatggcagtgatgcaggatagcgcacatatcgcagaacactaccggacattcctggcacacgggctggctgtggcccgggggaataaacaatga

SEQ ID NO: 275455 - DNA, 1887 bp, Morganella morganii
atggaaaactatgccgatcagccccgtccgcttaccgtgacgctggataacagtgcaccgtatgtggcgacccgtctgcatgcaaaggagtcgttatcagacggcacatggctggaagtgcactttctcagtccgtcaccgccggatcaggcgctgccgggtaaaatggtggtggtgacctgtcatgagcggacctttgccgggctggcacaacagattgaatgtgacggttttcatccggataaacaactctatttttaccgcctcacggcggtggatccgctgacattcctctgtcacgggcggcagcggcgcttatttcagaatcagaacagcagggggcagatcagcacattgctcagtctgcatcagttgacggcgttcatccgtttttccctcagcggtgaaggtgaaacccgtccctgtgtgtgtcagatggatgaaagcgacagcgccatgatccgccggataatggccggacagggctggttttgcctgcgtaatccggacaacaccacccaatggacaatcacggacggattacagcacgccccgtccgccggagagatctccgcccgcctgatcacaccgttccgtgcctgccgccgggtcagcagcggggtattttccgcagaaagctggtcacaggaacagcatcacagccgtactgagcagcatacgctctccggcagcggcaccacacaacagacacactattatgacgggcaatccgccacagcacagtttgccggtgaagcggcggcagttgcggcacattactatgaggcagggtcggcggcgatggcgctgtgtgccggtatgcgtttccggctgaatgatcatccggcggcggaatataacggcgaatattatatcagtgagattacacatgccattgactgcggtgaaagcagcggcagccccggatacagcaatacttttcgttgtcatcagacccggaccccctttcgcatgccgccggttcctgctccccgttatgacggcattcaggcggctaccgtcgttgcccgtgacggagacgaaacctgttatgacgcacaggggcgggtgaaagttcgtttccactgggaagaggataatcaggacagcgggttatctcaggcctggctgccggtgctttcacacagcgcgggcgccggggcggggattcagtttctgccgcgtgccggggatgcggtggtggtgcagtttctcaatggtgacccggataagccggtggtgaccggtgcactctggcatcagaatcacgcccggcctttcaccgacccgctgaccggcggcatatacagccgatcatccccggcgggtgcacggggggacggcaatcaggtgcgttttgaggataaacgggatgaagagtgtctggcgctgtcggcacagaaggatttaaccctcagtgccaacaatgactggacaacccggatcaaaggcaatatccgctgtgagacagaaaaaaatctgaccatcagcagcaaagaaaacacgcagcatctgagtgataaacagtggcaactgaaagcggcggaaggaatagcccagaacagcggaaaaaatctggcattacaggctgacagtgcactctcagcagatgcgaaaacgatcaccttatccgcatcacagacactgacactgacggcgggcggcagcaaaattgagctgtctgcttccggcatcacgttacaggcaccgcagattaccctgaaagggaacggcaaaatcggcctggaaagtgcggtgctggcgatgtccgcgcaggcaaaagcgcagctgagcggtgcgctggtggaaatcagcggttcggcaatgacggaagtcaaagccggggcgatggtacaaatcagcggtgcgctgacaaaaattaattaa

SEQ ID NO: 275456 - DNA, 3192 bp, Morganella morganii
atgaaaatcagaaccgcaatgctgtacgcgctggtgatcctgctgctggccggactgaccgcaatcgcctggtattattggctgacacagggcggcagtgtgctgctgccggtgtttgttgctttgctgagcctgtgtctggcggtttacgggctgatcaaaactgcatggcgggcagagacggatgtgcagcagttacagcggcagcagcaacggcgtgaactgcgccactatctgaaacagaccggccgccgcctgcggcgcagcggtggtgtaccccggcggaacccgggccggatcagtacttactggctgttgtgtgaggatctgccgcaggcacaggcctgtatgcgtcagcacggatttaccccggtggcgcaggagcaggagccgttctgctatcaggcgggtaatacggtggtccgcatcagcacaccggcgtggctcaccggtgacggcggccgggagagtgcacggcaactggtgcgcctgaatccgtctcagccgctgaacggatttattttactgtcaccggcgcctgcatttgccgcactcattgaagagcaggcggtacagtccgggcagcagcaccataccgcctgtattgccttttctgttttgctcggatgccgtccgccgctgcatctgatgcttcccggtctcggcaatgtgcctgcactgcgccgctggtatgcggatccgcagcgggcacagttttgtcacagcacggatttcagccgtgagcgaagggtactgccggatgccccgtttgcacagtttactgctgatttaatgctgtcattacagcaggaacaattcaccgcgctgacagcagaacaaccggagcataatgcggcggtgttgtcatttcccgcgcaactggcggcacatcttcatcagcggacgctgtatgcggcagcattacagcaccagcgctcagccggcacgcatctggtgctgtcatcggcattgttgtgtgcggcggaatgcgcgcatcagcatatcgccacaccgttgtttgaacgggtcattcatggccgtgatgaggttatttgtcaggtacgggaacggcgcaggctgatcggctattgcctggcagtaattttatgcctggcgggcacagccgctgccggtgtcgtgcagtggcgcagttttcaggaacagagagatttactgaacgggcagatggattatctgtcgcgggttgcggcagcaccggccggagagcgggttcaccgcctgcatcttttacagccggtgattgcggaaatccgccgtgaataccacagccgctggttttcatcctctttgctgccgttgtaccgggattatcagcagcagatccgcaatgcactcttcccgctgctggtaaaacagcaggaacagcgtctgcagcgggcggtggcagaatcatccccgcagttgttacaggctattgatgattaccggcaactgtttgcggatgaacaccgggggaaggacattggggatgcagacagcggcggtgacgttatttccctgctggatgattatccggtacagccgctgacagcagaggagcgccggttataccatgctgcgctggtgactcaggcacggcagaaagtagccatgtcagatcctgctcagcatctctatccggtactgcgggagcagtttctccgtaaacatgcagcagtgccgctggcaacgttatttccggctgatatcactccgctgtttcagccggataaccgatttttatcagtcccgtacacgatgaccaaaacaggctacagcgcctggcaggcgcagtgggacaatccggaatttcagacacagttttctgtccttatgcagcactggcctgacaatacagaaccggcaccggagagtgtcattgtgcaaatcaacaggcagtatgacgaggaatatatccgctactggcagcagtttttgtcatcgctgacaccgcatcgcgccggtacaccggaagctctgatcgccgcactgcaactgacagaacagccgttcagcgatccgctgattgcgctggtgcgggggatcagcagcaataccacgtttgcggcggtaaaaacggagacagggccggatctgaaatccggtcagcagacggcctctctgctcgggctgagtaaaatcagcagcaagctgagaaaagcagggaggctgcaatccgccttcagcaaatataaaaaagcggatgaaccggcaggaatgaatattaaccgcgttttttccgcctggcacgccttactgacagcggaaggtacaccgtcaccggcactggccgcatggcagcagtcagtggtatcactccggcagcactggcagcagggaatggcatccgctgatccgcaggaatggggttatcagcagttcatgcacggcggagaaccgccggagaccgggccgggaactgttccgccggttccggatatgttgctgcggcaatggcggcagaccgccgcacagttacaggccggactggcggcccgctatctcgacaaacagtggcagacaacggtgtatccgttctggcgtgatcggctcgccccttattacccgttcagccacaatgcgcagggtgtgaaaacggatgatctgcatgcctttctggctcccggcggcgtaatggatacttttatgcaatctctgccgccgggtcaccacagcgacccgctgtatgcggcactgagtcagccggaaacacagacagagcaactgagacagctgttttatgcggatgaccgtacggcactgaatatgcgaatctcactgcggccggtggcgctgacgccgcaactgtccggtttccggctggcacagggcaatgatgcactgatttatcagcacggcccggcagtctggagtgacttttactggccgcccgccacggatgcagagccgctgaccgcggactatttccgtcacggcaaaccggtttactccgcctcttatccgggggagtggggattgctgcgctggctgctgacggcgcagtctcagggacgtgccgcctcaccggagagtgttatcactgaaaacggttatatgttccggttccgcagccggatcaacggcagaccggtaccgtcaccggcggcgctgtttgcggagtaccgtctgccgccgtcactgctcagccggggaaatcccgctgaaaatccacaaaatcccgctgaccggtga

SEQ ID NO: 275457 - DNA, 666 bp, Morganella morganii
atggaaacagatcccggacacaatgtgctgatcagcgccgggcagccgttacttcaggcactgattatgctggcgcagaagggaacgccgccggatctcacgctgttccgtcagcagatgttacagggcgtgagccggttttaccggatttgtgccgctcaccggctccatccgtccctgaccggaaaaagtgcctttgtctggtgtgccgcgctggatgaggcagtactgagcacatcgtggggggcggaatcggtctggcaggaacacaccctgaccggcgcggtgtttcagaaccggcgcggcggcgaggcctttttccgctatctgcatctcgcgctgcataaccccgttccgctgcgggattttctcgaattacagttttatctgttatcactcggcttccggggggagtaccgcacacagccggaagcactggctgcctgttatacccggctgcgtcatattctgatgaacagcaggccgcaggcgctgtccgtaccgccggaccgctgcacaggccggaatcgtccggcgaaacgaatcccgctgtcactgattttttccggctcactgttgctgtgtgcggcaggccgggtggcggcagatctcagttatcagcagttattacagcaactgagtgatgcactgacggccctgttctga

SEQ ID NO: 275458 - DNA, 1257 bp, Morganella morganii
atgaacagtgaaaccgccggggtctggtggcaggagggattgtttctccagccggagcattttatccgcgagagccgcctgcacagcgattgtctgcgggatgtgacacaacagctgagcggcggaatggccggattttcccggctggtgacggatggatccctgacgagcgccggaaagctgacattgttacaggcgcacggcgtgatgccggacggcacaccgtttgtcacggataccccgctgagtatcagtctggacggattgtccggggatatgacctttttactgacactgccgctgagcagtgcaccggatcgctttaccgcaaaaccgctcagcgtgagtgaaaaccgggtggggcagacccgcgaaccggtgataatcagtgccgcgtatctgaatctgcagctgaaatgcctgtcacagtgccgtgacgatgagaccgggctggcggtcgcccgtctgtactgccgcgacggtgccggatacccgctgccggagccggaattctgtgcgccgtacctgtttgtgcaggacaacccgtggctgagccgccgggcggaagatatacgcctgctgctggcacagcggttgcagaagctgtacagcctgccggacgggaaaacggcctgtctccatttacaaccactgctgacacagctgcaaagcctggcggcgggtgatcgcatcaccagccgggatttttaccgtttctgtctgcatctgcaatcggtactgtgcacactggccgccgcgccgccgcctgaaccgctgccgtggcgtaatgaggatcatgccggtttgttctccccctgtattcagtcactgaaacagcttcttgccccgcagacccggcagcatgtgcaggcgctgaactgggatacccggttgctggcttcccggcgtttactgcggcttgcgctgccggaatccgcttttgcgcagcagagccgcctgatcctggagtaccgtgatgacagcggcaggcagccggatgccgcccgtacagcccgcctgctgaaactggccggaaataaccagatagcagcctgtgtcaataacgggctgaccggcattccgctgctgtcactgaacaacgcccctgacgggatcacaccatccccgggggcgatttattttgagccggatacccgcagcccgctgtggacagcggatgatccggtgctggcactgcatattgacggccagctgccgcatgcccggctgaatgccgttttgatcacacggaggtaa

SEQ ID NO: 275459 - DNA, 483 bp, Morganella morganii
atgaaacaccgtattcctttgtttatgtttatttttctgtttctcggtccggtatcctgtcagttcggaacactgccggaaaccggcatattacgggtgctgatccgggcagaagaaaacagtaacccgaacgcggacaaccagcctgcgccggttgtgctgcggatctaccagctcagcagtgacgaaatttttcagcgcgagcgttttatgccgctgtggcaacaggatcaggtcttactcaaagaacagctcctggcccgcaaagtgacggagccggtctatcccggcagccgcgaaacactgctgctgcaattacagcccggtacaacacatattggcgtgctggccggtttctctgcggcggcacaggcgaaaaataagcagataattgcggtgttaccgctgccggtaatgcaggtgtcactgttcatggacgggcagacgctgtcactcacggcaggagaaaacgatgaacagtga

SEQ ID NO: 275460 - DNA, 870 bp, Morganella morganii
atgtcattgacgattcggatagtcagcgcaccggagcacagtaacactctgccgcagtactgctttgacggcagagacggcaccatcgggcgtgatgcgcaggccgatatagtgctggatgacccgcatgcccgcattgaggatacgcacgccgtattccgctgcacgaccgccggttatatcctgacggataccagccgtgacggggtttttatcaacaaccggcaggatgccctcgggcacggtaccgactatctgttacaggatggcgatatgctcggcatcggagcgttccggctgctggtgtcctgtttttccccgctgaaccgtgcgccgcagccgctgaataccaccgatgaagaaacagcactgcgcagtttgtttacaccggcggatgataacagctgttttgatgatgacccgttcctcggcaccgcgccggtgaaaaaaccggaaccgcatgatatccgctaccgtttttcagcggtggcccggccttacggcagtcctgctcctgaaccggttccggaaccggagatcgcaccgctggtcataacaccgcctccggttgtttcactgccggaaacgccgctgccgccggtactgaccggtgacaaactggtgctgctgcagtcactgctgccggaaatcagccgggcactgagtgtggcggcggaaaaaatcatccgcgatatctctccgcaacacctggaagcactgcaccgcgaccagaaaattgccgggaaaattgactactggcagacctacaaacggtttttcagtcagcagattgcggatgaccacctgaaaagcaaactgacggattatttccgcagtgaattttacactcagattattcagtcatcatga

SEQ ID NO: 275461 - DNA, 2256 bp, Morganella morganii
atgctgactatcgatttgcatcaacttatccgccgcttaacgccgccgctgatgacggcactggaggaggcggcacaggagtgtgtccgccgccgccaccgcgcggtcacaccactgcactggctgctggtgataacgggcagccgtgagctgacctggtgtgcggcaccggcggacaacagtgcgctgcaatacagtctgaatgacgcactggcgctgctgccgcaggcggcggatgcctccccggtgtttgcgccggagctgacagaactgctgaaacagctctggctgcatgtctcgctgaatcagggcggacagcacatcagtgaaatccatattttacagctgctgcgccagacggcgtgcagcggtattccgtctgcggtgacggcatgggcgcaatcgctggatacacaatggctggcacagcagataatcgcactgccgcagccatccgcaccggcagcgggcagtaccggtggtgagacgctgctttccgcatatgcccgcgacctgactgccctggcgcgggcaggaaaactggatccggtgattggccgtgacagtgaaatccgtcagatcctcgatatcttctgccgccgccgccagaacagcccgattatggtcggtgaggccggggtggggaaaactgcgattgccgaagggctggctcaggcgatttgtgacggcaatgtgccggaacgtctgcgcagctgtgaagtgtgggaactggatctgaccgcgttacaggcgggtgcggccatgaaaggggaatttgagcagcgtctgaaaaacctgctggcggagatccgttccggcagctcagaaaaaatcatctttattgatgaggcgcacaccctgattggtgcaggtggcacggcaggacagggggatgctgccaatattctcaaaccggcgctggcaagaggggaattcagagccctggcggccacaacctggtctgaatacaaacagtttatcgaaccggatccggcgctgacccggcgtttccagccggtcaaaatcgcaccaccggatgaggccaccaccctgacgattctccgtaccctgaaaccggtactggagcagcatcacggcctgccggtgacggacgcggcctgtgaagcggcggtgcggctctcggtccgctatctgccggagcggcaactacccgataaagccatcagcctgctggataccgcctgtgccggattatcggtttcgcagtcggttaccccggacagtgcggcagaagccgcggatgataaccatattgcggcggtgattgcgctgtggaccggcattccggccggacatctggcggcggatgatatttcccgcctcagcagcctggaagcgaaagtcgcggagcgggtgatcggtcagaccgctccggtggcggcggtggctcaggctatccgtattgcccgcagcggactgaataacccgcagcggccacagggtgttttcctgatgtgcggcccgggcggcaccggaaaaaccgaaaccgcgctggcactgtgtgaggcactctgcggtgacgagcggcggatggtgacgctcaatatgaccgaatttaaagagccgcataaagtgtccatgctgctgggtgccccggcgggttacaccggttacggcaaaggcggggtgctgacggaagcggtgcgccgcaacccgtacactattttactgctcgatgagatggaaaaagctcatccggccattcatgacgtgttttatcagattttcgataaaggccgcattacagacagtgaagggcgggaggtcgattttcgtcacacgatcatcattatgaccagcaacgcggcggagaatgaaattgcggcgcactgccgggatcagcgtcccggggtgacagagctggtgccgctgatttttccggcgctgttacgtcatttccggccatcgtttcttgggcgcaccaccattattccgtattacccgctcagtgatacggaaatggcggcgattgcccggctggcgctggacagagtgggcaagcgcattcatgaaacctatcagtgtgagttcagttattcagatgaattggtgacttatctgttatcactgccttattcagcagaaaccggcgcaagggcggttgaacagggggtaacgggtaaacttctgccgcagattgccgaagcctgtattgaaaaacgcaggcagcagactgccattacccgggttttattatcagtcacggataataagcctgttgtttctattgattaa

SEQ ID NO: 275462 - DNA, 651 bp, Morganella morganii
atgaaccgttctgactggcccgggctgctcggtaccggcggagtgctgccgcgctatatcaccggaacggtggcggaatatgcacaggctcatcagcagaccgccccgcaggacttttttctggtttttgatactgtctgccgccggctggctgacaggctgcatgccggacaatccgctgctgccggtttaccgctgacaaggctgatgcagacactgcttccggaaccggcactctgttatccggcggcggcacagctatggggcggaaatacccggctgcgggtactgagcagggcggcctccgccttttttgcctgccgcacggaatttcagtatgccccgccggtccgtatgccgtatcacccgcccgccggaaccggcaaccgcctcggcggcggtgccgtgcccggtacacactgttatctgcgggccgcacatctgcgtgtgcaggtgtctgccgatccgctgcaaccccgcgaccactggcagcccggcggcgaataccatcattacctcgggcagtttatccgcacttttttccgccgtccgctgacgttttctgtcattttccggacggatgacacccgcatgatgcccgtgcaactcgccgccatgacatcacggctgggacgaaatacccgcctctga

SEQ ID NO: 275463 - DNA, 1725 bp, Morganella morganii
gtgcatgacaacacactgcactattttgagcaacagcggcagttgttgctggacgggctggaagccttccgccgccggcatccgcatcaggcgcagttgctggggatcagcgggcagacgataaccgatccgcagttgcgggcactgcttgacggtgtggcctatctgacagggctgactgctcagcaactggcactgaccgcgccgcagctgacggaaaccctggtccgcacggtatttcctgattatctgcgcccggtaccggcgctgctgccggtactgttcacgccgcagacgacggcacaaatgcaggtactggcggcggagacaccgttcaccacacacactgccgccggggaaaccattcactggcgcacacagcacccgctgacactgatgccgctggcgatcacgacacagcaatttatcccgcaggcggcaggctatacggagcaggaagagtcccgtaccgctgcctgttccctgcaactgacgttttcggtgaccgtgccgggagtttccctgtcagagctgaatctgatgtcactgacattgcattttaccggtgacggggatcttccctggctgacggatgatgcggtacaccggcagtgcgccgccatccggctgaacgccggggaagcagatatttttctgccgccggacgcgtgtcagcgactgccgctgacgtatcgtcctgatgcggaggatgatgcacatatgttgctgtatgacgcactgtggtatccggaacaggtggccggtgcagtgatctcactggcggatccgctgaggcactgcaacggacagactttcacactgacatttttcttccgtgacatgctgccgcatccggcgcgtttcgcccgtcaggactgtattgcgctgttccgcactgtgctgacaaactgtttcgcccatcagagtgaaccgctgcgggtatcgccggacagcaatccgcacccggtatgcgcggatacccgatatgatgtgcttctgcactccgctgagatggtgactgatatcaccgcactgcctgcacagccggtgccgcagttgtatcaccagctgatcacgcagccttctgcctgctgctggcagccggtgtgcggtacagagggaggggtgacacatcttaactgtctgttatccggcgaagcggcggaaccggaatatgtccggctctgggtggtacacgggcgcggcacacagggtgagcgggcggtggccgccgcaggtgaaaccgtgacaccgcagcaggctgatccgctgatgtatcatgcggttgccgctcagcgggcaatgcggctgccgctgccggtacagccggatccgtgtgcgctctttctgcggctccggcaggcccggttatctgatcttactgattctccggaagcgctgaaggcactgttgtcgctgtatgacaggcagaactcaccggtgatttccgggctgattgccgccattgaggagatcacatccccgcccggcgtgactgttcgtttttatcatcacctgccgctgaccattccggggcagcacatcactgtcacactggcacagcatactccggtggcaggaaccgcgtttttttccgcgctgctggaggcggttttcacggcgctgagtgatgaccatgaatttattcagctcacactgcgccgccgtaatgacagcggagcgctgtatcacggtccgctgagaacagccgatgaaccgttctga

SEQ ID NO: 275464 - DNA, 405 bp, Morganella morganii
atgagcctgctggaaagattgtgtcacgaagcggatgcaccgccgtatcagccctgcacagagcgggcggtcacggcgcatctgtaccggatcatcaatgcccgggcgccggtctggactgacggcagaaaaaacagcggtattgccgggtttggccagagtcatctgctgcgggcgcagggaaaatttcatctcaccgcgatcacacaggaaattgaaagtctgatccgccgttatgaaccgcggttacagagggtgagtgtcaccatcgtgccgcagtcataccggcagcatcagattcattttgaaatagcggcattgtgcggcggacgggaggtgtgtctgccggtttgcctggattttaacgccggacagctgataaacccggaggccaccggtgcatga

SEQ ID NO: 275465 - DNA, 1260 bp, Morganella morganii
atggcggatgttcagaccgcgctgcaccgggcggcggcacagcaggatcacaatcagttttgtgcactgataaaccattgtattcacatcatcgaccggttgtgcagcacacaactgcaacaggtgctgcatcacgcggacttttgtgcgctggaagcccgctggcgcagtctgcgtcatcttattgcccgggtttcatcatccgggcgggtgattatccgcctgctgtatcagcgcgaactgaatacggcggggggattgccgttcgggctgctgctggtggatcaccagatggcattcaccggtggtggtgagtatgacgaactctacaccgccacccggctggcggagctgggcgaggtatcgttatgtccggtgatcacagggaccgacccgcattttaccggggatgacctgcactggttttcggcagatcaaaacagaattgcccggattttgaacagcccggattactgtctgtggcaaaagttacgttgtcacgaacaggctcgctttttatacctcgcactgccgcgttttttgctgcgttatccgcataaaacaccacgctgcggttttgtttatcagccgggcaatcacagcggcggggagttatggggtaatgccgcctggctggtggtgataaatgttatccgcgagtttgaacggatcagctggttcggctttttgcgcagttataacagcagcggcacacagggggcaattgtggctgcgctgacaggcggggacagccttacgccgcaggagattatcacggaaaccaatctggcctgtgagcaggataatttctgggcagaacaggggctgacggcctgcacctcgctgcatctcagcgggcagtccggttttttcagttattacagtgtctggcagccgccggagccgcgctggcggcaactgactatgctgccggtgaatctgatggcgtgccggtttgcccatgctatccggacacagatccgcgacaaaatcggtaattttgattctctgtccgcctgtcagcgcagcattgaaaagtggttgaaacgctatgtaagtgatgtggattacggcgaggataccattatggccgattatccgctgcgccgtgcggcggtggtgatgagtgcggaccaggcagacccggcccgctatcagtgccgtatctgcctgcagccgcagtatcagtacgacatcagtgaggcaaatgtggatctcacactctggttttcgcggccgcagggagaggcgttgtcatga

SEQ ID NO: 275466 - DNA, 1482 bp, Morganella morganii
atgagtgacacttcgcagcagcaggcggcagcaccgcagggtacggcggaactcagttttctcgatcgcgcggtgcaggccactgtgcagaccccggcggataccacccgtgacctgatgaccgcactgacccgtcaggcaatggcaggtacggtgagctgggataaaaacctgacactcaccttgcgtaaggctatcacgctgattgataaacaaatttcgtcccagttatccgaagtgatgaccgctccggacttccggcgcctggaaggcagctggctggggctgcacaagctggtcagggagagtgacccgggggcggatttgaaaatccgcatggcggattacaccaaaagtgagctgctgcaacagtttgaaaatgcccccgcaattgaccgcagcccgttttttaactgtgtgtatcaggcagaattcggtaccgcaggcggccagccgtacggcgtgctgctcggggattttgagtttagttacggtgatgaggatgtggcgctgctgcgttacatcggcgaggtggccagcgcctctcatgcgccgtttgtggccgccgccgggggggcaatgtttgattttcagtcggtaacgcagtttgctgacggcaaaccggtcgctgccgggtttgatgccccggcatatgcgtcgtggaatgccttccgtgccgccgatgagtcgcgttatgtcgcgctgacactgccgaaaaccctggcgcgtcagccgtacggcaccggcggtaaaagcatcagcgggtttgaatttgaggaactgccgcagcgggcggacggctctgcacaggtatcgtcacaggatcagtttgtctggagcaatgccgcgtatgcctacgggttgctgctgacacaggcataccgccgcttcggctggtgtacggcggtgcgcggggcggagaatggcggcaaagtggataatctgccgaattatatctaccgcaatgatgcccgtgacgttgttcagctttgcccggcacaggtcaatctcaccgatgagcgggaaaaagagctcagtgacctcggttttctgccgctggtgcactataaaaatgcggctcacggcgtgtttatgggggcgcagacggtgcataagccgaaaatctatactgatccggccgcgaccgccaatgcggcgatttccgccagactgccttatgtgatggcgagcagccgtattgcacagtatctgaaagtgatagggcgtgaccgtgtcggctcgaatctctcggcggcagacgtggaaaaatccctcgatcgctggctgcatcagtatgtcaatcccaatgctatcggcaatgaggccaaagcgactcatccgctggcggaagccaaagtcacggtgacggatttaccgggccgccccgggatgtatgcggcggtggcgtggatccgtccgtggttacagatggaagccctcactgcctcgctgcggatggtggcggatatcccgggcgggtaa

SEQ ID NO: 275467 - DNA, 504 bp, Morganella morganii
atggcaatgaatgcacagcacaagcgggtgaataaaaaccgcgtcagtattacgtatgatgttgaagtcaatggtgaatcagaaaaccgggaactgccgtttgttgtcggggtggtcggtgatttttccggacataaaccggcggataaaaaatgtgcgccggaagaccgggaatttaccggcattgataatgacaattttaatgatgtgatggcgcagataaacccggaactgacttttaatgtcaccaataccctcagcgatgacggcagcgagtttccggtggaactctccttcacgtcaatggcggattttcatccggaaaacctcgtgaaccagatagcgccgctcaaatctcttgtcgaaacccgcaaccagctgaaaaccctgctcagtaaagcggatcgctcccgcgaccttgagcagctgcttaaagagatcctgcagaatacggaggcactcagttctctgaatgccgaactggctgtgccggaggcaggctga

SEQ ID NO: 275468 - DNA, 519 bp, Morganella morganii
atggcaagtatttatatgcgaattgatggcgttgatattaaaggtggcgcaacggttatcggcctggacggcgcgaactggtttgcggtggattcctacagctggggcggctcccgtaatgtggcgatggatatcggtaacggcaataacgccgattccggtatggtcgcgattcagccggtcagcgtggcaaaacagattgatggtgcatcggaagatctgctctctttcctgtttaatccgggcaaagaaggcaaaacggtggaaatcgccttcaccaaaccggaagcggacggctcgggcgcatctgtttatttccagatcaagctctctcatgcccgtctgaccggctataacgtcagcggttatgacggcgcacagccgcatgaaatgatcaccttctcctatgtggaaatttctcagaaacattcctatgaactggaaggcggagagctgaaagagggcggtattgtcacctacaacctgccgcagggcaaactgctgtccggcgcgaaataa

SEQ ID NO: 275469 - DNA, 1173 bp, Morganella morganii
atgccattgtctcaggatgagcagaaaacactgtggttacctgtctgtgaaagacagccgcagggggagtatttaaaagcagatggtgcccgttaccggccgttgcgtaatctgttcaatattgcccagtcctcgctgcgccgcctgttacagcagacggatgaagaaagcagggcacagcaccggcagcagatgctcgccgctcagactgcactggcagatgcgctgcttcctgttctgactgacacggcccgtgatatcagcctttccggctggtatctctggtgtcagatattacaggatccgtcactgcacgcccttgagcagtcgctcgcctggttctccgttcagataacaaaacactgggagcaactgcccccgcagcatcaggaagacccgcaggcggagcagataaaattacaggaactgagtctgatcctgggctccggcaccgaaaattgtttgttttacagtgcgttgctgctgctgccggttacggatgacatcccgtattaccactatctgcaatgtcagcaccggggaatactgccggagtgcccggcacacactgcgcaatcacaggcggatgcacggcagcgtattgatgtgctgacacagtgcctggcgcacttacagccgctgacggcattttttactgaacggggcgcgggcagcacggtatcaccggttttttttacggaattactgaccggttaccgcagtgcagtgatggccgtcagcggtctgacactctctgtaccgccggtcacagaggctctgccggaacaaccgccggagaaagcggcttcgccggttgcggagcaccccgcacgcccggatttccctgcactcagccagcgcaatcaccacaatcgtgataccgcattgcggcaactgcgtgaaatctcccgctacttcagggacagcgaaccgcacagtccaatctcttacctgctggaaaaagccatccgctggggacaaatgtcactggccgggttgtggcaggaaatattactggaagacaacagcacactgctggaccggatattttcactgaccggtctgaatgatatgcagatgacagaattaccggaaccggaaaacgatacggcatctgcagatgaaaacccgaccttaccggcagagcgcggcaataccgcactgcgctggtaa

SEQ ID NO: 275470 - DNA, 402 bp, Morganella morganii
atgtggttaactatcatgagcaatgtaattgcgtttactgatgcggacaccaatccctgtatgcagtgcggggcgtgctgtgcctatttccgggtctcgttttatcacggggaaacggacagtacgggcggcgtggtgccggcagagatgacagaaaaagtgaatgattttatggcctgtatgaaaggcactgatcagaaatccccgcgctgtatcaatcttcagggcgaagtcggtcagtgtgttgcgtgcagcgcttacgcacagcgcccgtccccgtgccgcgagtttgatcagtcatgggtcagcggtgtacacaatgccgcctgtgaccgggcaagagccgcacacggcctgccgccgctggagccgccgtcccgtcacaatgatcacgccgcctga

SEQ ID NO: 275471 - DNA, 183 bp, Morganella morganii
atgagcgattatgcacagagtgttgctgatgtggaaaaagccattgagagtaacagtatcactgaaatgaacgaactgatggtcagcctgggtgacagcaacccgctgccgtatgaacagcgttatgaattacagcagcgcctccgtcaggcgataatggatcacggaaaaatacatcactag

SEQ ID NO: 275472 - DNA, 576 bp, Morganella morganii
atggaagtatcaaactattcaccgttactgagctattacgcgtacatcaagaagtttattgcatcgccggccacgatgggaacgattaccccctcatcacgctggctgtgccgtgcaatggttcgtcacgtcgactggagcggtgtgcagcattttgctgagctgggtgccggtaccggggtgattacccgtcagattctggatcagatggatccgctggctaaactggatgcctatgaaattgacccctattttgtcagcctgctgaataaatttcaggatggccggctggggattttttctgactcagcagagaaactgaaccgcccgtataatgtgattttctccggtctgccgtttctgtcaattgaccgccgcaccgggctgcgtattctgaaagcggtgcgtgacaatatcgaactcagcgacgggcagtttattctgttccagtacaccaccaaatttgagaaatacctgcgccgttatttccatttccgcaaagagcgtgtattgttcaacgttccgccggcctgggtgtatatctgcaccccgaagagacgttataccaataactga

SEQ ID NO: 275473 - DNA, 453 bp, Morganella morganii
atgttaattatcgcccccgccaaaccggatcatttcccgcgcctggttgccatctgggaatcatctgtccgcgccacacacgattttttatgtgaggctgatattggaaaactgcgtccgctgctgctcaatacctatctgccgaacctgaatgtggtggtggcacaggatgaaaacggtgagattcatggttttctcggcacagacgcgaaccggattgagatgctgtttgtggatgcggctattcgcggtaaaggcaccggtaaattcctgctgaattatgccgttgagcagttacaggcggatgagctggatgtaaatgaacaaaacccgcagggcgctggcttttaccgccatatgggttttgcacagacaggccgttctgagctggatggtgagggaaatccgttcccgctgctgcacatgaaatacaccggcaaaacagcgggataa

SEQ ID NO: 275474 - DNA, 882 bp, Morganella morganii
gtggcatctatcagtaatgggatcggcaataccccgcttttccggcttgcacggctgggtgagggcagcggcgtagaaatctgggtcaaaccggaaggcaataaccccggcggttcggtaaaagatcgtgcggcgaaaagtatgattgaaggtgccgaacagcgcggggagatccgtcccggggatacgctgattgaagccaccagcgggaacaccggtattgcgctggcgatgatcgcagcgattcgcggttataaattaaagttgctgatgccggaaaatatgagtgccgaacgtcagtccgccatgaaagcttacggcgcggagctggtgctggtcagccgggcacagggtatggaaggggcgcgggacctggcgcagcagatggcagcggacggggaaggttatgtgcttgatcagtttaataatcccgataacccgctggcccattaccggacaaccgggccggaaatctggcagcagacggacgggcgtatcacgcactttgtctcagctatgggcactaccggcaccattaccggggtggcgcgttatctgaaagaggtcgcaccgcagatcaatatcaccggtctgcaaccggcggaaaacagtcagattccggggatccgccgctggtcaccggggtatctgccggggatttttcagccgcagctggtggatgatattctggatatcacacaacaggaagcagaagatacgatgcgccagctggcacaacaggaaggcattttctgcggggtcagttccggcggcgcggtggccggtgcactgagaattgcaaaagcgaacccgggagcggtgattgtcgccgtaatctgcgatcgcggcgaccgttatctttcgaccggcgttttcggctga

SEQ ID NO: 275475 - DNA, 1083 bp, Morganella morganii
atgagcattgaaatccgtcatctgacacaccatttcggtgcggagccggtattacaggatatctcgctgtcggtggcggacggcgaaatggtggcgttgctggggccgtccggatccgggaaaaccacactgctgcggattattgccgggctgacccctcatagcgccggagaattgtatatcagcggggaagaggtttccgggctggcggcaggggagcgccgggccgggtttgtttttcagcactatgcgctgttccggcatatgacggtgtttgacaacattgcattcgggctgacggtactgccgcgcaaaacacgtccgtcaaaaaaagaaatccgcgctaaagtgatgtcactgctggaaaaaattcagatgccgcacctggcggatcgctatccggcacagctttccggcggacaacaacagcgggtggcactggccagagcgctggcggcagagccgcgcattctgctgctggatgagccgttcggtgccctggatgcaggggtgagaaccgaactgcgccgctggctgcgtcagctgcatcagtcgctgggatttaccgctgtattcgtgacacacgatcaggaagaggcgctggaggtggctgaccgcatcgtggtgatgcgcggcggacatatcgagcaggtcgcggtacctgaaagcctcggcaatgatgacagcaaccgctttgtaacagagtttcttggtcagataaatattttccgcggtgatatcgctactgatggtggagtgcggattggcggcgtacgccagccggttgccgcactgaccgccggttccgggccggtatcggtatttgtgcgcccctggtcgctgacattgcagcataccttttcggcggatgcggttgcagccagggttgtgaccatccgctcacacgggcattaccgcactgccgtggtgaccacggaagcggctgaagatgaagtgacggtcattttaccgccggacacccgtgccgccgccggtgattctgtctggctgacaatcagggagttacggctgtttcgcggcgaagacgaactggcattgctgccgcaggcacagtgcgcataa

SEQ ID NO: 275476 - DNA, 843 bp, Morganella morganii
atggctgatacactgcgccgccggcgtttcccgtggcagaagtggctgctgatttctgccgggctgctgctgacatttttcatcctgattattccgctggtgtggatttttgtgaccgcgctgtctgatggcatcggcggtgtgatccgcgcactggcggaggcggatatgctgcacgctatctggctgacagtgattgtggcgctgatcaccgtgccggtgaatctgattttcggcacactgctggcgtggctggtgacacggtttcgttttcccggccgccagttactgctgacactggcggatctgccgtttgcagtatcgccggtgatcgccgggctgttgtatctgctgctgtacggctcaaacagctggctgggcggttttctcgaaagctcgctggatacccagattatgtttgcgttgccgggaattgtgctggtaacgattttcgtgacctgtccttatgtggtgcgggaactggtgccggtaatgctcagtcagggtgcacaggaagaagaggccgccgtgctgctgggggcaagtgcgtggcagatctggtggcgggtgacactgccgaatatccgctggccgctgttttacggcgtgatcctgaccaacgcccgcgctatcggggaattcggtgcagtgtcagtggtttccggggcgattcgcggggaaaccttcaccctgccgttgcaggtggaattattacatcaggattatcagaccgtggcggcatttaccgcatccggtctgctggcactgatggctgttgcgaccctgtgcatccgccacggcgtgatggcatatcagggatcccggaggaaatatgagcattga

SEQ ID NO: 275477 - DNA, 828 bp, Morganella morganii
atggcaaggcgggtgttgccgggattcggcctgtccctcgggtttacgctgctctacagcgggctgatcctgctgctgcccctcactgcactggtgttacagctggcgcagatgagctgggcgcagtactggcaggtcattaccggcccgcaggtggtcgccgcctataaagtcacattgctcgccgcccttgctgccagtctgtttaatgcagtgtttggtgtgctgatggcctggatcctgacccgctaccgctttcccggccgccgcattctcgacggcctgatggatttgccctttgcgctgcccacggcggttgcggggctgacactcgccactctctttgccccgaacggctggtacggccgtttttttgattcgtttaatatcaccgtggtgaatacctggattggtattgcggtcgcgatgatgtttaccagtatcccgtttgtggtccgcacggtacaaccggtgctggaaactctgaaaccggagtatgaggaagcggcagaaacgctgggggcttcgcgctttcagatattccgccgtgtgatctggccggaaatcgccccggcagcgctggcgggaaccgttttgtcctttacccgcagccttggtgagtttggtgcggtgatttttatcgccggtaacctggcatggcagacggaagtggtgtcattcctgatttttgtccgcctccaggagtttgaatacccggcggctgcggcgattgcctcggtggtgctgatgacttcgctggtgttattgctggcggtcaatattattcagagccgcgccggattgcgtaccgggaggtctcatggctga

SEQ ID NO: 275478 - DNA, 1017 bp, Morganella morganii
gtgaaactgtctgtcaacgctgtattacctgccggtctgctgctcctttctgctgtatggagcggcgctgccggtgctgctcagttactgaatagctcctatgatattgcccgtgagctgttcacggaaatcaacccgctgtttgaaaagcagtggaatgcggaacatcctgatgatccgctgactatccgccagtctcacgggggttcctcaaaacaggcgctggcgatattacagggactgcgggcggatgtggtcacttataaccaggtgaccgatgtgcaggttctgcatgataaaggtaatctgctggcagcggactggcaggcgcgtctgccgaataacagttctccgtattattccaccatggctttcctcgtgcgcaaaggcaatccgaagcagatcaaagactgggattccctgttgcgtgatgatgtaaaaatcgtttttccgaacccgaaaacctccggtaacggtcgttacacctatctggctgcggaaggtttctggcagcagaaaaacggtaaaaacagtgctaaaacacaggaacagatgaaaaaattcctcagcaatgtcgcggtatttgataccggcggccggggagccacgacgtcatttattgatcgcgggctgggcgatgtgctgatcagttttgaatcagaagtgaataatatccgcaatgaatatggcgcggatgattatgacgttattgtcccggcgtccaatatcctggcggaattcccggtggcgcgggtggataaaaacacggaaaaaaacggcacacaggctgttgctgatgcctatctgactttcctgtacagcccggcggcgcagacaaaaatggcgcagtttaattaccgggtgactgatccggatgtgatggccgccaataaaggccatttcccgccggtgaccttatttaaagtggaagatcagttcggttcatggtctgaagtgatgacaagccggttcaattcaggcggtgaatttgacaccctgatggctcagggacgctga

SEQ ID NO: 275479 - DNA, 168 bp, Morganella morganii
atgcttgagtttttcagagaaaactggtttctgcttatgctgctgatttgcccgctgatgcacttctttatgcaccggggacacggttcacacggcggttgtgatcataatcagcataacgaaaaagcacctgcgtcacaggaagagaagaaacatatcgatgcataa

SEQ ID NO: 275480 - DNA, 897 bp, Morganella morganii
atgtcacaagcacaaagcggtattctgccggaacactgccgtttcggtatttttattgaagcaaacaccaaaggtgatttaccggcgatccggcgtggttgtcaggttttcctggcagcgctgaaaaagttacagacacagtttgcggctgatcagctgagtgccacggtggcattcggtcatgacctgtggcgtcagctgggcagtcagagcagtgcaccggagctgaaaaacttccgtgaactggggcgcggcctggcgccggccacacaatatgatttactgatccacattcattctcagcgtcatgatatcaacttctcgctggcacaggcagcggtggcggcatttgcggatgcggttgagattcagggcgaaacccacggcttccgctggacggaagagcgtgacctgagcggttttatcgacggcaccgaaaacccggaaggggatgagcgcccggacgtggcactgatcgcagaaggggaagatgcgggcggcagttatatcctgactcagcgctgggcacacagcctgaataaatggacccgtttttctgaagagcagcaggaaaaaatgattggccgcaccaaagcagacagcacagagctggatgaaaatgtgcgcaatgtaacctctcatgtttcccgcgtggtgattgaggaagagggcgaagagctttccattctgcgccagagcctgccgtacggtactgccagcggtgagcacggcctgttctttatcgcgtactgcggtcgtctgcacaatattgagcagcaattgctgagtatgttcggcgaaaccgacggtaaatttgatgatctgctgcggttcagcaaaccgaaaaccggggcttattattatgcgccgtcgctggaacaactgagtgcgctgtaa

SEQ ID NO: 275481 - DNA, 594 bp, Morganella morganii
atgaagtgttatcaggcaatgaagctggccgccgcggccggtgcggtactgatgctgaacgggtgtagttcgttttcatggtcatcattatcgccggtaagctggttcagcagcagcgcgctgacggtaaccgcacagggggtcggtggtgtgaatagtcagacggccatgaccgaaacggcgatcagtcagggactggacgataaatatacactgcgcggtggtatgcagaccgagcaggggcagatcgttaaaatttttgaaggccggaaagatgataaaacggttatccgtctgtccgggccggaaaatggtaccgtgcagcgcattgtcgccaatgatgcggatatccgcacggagtgggacaccaaaaccggaaccctcttttcggatatctatccgcaggccgttgccggtgcctgtaccctgaccactgaatttgatgacagcgcacaggttatctgccgttcaccgcaaaccccgcgtgtttcctatgttttccgcggaacctggaacggccctgaaacactgatgccgtcagatgatattctgaaaaactggacagtcagttatatcgtctgggccaataaataa

SEQ ID NO: 275482 - DNA, 414 bp, Morganella morganii
atggctgaaatgacattcacatcatcgactttttacctgttttcagcggttgttctgacaggtacattctggtttcagcctgctgcggctctgccgtcattttctgcctatgagtatcatcagagcacagtaaaatgtgaaacaccacaacgctttatcatcaagcagctgccctatctgcaggataacagccgggtgattctggaaggtaatattcagtctcagatttcagcggagcactatctgctgggagattacagcggtatcgtcgaggtaaaaatccctgtggatttatgggggaaaaagattatcacccctaatgataccatccgcattgaaggcggaatggaaaaagaccgccatgccattgtggtaaccgccgatacactcagtgtggtcaaccccggcagttaa

SEQ ID NO: 275483 - DNA, 432 bp, Morganella morganii
atggacattcgcacatttcagcaaggcgattttgaagaggttgttgcgctctgggagcgttgtgatctggtcacccccccggatgacccggaaaccgtaattgagcggaaaatggcacatgatccggccctgttcctggtggcggaagtcaacggcgaagtggtgggcacactgctgggcggttatgacggataccggggctatgcctattatctggcagtgcatccggaatttcagggacggggaattgctaatgccatggtggcgaggctcgagaaaaaattactggcgcggggatgtccgcagttactgctgtcgattccggatgataataccgccacgctgagcatgtttgacaaactggcctacgacgaatgtcagcaggacagcctgacctacagcaaacggctgatcacagatccggaatattaa

SEQ ID NO: 275484 - DNA, 906 bp, Morganella morganii
atgaatatccctgatagtgacagtgttaaagatttttttctcagattacaggattccctctgcggacaactcgccgcctgtgacggcggtgctgagttcagcgaagataagtggcagcgggaatccggcggcggcggacgcagccgggtactgaaatccggcgcactgtttgaacaggccggtgtcaatttttcacatatcagcggggacaacctgccgccgtctgccacggcacaccgcccggagctggccgggtgtcactatcaggccatgggcgtttctctggtacttcatccgcataatccgtatgtcccggccgcacacgccaacgtgcgcttttttattgccgaaaaagccggcagtgacccggtctggtggttcggtggcggttttgacctgactcctttctatcctttcacagaagatgccgtacactggcacagtgtcgcccgggatatctgcacgccgctgggcgaagatgcctggccgcgttataaaaaatggtgcgacgactatttttatctgaaacaccgcagcgaagcgcgtggtatcggcggcctgttctttgatgatctgaataagcccggttttgaggaatgctttgccttcacacaggctgtcggcaacggctttacccgggcttatctgccgatcgcggaaaaacgccgttccattccttatggtgagcgcgaacggcagtttcagctctaccggcgcggccgttatgtggagtttaatctggtgtgggatcgcggcacacttttcggtttacagagcggcgggcggaccgaatccatccttatgtcgatgccgccgctggtgcgctgggaatatgactaccaaccgcaggccggttctccggaagccgcactgagtgattttcttatcccccgcgactgggtctga

SEQ ID NO: 275485 - DNA, 1101 bp, Morganella morganii
atgtcagcacatgccccgcgctattcatttttaccgccctggatcctgaaaaaacgcctgcttcatgagggggatcacgaagagactcagttatgttatcagcatatgcagcggttgctcggttaccgccgcctgccggaaacagacatgatgcctctcagttatgctgctctgccggaatccgggtgcccttcgcaggcacaccgccgggtgatgcatctgaaaaacctgaccaccgttccggatctgtattaccgtgaagaccggaaagcagaaaacccgcagccacatatgcctgtacggcaggatacagataccgataatatgtttgagtatcttgatatcatttacggtttttttgatgatgtctttgattacaaatcctttaatgacagcaatgccaccatctccgccatgacacattacggacgcggctactgcaatgccttctggaacggcgcacatctggtgtttggtgccggcgatgcggggatgagtgtctctccgctgtttatgagctttgcccagctggatatcgccacacatgaattttcccacgctgtgattgatcacctttccccgctgacctacagccatcagtccggtgctctgaatgaatctgtctgtgatgtgtttaccgttatgctgggtcattaccgaggccgtcatgccagccatcagggggactggcatatcggcagaaccttgttcaataaacaaagcggaattaaagcactgcgttccctgtcgtcaccgggaagtgcctataatcatccggtgatcggcaaagataaacaggtggcacatatgcgggattatattgcactgccggatgacccggagaatgataacggcggcgtgcattgctactccggcatcccgaaccatgcattttaccactttgcctccgccctcggcgggtacagctgggaagtggccggacagatctggttcgacacgctgcgcagaggcaacctgccgccggagtgtgatttcctcaccttcgcccgcgaaaccctgcacgttgcggatgaaaactatgatgaggaagttgcagccgtactgatgagcgcgtggaaagccgtcgggctggagccgtga

SEQ ID NO: 275486 - DNA, 1506 bp, Morganella morganii
atgatacctgtcgttgctctggtcgggcgtcccaatgtcgggaagtccacattattcaaccgcttaacgcgtacgcgcgatgcgttggttgctgatttccccggcctgacgcgggatcgtaagtacggtcgtgcagaggttgagggacaggaatttattattatcgataccggcggtattgacggcacggaagagggtgttgaaacccacatggccgcgcaatcactgctggcgattgaagaagccgatattgtgctgtttatggtggatgcccgttccggcctgatgccggcggacagcggtattgccaaacatctgcgcagccgcgataacaaaaccacctttgtggtggcgaacaaaatcgacggcatcgatcaggatcaggcgctgggtgaattctacagcctgggtctgggcgaagtggtgcctatcgccgcctcacacggacgtggtgtcagtcagctgatcacccgtgcactggtgccgttctacggcgagccggaaagtgaggatgatgagcgcgagttaaccgaagaagaggctaacgccgcttactgggcagagcaggaagccctggcacaggcagcagaaacggaagacggtgaagaggaagatgatttcaacccgattgatcagccgattaaaatggcgattgtcgggcgtccgaatgtcggaaaatccacgctgaccaaccgtatcctcggtgaagagcgtgtggtggtttacgatatgccgggtaccacccgtgacagtatctatatcccgatggaacgcgacgggcgcgagtatattattatcgatactgccggtgtgcgtaaacgcggtaaagtgactgaaacggttgaaaaattctccgttatcaagacactgcaggcgattgaggatgcgaacgtggtgctgctggtgattgatgcccgcgaagggatttcagaccaggatctgtcactgctgggctttatcctcaatgccggccgttctctggttatcgctatcaacaaatgggacggcatgaccgcagacgatcgcgaacacgtcaaagatatgctggaactgcgtctcggcttcgttgattttgcccgtatccactttatctccgcgctgcacggcagcggtgtcggtaacctgtttgactcagtacaggaagcgtatgactgcgcgacccgccgtgtcagtaccgcactggtgacccgcatcatgaaaatggcagcggaagatcaccagccgccgctggttcgcggccgccgcgtcaaactgaaatatgcgcatgcagggggttataacccgccgattattgttatccacggtaaccaggtgtcagatttaccggatggctataaacgttacctgatgaactatttccgtcagtcactgaaagtgatgggaacgcctatccgcatccagtttaaagagggtgaaaacccgtttgcggataagaaaaacgtgctgacagcgacccagctgcggaaacgtaaacgcctgatgtctcatattaagaaagggcgttaa

SEQ ID NO: 275487 - DNA, 1173 bp, Morganella morganii
atgcaactgcgtaaaacactgctggtaggattagtcgcctctgtgctgctggccggctgttcaagtgaacaggatactatcgtgatgtcaccactgccggaagtgacaagtcagttcaccccggaaaccgtgtgggataaatccgtcggtgacggtgtcggtaaatactactctcatctttccccggcatgggaaggatccagtgtctatgcggctgaccgcaatggcctggtcaaagccctggataccgattccggtgttgaaatctggtcagtgaatctggcggaaaaaaccggtttcttatccgcggatatcccggcgatgttatccggcggtctgaccgtttccggtgaacacgtttatgtgggtacagagcgcggtacgctgatcgccctgaacgcgaacgacggtgaaatcgcatggacagccaacgccggtggtgaagtattgtcccgtccggaagtcagtgacggcctggtgctggtgcataccggtaacggcctgttacaggcatttgataccgcgtccggcgaacagcgctggagcctgaacctggataccccgagcctgtctgtccgtggtgaatcagccccggctgtggccatgggtgcggcatttgtcggtggtgacaacggtcgtgtcagtgcggttatgctcggccagggtcagattatctggcagcagcgtatttcccagacaaccggtaccaccgaaatcagccgtctgaatgacgtggatatgaccccggttgttgctgacggtcgtgtttacgctatcgcgtataacggcaatctggtggcgatggatatgcgcagcggtcagattctgtggaaacgcgatttcggttcagtcaacgaactggtgctggatggcgaatccctctatgttgttgaccaggatgataacgtctatgggctgcgcgcagcggatggcgtcaccatgtggtcacaggataaattactgcaccgtaatctctccgcaccggaaatctttaacggctatctggtcgtgggtgacggtgaaggttatctccactggctggatacctccaacggacagttcgtggcgcagaataaactgaacagttccggtattctcagccgtccgtcgattgccggtgataaactgatggtgcaggcccgtgacggacgcctgtacctgctccgccgctga

SEQ ID NO: 275488 - DNA, 618 bp, Morganella morganii
gtggaagtctataccacagaaaatgaacaggtatcagcgctgaagaatttctttgtcgaaaacggcaaagcaatcgcggcaggtttgatcatcggtatcggcggtattgccggctggaactactatcagtctcaccaggtcaccaaattacaggatgctgcgattgcctatgaaacggcgatcacagcaaaaggcaccccggcagagcagaccgcccgtctgcaggcttttgcgaaagaagccaataataactacggtgctatcgccggtcttgatctggcgatgaaagcggttgacagcaatgaccttccggcggcagaaaatgccctgagccaggcgctgacaaagaccgataatgaagatttaaaagatctgattaatgcacgtctggcccgtgtacagctgggtcagaaaaaaccggatgccgcgctggcaaccgttgcggcagtgaaagggaaaggctgggcggcttacgcacaggatatccgcggtgacgccctgttacagaaaggggatgtgaaaggcgcgcaggaagcctacaccgccggtattcagagtgaaggtgccgggactatcaaatccgttatgacattcaaactcgataacttagccgggtga

SEQ ID NO: 275489 - DNA, 1281 bp, Morganella morganii
gtggcgacaaaaatccaatctgttcgtggtatgaatgattatctgcctgctgatactgcggtatggcagcgtattgaaaacacgcttaaacgcattctgacaagctacgggatcagtgaaatccgtacgccgattgtcgagcatacccccctgtttcagcgcgccatcggtgaagtgactgatgttgttgaaaaggaaatgtactcttttcaggaccgcgaagaaaatgtgagcttaacactgcggccggaaggaacagcgggctgtgttcgtgccggaatcgagaaaggtttactgtacaatcaggaacagcgcctctggtatatcgggccgatgttccgccacgagcgtccgcagaaaggccgctatcgtcagttccatcagttgggtgcggaagttttcggcctgagcggtccggatatcgatgctgagctgattatgatgaccgcccgctggtggcgtgagctgggcattgcggagcatgttaccctggaactgaactcaatcggttcgttacaggcgcgtgcaaactaccgtgaagcactggtctccttcctggaacagcacaaagacaaactggatgaagactgcaaacgccggatgtacaccaacccgctgcgtgtgctggattccaaagataaagttgttcaggaactcctgaacgatgcaccggcactgtttgattatcttgatgaagaatcaaaagtccactttgacggcctgtgtgccatcctggatgctgccggtattcagtaccgcatcaaccagcgtctggttcgtggtctggattactataaccgcaccgtgtttgagtgggtaaccaccgcactcggttcgcagggaactgtctgcgcgggcggccgttatgacgggctggttgaacagctcggcggtcataataccccggcggtgggctttgccatgggtctggagcgtatggtactgctggttcagtccgtcaatccggactttgtgagcgaaaccgcagtgaccgatgtttatctggcctccttcggtgaaggcagccaggttgcggcaatgatgctggcggaacagatccgcgacagcctgccgggtgtgcgtatcatgaccaactacggcggcggcaactttaaacgccagctgagccgtgcggataaaaacggtgcgcgcatcgccctgattttaggtgaggatgaaattgccaacgggacagtcactgtcaaagaactggccaccggtgagcagcagacgctggcacagagcgggctttccgctcgtctgagcgaacttttaggttaa

SEQ ID NO: 275490 - DNA, 1125 bp, Morganella morganii
atgcataatgaatccccgataaaaagacgcaaatccacccgaatttacgtgggaaatgtgccggtcggtgatggtgcaccaatcgccgtacaatcaatgacaaacacccggacaacggatgttgaggcgaccgtcagacaaattaaatcccttgaacgcgtcggcgtggatattgtccgcgtgtcagtaccgaccatggatgcggcggaagcatttaaactgattaaacagcaggtctctgtaccgctggtggcggatattcactttgactaccgcattgcgctgaaagtggcggaatacggcgtggattgtctgcgtatcaacccgggcaatatcggcagcgaggagcgtatccgtcaggtggtggattgcgcccgtcattataatatccctatccgtatcggggttaacggcggttcactggaaaaagatatccaggaaaaatacggcgaaccgacaccggaagcgctggtggaatctgctatgcgtcatgtggatattctcgatcgcctgaattttgaccagtttaaagtcagtgtaaaagcgtcagatgtgttcctggcagtcggtgcttaccgtctgctggcacagaaaattgatcagccactgcacctgggtattaccgaagcgggcggcgcacgtgccggttctgtgaaatccgctatcgggttaggtatgctgctgtcggaaggtatcggtgatacgctgcgtatctcactggcagccgatccggtggaagaagtgaaggtcgggtttgatatcctgaaatccctgcgtatccgttcgcgcggcattaactttatcgcctgtccgacctgctcccgtcaggagttcgatgtgattggcaccgtgaatgccctggaacagcggctggaagatatcatcactccgatggatgtatcgattatcggctgtgtggtcaatggtccgggcgaggcggaagtctccacactgggtgtgaccggcgcgaaaacgcgcagcgggttctacgaagacggtgtccgtcagaaggagcgtctggataacaccgatatgattgatcagctggaagcgaaaatccgtgccaaagcggccatgctggatcagaataaccggattgatatcagtctggttgagaaagaataa

SEQ ID NO: 275491 - DNA, 1059 bp, Morganella morganii
atgcagtatgccggaatacggaacttcggtgcgcggaagggcagatctccgcgctttctcgtaaccagaactgtttgtgtcctgaaactcatgaataactctcaatctcaagataatctccaactcactcttggccaattcttaacacaacgtcgggaacaacttcagttatcacgggaaacagtcgccgacagactttgtcttaaactgactacagtgcgtgaaatcgaagaagatgcactgaaagaaggcaacccgacctttatccgcggttatgtccgcacgtatgccaagctgttgcagatccctgaatctgcgatcatgccttatcttgataaaatcgcccccgctcagatgaccaaagtccagccgatgaaaagtgtgactatcggccgtcagcgtaaaaaacgcgaaggctggctgatgaagtttacctggctggtactgttggtggttctggcactggtgggcgtgtggtggtggcagcagtatcaggcacaacaggccgatattgcctcactggcacaacagaatgatgtcaccgtgaatgccccggcagatgttccgggtaccgacccggcagacagcactgcaccacagacactgaatgcccctgccggaacgccggacaccgctccggccggtaataccaataccgctgcactggaattatcggcagccaccccgcaggatcaggaaattgacagcagcaagattgtgccgctgccgggcagtgaccgcgtaccggcggttgttaaccgtaccgtggacagtgaaggcggcacgctgccgaccaccacacagacacaggatggtctggttctgacctttaaaaacacctgctggctggaagtgacagataacaaaggtacaaaaattttcagcggcaccaaacagaaaggggataccctggaatttgcgggcgcagaaccttaccgtctgaaaatcggcgcaccggctgccgtggatgtgcagttcaaaggtcagagtgttgacctgagtcattttgttaaggcaaaccgggtggcaaacctgagtgtgccgaaagccggtgaataa

SEQ ID NO: 275492 - DNA, 351 bp, Morganella morganii
atgataaggacgtattccccgggcttaattgcagtaatgctgctggcaggatgccggacagcacccgtgacacagaccgtaccggctgcgaccggtacccgtcttgcactgggtgaggcttatcttcaggccggccggtatgatgccgcacggtatcattttgaccgggtactgaaagtacagccgcagcataccggtgcgctgacaggcgcggcgctgagtgcaaaatgcgatcagcagcctgaaattgcggaaaaatacctgaatttagccgtgaattccccgtcaggcagtgatagtgtggtacagtacattttggcttatgagtgtccgccggataacagtctgtaa

SEQ ID NO: 275493 - DNA, 1179 bp, Morganella morganii
atgtcagaactgaccactcaagacgcctgtgtaacaggctccgcaccgattgctcctgaaaaaatcaacgggaaaattaatttactcgacctgacccgtaaagaaatgcgccagttttttgccgatatgggtgagaaacctttccgtgctgatcaggtgatgaagtggatttaccactattgctatgatgatttcgatctgatgaccgatatcaacaaagtgctgcgcaccaaactgaaagcggtggcggaaatccgtgccccggaagtgtcagaagaacagcgctctgcggacggcaccattaagtgggctatccgtgtcggcgaccaggaagtagaaaccgtctatatcccggaagatgaccgcgcgactctgtgtgtctcttcccaggtcggttgtgcgctggaatgcaaattctgctcaaccgcgcagcagggctttaaccgcaacctgcgcgtctctgaaattatcggccaggtctggcgtgctgcgaaaatcatcggctccctgaaatccagcggccgccgtcctatcaccaacgtggtgatgatggggatgggtgaaccgctgctgaacctgacccatgttgtcccggcgatggaaatcatgctggatgacttcggtttcgggctctccaaacgccgcgtgacgatttccacctccggtgtggttccggcactggataaactcggtgatatgatcgatgtggcgctcgccatttccctgcacgcaccgacagatgatgtgcgtgatgaaatcgtgccgatcaacaaaaaatataacattgagacattcctggcatctgtgcgccgttatctcggaaaatccaatgcgaacggcggccgtgtgaccgtggagtatgtcatgctggatcatatcaatgacagcactgaccaggcgcatcagctggcggcctgtctgaaagacacgccgagcaaaattaacctgatcccgtggaacccgttcccgggcgccccttacgggcgcagctcaaacagccggattgaccgttttgccaaggtactgatggaatacggtttcaccaccattgtccgcaaaacacgcggtgatgatattgacgctgcctgcggacagctggccggtgatgttatcgaccggaccaaacggacactgaaaaaacgcatggccggtgaaccaatctctgtcaaagcagtctga

SEQ ID NO: 275494 - DNA, 444 bp, Morganella morganii
atgcataaaattatactggttccgatcgatctgaatgccggtgcgttatctcagaacgtcattactgagattaacgactatgccaaagataaaaatgtgaaatttcatttcgttacggtaattcttccgtctgaacagctttttgactatggtctgacattccctgtgatgaccgaaaatgccaagtcagaagaccagcgcatcaaagctctgcttgaaaaactggatgccgccaccgaaaaatttgctgtacagaaagaacagatttccaccggtgtacttatcggaagtgcggcagaggccattcttgataatgcagaaagaattaaagccgacctgattgttatcggttccaaaaacccgaccatgaaaagccgtttcctgggctccaccgcgtccgcactgatccactacgccaatatctcagtccttgttgtccggtaa

SEQ ID NO: 275495 - DNA, 426 bp, Morganella morganii
atgtctgtacaacgcacattttctatcattaagccaaacgccgtaaagaaaaatgctatcggggccatttatcaccgttttgaaagcgccggttttcgtattatcgccgccaaaatgctgcacctgacccgcgaacaggcggaaggattctacgctgagcacaaaggtcgtccgttctttgatggtctggtggaattcatgacatccggcccgattatggtacaggtgctggaaggggaaaatgcggtgcagcgtcaccgtgatctgatgggtgccaccaatccggataacgccctggccggaacactccgcgcggattacgctgatagtttcactgaaaacgccgtacacggctctgatgcggaagaatccgctgcccgtgaaattgcctatttcttcactgaagatgaaatctgcccgcgctga

SEQ ID NO: 275496 - DNA, 2310 bp, Morganella morganii
atgaaagtgtggtttaaacgtctcgcgctgaccggcctgataacaattgttctgacaccgccgctgctctggctggccgataaaatctggcctttgccgctggatgaggtggtgatggcacgcacggttacggctgaggacgggtcaccgctgtggcgtttcgccgacagtaacggcgtgtggcgctacccggtcacactgaaggatgtatcaccggaatttattgaagcgcttctgacatacgaagatcgctatttctatcagcacccgggcatcaacccggtggctatcggccgcgcggcgttgcaggatctgacctccggacgtattgtctccggcggcagcacgctctccatgcaggtcgcccgtctgctcgatccccatgaccgcactctgaccggcaaactgaaacaggttttccgcaccattcagctggagtggcactattccaaagatgagattctggagatgtatcttaaccgcgccccgtacggcggcacggtagagggtattggtgcggcgagctggatgtatctcggcaaaccaccgtcggaactgaccgccggagaagcggcattgctggcggtcctgccgcaggcaccaagccgtctgcgaccggatcgttatccgcagcgcgcggaagcggcccgtaataaggtgcttgaccggctggccgaatttgaggtgtggccgcagtcaaaagtgaatgatttaaagcaggagagtatctggctggcaccgcgccaggtgccgcattccgcgccgctgctggcacggcgtgtggcgcagggggtgaaagacccggtgatccgcaccaccatcaatcctgccattcagcgccagctggaggagatggcccgcaaccgcaaatatcagctgccggaaaaaacctctctcggcattatggtggtggataaccgcgatatgagtgtgaagggctatgtcggctctatcgatttctctgatgatacccgtttcgggcatgtggatgtgaacagcgcctggcgttcaccgggctccacactgaaaccgtttttatatgccctggcgatggatgaggggctgatccacagtgaatccctgttacaggatgtgccgcgccgctttaatgattaccggccgggcaactttgataccgggttcagcgggccggtgagtgtcagtgaggcactgcgccgctctctgaatctgccggtggttcagttgctggatgtttatggtccgaaacggttcagtgccaaactgcgtaacgtcggtctggaactgcgttttccgctcggcagtgacccgaatctgtcgctgatcctgggcggtaccggggcgcggatggatcagctgattgcggcctacagcgcgtttgcccgtcagggcaaagtggcaccggtgcgttttcgtccggaagatccactggcagagcggcagctgatctccccgggtgcggcgtggatcacgcgccgggtcatggccggagagacacggccgctggcggatgaccggctggcgcaggatgtgccgctggcgtggaaaaccggcaccagttacggctaccgtgatgcctgggcgctgggggtgaataaccgttacaccatcggggtgtgggtcggtcgtccggacggcacaccggtggccggacaggccgggtttgcaaccgcgatcccgatcctgtatcaggtggacagttatctgcgggcacgcggaggtaaaaaattgccggacccgaaacccatcagcgtcagcagtaagatgatttgctggccgtcagggctggcagcggacaagcaggatccgaactgccgtcagcagcggatagcgctggtgctggataatactgtgccgccgacactgccgtcagcagggcaggaaagcctgtccggcaccaatgcggtgatctgggttaacgggcagggggagcgggtgtcaccggattgtccggatgcacaggagaaaaccgtggcgctgtggccgattgcgctggagagctggctgccgccgggtgaacgccgcagccaccgtctgccgcctgtcagcaaaacctgtccgccgctgcgggtggaggctgcaccgctgctgatttccgggatccgcgaaggggatgtgctgcgccgtctgccgctggcgaaaacccttgacctgcgggtggtgacgcagggcggagagggcactcagtggtggtttcttaacggcgaccaggcgggcagtactgagtccggtgagccgctgctgctgacgctggacaccccggggcgttatcagctgacggtgctggatctcagcggccaggtcagttcagtcagttttaccctgaaatag

SEQ ID NO: 275497 - DNA, 5022 bp, Morganella morganii
atgcgttctccgattgcaggacagggttccggcaaaaaacgctgcattgcagtgcttcttgcatcagcgctggcgctcatgggttgtgatgacaccggcagtaaaaccacggcggcgggcagcaatgacagcgcgtcggccaataataaagaaaactcgtcttcttcatctgcttcctctccgtctgcgaaaaaaacacaggatgccgcatcactggcagagctgagtaagcgctacgccggaaaagatgtgactatcattgacgcttctgagatccagctcgacggcgcaaatgcgatggtggtgaccttctccgttccgctggatccgaaccaggatttcagtcagtttgcccgtctggtggacgtgaaaaacggtaagctggaaggtgcctgggagctgtcggataacctgatggagctgcggatgcgccatctgccgccgtcacgggaattgcagctgagtatcgatcgcggcgtgcgcggtatcaatgagcgcacactggttaacggttacgatttaaaactgaccactgcggatgtggtaccgagtgtcggttttgccagccgcggctcgctgttcccggcagatgtcctgcagggactgccggtattcgcgctgaacgtggacagtattgatgtcaatttttaccgcatcaaaccggattctctggcgtctttcctggcaagctggcagtacggtaacaatctccagtactggaattcggatgatctgctgaataacactgatctggtctataccgggcgttttgatctcaatccgcagaaaaacacccgcgaaaatatgcagatcccgctgaaggatatcaagccgttacaggaagagggcgtgtatctggcggtcatgcagcaggccgggcgttacagctacaccatgcctgccacactctttaccctgagtgatatcggcgtttccatgcacagctatcttaatgagctggatgtatttactcagtcgctggccaaaggcagcgcactgaaaggtgtggaaatccgtctgctcgacagcaaaggtcagcttctgggcaaagcagaaaccgacagcagcggtcatgcaaaactggatcgcggggcggatgccgcgctgttactggcgattaataacggccagaccagtatgatcgacctgaaaaacccggcgcttgacctggcagagtttgatatcgccggtccgcagggctatgcaaaacaattcttcgtttttggtccgcgtgacctgtaccgtccgggggaaactctggtaattaacggcctgctgcgcgacggcgatggccatccggttaaagatcagcctgtcaaagtggatgtgctgaaaaatgacggtcaggtggcttccaccttcgtctggcagccggaaaacggtctttatcagtaccagtatgcgattccggaaaacatcgagaccggtaagctgacactgcgttttgacctcggggataacacaccgcgcttctacagcgtcaatgtggaagatttcatgcctgagcgcatggcgatggaaatcaaaaccgacaaacagccgatcaccacacagcaatccgctgattttgagattgaaggccattatctctatggtgcaccggcagccggtaaccaactgaccggacaactctttatgcgtccggatcgcgaagcgtccgccaaactgccgggctttgaattcggtaatattcaggaagagaacctgacccgcaccctggatgaattcgacgaaaccatggatgacagcggtgaactcgcattcaccatcagtaatgattactggaaagaggtgaaatcgccgtttaaattaatcctccaggcaagcctgatggaaaccggcggccgtccggtgacccgccgtgcggatgtcgcggtatggccagccgcgaaaatggccggtattcgtccggtcttcgccaaaaaagaggtttacgactaccgcactgacaaatatgtgtcgcagtacagcatggatgaagattcactggctgaattcgaaattgtctataccgaccgtcagggtaataagttaaaagcggatgatctgaatgcgcgtctgatttatgagcgccgcgactattactggcgctggtccgactccgaaggctggtcatccggttatgatcagaaagacctcgtgatgtctgatgacaaaatcagtatcgccaaagacggtaccgcaaaagtgaccgtcccggtctcctggggggcataccgtctggaagtggtggatccgtctaccgggctgaccagcagtgtgcgtttctgggcgggctattcctggcaggataacaccggcggtaccggtgcggttcgcccggaccaggtgaaactgaaactggataaaccaaattatcacgccggtgataaagttaaactgaatgtgactgcaccgcaggccggtaaaggctatgtgcttctggaatccagtgacggtccgctgtggtggcaggaagtggatgtgccggaaggcggcaccgatgtggaagtcccgctgaacaaagagtggacacgccacgacctgtacgcgactgcggtggttgtccgcccgggcgacagctcccgtcaggcgaccgtcaaacgcgcggtcggtatcctgcatatcccgatggccgatccggcccgtaagattgatgtgacactggatacgccggcccgcatccgtccgaatcaggatctgaccgttaaaatcaaagcaaaagcacaggacggcaaagcagcaccggaaaaagtgaatgtgctgatttccgccgtggacaccggtgtgctcaatatcaccgactataaaacgccggatccgtatgacgccttcttcggccgcaaacgctacagcgtggaccagtatgatgtctatggacagttgattgagggcagtggtcgtctcggcacactgcggtttggtggtgacggcggcgatgatctcgatcgcggcggcctgaaaccgctgaccgaagtgcagattatcgcgcagcaggcggcaccggtggaactgaatgcgcagggcgaagggactgttactctgccgattccggatttcaacggtgaactgcgcctgatggctcaggcctggacggacgaagatttcggacatgcgcagaataaagtgattgttgctgcaccggtgatcagtcagatggcactgccgcgctttatggccggtggtgatcgttcacagctgacgctggatctgaccaacctgaccgatgaaacacagaatctgaccgtgaatttcagtgcggacggcatggtgcatctcaaaggggcggcagagaaagaagtcaccctggcgaaaggccagcgcacctccgtgaatgttccggttgaagcggcaaacggctttggtcagggcgaggtgtttatgacggtcaaagggctgaaactgcctgatgaaagcagcaacacctataaaaacagctggaaaatcggcgtgcgtccggcatacccggctgaaaccgtttcttactcgatgtcactcggcaatggcggagaatgggcgttaccggcagatcagatcggttatctggatgcgaatactgtgtccggtgaaatgacgctgaccagccgtccgccgctggatatctcgcgttatatccgtgaactctatgcctatccgtacggctgtctggagcagacggtgagcgggctgtatccgtccctgtactcctctgaggctgagctgaagaaactgggcatcaaaacccagactgacgccggacgccgccaggcggtgatgaccggtattccgcatctgctcggcatgcagcgcagtgacggcagcttctccctgtgggataacagcggcgcggaagagccgtggctgactgcatacgcgacagacttcctgttccgtgccggacagcgcgggtttgatgtcccggcggatgccctgagcaacgccaataaccgcctgctgcgttatctgcaggatcgctcggtgatcagcagcaactattacggcaacagcgaccagatgcgctttgcggtacaggcgtatgccggttatgtgctggcacagcagcagaaagcaccgctcggcgcactgcgtcaggtctatcagcgccgtgatgatgccgcaagcggactggcactggtacagctgggtattgccctgaagaaaatgggggatgcggatcgcggcaacgaagccatccgtttgggtgtgatgaagaaccgtgacagcgtctataccggcgattacggcagcaccatccgtgatgatgcgatgattattgcgctgctgagtgaggcggattctaatgcggatcagcgttacggcaagttgcaggcactctctgcggagatacagaataaccgttacttctccactcaggagagcaacgccttgtatctggcaggccgccagtacattaatcagagcgaaaaaccgtggtctgccctgatcaacggacaggccccggcagtcagccgtgacagcgcgctgcgtgagactctcacagcggcacagctgaacaacggcatcagtgtcgcgaaccgcggggatgctgagctgttcggtcgtgtgaatatcaccggctatccgttacaggcaccgcacccgtcatctgaagtgctgaagatcaagcggacgtatatggatctgaacggtaacccgatcagtattgaccgcctgagcagcggtgacctggtggcagtccgtctggatatccaggctgaccgcaacgtaccggatgcgctggtggtggatctgttaccggccggtctggagctggaaaaccagaacctggcggcagccagtgcaagtctggcagacagcgcgccgaatctggctgaagctatccgggatatgcagcaggccaatatccgccataccgagtaccgtgatgatcgctttgtctcccaggtggcggtggaagagtaccgtccggtgacgctggtctatctggcccgcgcggttacaccgggtaaatacagtgttccggcaccgcaggtggaatcgatgtatattccggcctggcgtgccaccggtgtgacaccggcgacactggaagtggttcgttaa

SEQ ID NO: 275498 - DNA, 423 bp, Morganella morganii
atggcggatacactcccggtgcaggaagtgatgattgaacagggcagcgcattgctgctcagcgtaccggaaaacaaaccggacgcagtgctggatgcgctgaccggcgtgtttaaacagcacaaaccggtgcgccgtgcattttgggtaatggcagccgaaaaaaacaatactgtcccggatgaaccggtgctgctgattgtgctggagctgagtgaagagcaggaagcggatactgtgatccgtcaggcggctgaggctgcgatggagcacctcgctgacggggagcatattgatttttgtctgttaaatccggatgaaaatgacgggctgacgcacttcctgacacagcacactcaggcattctatcagcgccgtctcggtggctggctgcgtaacgccattcctgtaacagaagcgtaa

SEQ ID NO: 275499 - DNA, 1296 bp, Morganella morganii
atgacgcaactcatcatgcctgtaaccttatcgtatgaacctgcttctccggcgtggggagagaaagccctggtcagcgcggctgacaaaggaatgactgttcatttaagccgtaaagggatgctgtgcgctgtacagagcgcgggccgcaaaatcgacggtcagggcatccgcaatgtggtgctgagcggcagcaactgggatctggaaaccagctgggcattctggcagggcttccgtggcccgaaaggcgcacgctcgattgaatggccggaattaccggaagcggataaaaccgaactggaacaccgtatccgtatcatcgactgggtacgcgatatcattaataccccggcggaagaactgagcccggaacaactggcacagcgtgcggttgatctgctgtgcggcatttcctgcaattctgtcggttaccgtatcatcaaaggggaagatttacgcgagcagggctatatggggatccatacggtcggccgtggttctgtacgtccgccggtactgctggcgctggattacaatccgggcaaacaggaaaatgcaccggtgttcgccagcctggtcggcaaagggatcacctttgactccggcggctacagcctgaaaccgtcttcctccatggactccatgaaatccgatatgggcggcgcagccaccctgaccggcgcactggcaatggctatcagccgcggcctgcaaaagcgtgtcaaactgtatctgtgcatcgcggataacctggtgagcggtaatgccttcaaactgggtgatattatccgttacagcaacggtaaatccgttgaaatcatgaatactgatgcggaagggcgtctggtactggcggatggtctgattgaagcggacaaagataacgccggatttatcatcgatgcagcgaccctgaccggggcggcgaaaactgcggtcggtaacgactatcacgcggtgatgagtttcgatgacgcgctgtacaatgaactgatgtcagccgctgatcaggaaaaagagatgttctggcgtctgccgctggcagaattccaccgccgtcagatgccgtcctcctttgcggatctgagcaacaccggggcaccgaatactgccggggcaagtaccgcagcggcattcctgtctcactttgtggaagattaccgcaaaaactggctgcatatcgactgtgcagccacttaccgcaaagcgccgtcagacttatggtctgcgggtgcaaccgggtacggtgtgcgcactgtggcggcactgctgctgaaaaaagccggacagtaa

SEQ ID NO: 275500 - DNA, 201 bp, Morganella morganii
atgggactgaaatggcaggacagccgtgaaatcggcgaagctctgtatgatctgtacccggatacagatccgaaaaccgtgcgtttcaccgatatgcaccagtggatttgcgaactggacgaatttgacgatgcccctgaaaaatctaacgaaaaagtattagaagcaattttgttagtctggctcgacgaatttgaatga

SEQ ID NO: 275501 - DNA, 336 bp, Morganella morganii
atgcctaagattgtttttttaccgcatgagtcattatgccctgaaggtgcggtatacgacgcaaatgaaggtgagtcaattctggatgttgccctgcgtaacggtatcgaaattgaacatgcctgtgagaaatcatgtgcctgcacaacctgtcactgtatcgtccgcgaagggtttgactccctcggagagagcagtgagctggaagatgacatgctggacaaagcatggggacttgagccggaaagccgtctgagctgccaggcgaaagtcgcggatgaagacctggtggtggaaattccgaaatacaccatcaaccacgcgcgtgagcactga

SEQ ID NO: 275502 - DNA, 1848 bp, Morganella morganii
atggcactgttacaaatcagcgaaccgggacaggctcccgccccgcatcagcgccgccttgccgcgggtatcgatttaggcaccacccattcactggtcgccactgtgcgcagtggtgaaaccgacgtgctgcccgatcacgaagggcgttatttactgccttctgtcgtgcagtacagcgcggataaccgcctggtcggctgggatgcccgtgcaaatgcggctgccgatcctcagaataccattatctctgtcaaacgcatgatggggcgctcgctgaccgacatcactgagcgctatcctgatctgccgtatcagttacaggcgggcgaaaacggcctgccaatcatccgcactgctgccgggctgacggatcctgtccgtgtctcggcggatattctgtccgtgctggcacagcgcgcgcaggaaaccctcggcggtgagctggatggcgtggtgatcaccgttcccgcctatttcgatgacgcgcagcgtcagggcaccaaagatgcagcccgccttgccgggttacatgtgttacgtctgctgaatgagccgacggcagcagcaatcgcctacgggctggattccggtcaggaaggggtgattgcggtttatgacctcggcggcggtacgtttgatatctctgtgctgcgtctgagccgtggtgtgtttgaagtactggccaccggcggtgataccgcgcttggtggtgatgatttcgataacctgattgctgactggatttatgaacagcgcggcattcagtcacaggggcattcgcagcaccgtgaagtattaaatgcggcggcggaagccaaaattgcactgtctgatgccgcacaaaccaccatctccctggatggctggcagggtgtgctgacccgtgagacctttgaggaactcattcgtccgctggtcagaaaaaccctgatgacctgccgccgtgccctgaaagatgcgggaacggatcaggatgaagtccgcgaagtggtgatggtcggcggatcaacccgcgtgccgctggtgcgtgagctggtcggtgaatttttcagcaaagagccgctgacttcgattgacccggataaagtggttgctatcggtgccgcgattcaggcagatatcctggccggtaacaaaccggacagcgacatgctgctgctggatgtgatcccgctctcgctggggctggaaaccatgggcggcctggtggaaaaagtcattccgcgcaacaccaccattccggcagcccgtgcccaggaatttaccacctttaaagacggtcagaccgccatgactattcatgtgctgcagggcgagcgggaaatggtcagcgactgccgctccctggcacgtttcaccctgcgcggtatcccgccgatggctgccggtaacgcccatatccgtgtcaccttccaggtggatgcggacgggctgctgagtgtcagtgcactggagaaatccaccggtgtgcaggcctcagtccagatcaaaccgtcttacggcctgagcgataccgatatcgccgggatgatcaaagattcactcgaaaacgcagaaaacgatttatccacccgccgtctggcggaacaaaaagtggaagctgcccgcctgctggagagcctgactcaggcgctttcagaggatggcaatttactgagcgacgacgaaaatgctgctattgatgcggcagtcggtgtgcttattgagagcgttgaaggcgactcaccagccgccattgaaaacgcaattaaacaactggacaagcaaacacaggtattcgcggcgcgccggatggacaattctgtccgcaaggcactcgcgggtcactctgtggatgagatataa

SEQ ID NO: 275503 - DNA, 519 bp, Morganella morganii
atgaactatttttccctgttcagcctgcctgtgcgttatgaccttgacacacaggcacttgccggtcgttatcaggatttgcagcgccagtatcacccggacagatttgccgccggtgatgcgaaagaacaagcgcaggcactgacgatggccgcgaccatcaatgacgcctaccagtccctgaaacatcccctgaaacgtgcggaatacatgctgctgttacatgatattgatatcaataatgaacagcacacaatgcatgacaccgcatttctgatggagcagctggagctgcgcgaagccctcgatattatcgaacagaaacaggacagtgatgcactggccggttttgctgccactatcactaaaatgacaaaaacccggatggcagagatgattcgtcagctggatgacgaagactggaccgctgctgcggacagcgtgcgtaaattacgatttttgagtaaactgacgcaacaaattgaaaatcttgaagaacgtttgctcgacagtttctag

SEQ ID NO: 275504 - DNA, 324 bp, Morganella morganii
atgtccgtttctcttacagaaagtgcggcaaaccgggtcaccagttttctggcaaaccgcggtaaaggagtaggtctgcggttaggcgtgagaacctccggttgctctggtatggcttacgtacttgaatttgccgatgtcattaatgaagatgatgtcgtctttgaagatcacggcgtaaaagtgatcatcgacggaaaaagtattgtgtatcttgacggcacggaagtggatttcgtgaaggaagggttaaacgaagggtttaaattcaataacccgaacgtcaacagcgaatgtggctgcggcgagagttttcacgtttaa

SEQ ID NO: 275505 - DNA, 387 bp, Morganella morganii
atggcttatagcgataaagtaatcgatcactacgaaaacccgcgcaacgtcggttcattcgacaacgaagacccgactgtcggcagcggcatggtgggtgcaccggcctgtggcgacgtaatgaagttacagatcaaagttgatgataacggcgtgattgaagacgcacgtttcaaaacctacggctgcggctcggcgattgcgtcaagctcactggtgactgagtggatgaaagggaagaccctggatgaagctgaagccatcaaaaataccgcgattgcggaagaactggaattaccgccggtgaaaattcactgctcgattctggctgaagatgcgatcaaagcagcaattgcggattacaaaagtaaacgccggggcaactaa

SEQ ID NO: 275506 - DNA, 1215 bp, Morganella morganii
atgaaattaccgatttatttagattactcagcaaccaccccggttgatccgcgtgttgctgaaaaaatgatgcaatgcctcacaatggacggcatcttcggcaacccggcctcacgttctcaccgctttggctggcaggccgaagaggctgtcgatattgcccgtaaccagattgctgatctggtcggcgctgacccgcgtgaaatcgtgttcacttccggtgccaccgagtctgacaacctggcgattaaaggtgcagccaaattctatgagaaaaaaggcaagcacattattacctgtaaaactgagcataaagcggtactcgatacctgccgtcagttagagcgcgaagggtttgaagtaacctatcttgcgccgcagcgtaatggcctgatcgaccaggctgaactcgaagctgcaatgcgtgaagacaccattttagtctcaatcatgcatgtgaataacgaaatcggtgtgattcaggatatcgaagcaatcggtgaactgtgccgcagcaaagggattgttttccatgtggatgccacccagagcgtcggtaaagtgccggttgatttaagcaaactgaaagtggatctgatgtccttctccggccataagatttacggcccgatgggtatcggcgcactgtatgtccgccgcaaaccgcgtatccgcattgaagcgcagatgcacggcggtggtcacgagcgcggtatgcgttccggtacactggcagttcatcagattgtcggtatgggtgaagcttaccgtatcgccaaagaagagatggcagcggaagctgagcgtctgtccgcactgcgtatgcgtctgtggaacggtatcaaagatatcgaagaaacctatctgaacggttgcccggagcactccgcaccgaatattcttaacgtcagtttcaactatgttgaaggtgaatccctgatgatggcgctgaaagatctcgcggtatcatccggttctgcctgtacgtccgccagcctggagccgtcatatgttctgcgcgccctgggtatgaccgatgaactggcgcacagctcaatccgcttctctctgggtcgtttcacgactgaggaagagattgactatgctatcaaacttatccataacgcaattggccgcctgcgcgatctttccccgctgtgggaaatgcacaagcaaggtgttgatattaacagtattgaatggtcacaccattaa

SEQ ID NO: 275507 - DNA, 492 bp, Morganella morganii
atgagactgacatcaaaagggcgctatgcggtaaccgctatgctcgacgtagcgctgcactcccatgaggggcccgtaccactggctgacatttctgaacgtcagggtatctccctctcttatcttgagcaactcttctcccgtctgcgtaaaaacgagctggtttccagcgttcgcgggccgggcggcgggtatcttctggcacgcggtgccggtgagattttcattgctcaggtcatctcggccgtcgatgaatccgttgatgcgacccgctgtcagggaactcaggaaggttgtcagggcggtgaccgctgtctgacacacgcgctgtggcgtgacctgagtgaccgtattactgatttcttaagcagtatcagtctggaagagttagtaaatcataaagaagtgattgatgttgctgatcgccaggatgataaacgtcgtgcacataatctggcaattaacgaaacgattatcaatctgcaagcataa

SEQ ID NO: 275508 - DNA, 738 bp, Morganella morganii
atgtccgaaaatatccgaatcgtcctggttgaaacctcacatacaggcaatatgggctccgctgcgcgggctatgaaaacaatggggttatccagcctttatctggtcaatccgcaggtacagccggactctcacgccatcgcgctgtctgccggtgccagtgatgttatcggcaatgcaaagattgtcagcaccctggatgaggcgattgccggttgtgaactggtgatcggcaccagtgcccggtcacgcacactgccgtggccgatggttgaaccgcgtgaatgcggggaaaaaagtgttaaaatcgcacagactgccccggtcgcgattattttcggccgtgaacgtgtcgggctgaccaacgatgaattgcagaagtgtaattatcatctttatatcccgaccaacccggaatacggctcgctgaacctggcaatggcggtgcagctggtcagttatgagatccggatggcatttcttgcctttcagaatgagagcgaaccggcaaataatgatgaggcagatgaggtacactatccgccggcggatgatatggagcggttttacacgcatctggaatcggttctgaatgaatccggttttatccgcaaagcacacccgggtcagattatgaaccgtctgcgccgcttatttacccgcgcgcatccggaaacacaggagctgaatatcctgcgtggtatcctgacttctgttgagaaatgggcgaaaaaatag

SEQ ID NO: 275509 - DNA, 804 bp, Morganella morganii
atgcatccgatgcttaccatcgccatacgtgctgcacgtaaggccggcaacctgattgccaaacactatgaaatgcctgacactgttgagacaactcagaaaggttccaatgactttgtgaccaacgtggatcgcgaagccgagcagatgattatcgagatcatccgcaagtcttatccgaagcacactattatctccgaagagtgcggtgagttacccggtgaagaatatgatatgcaatgggtgattgatcccctggatggcaccaccaacttcgtcaaacgtctcccgcacttcgcggtatctatcgcattccgtattaaaggccgcactgaagtggcggttgtttacgatccgatgcgtaacgaattattctctgctgtccgtggtcagggcgcacagttaaacggctaccgtctgcgcggtgccactgcccgtgatctcgacggcgcggtactggctaccggcttcccgttcaaagcaaaacagcacgctgatacctatatcaaaatgctcggcaaactgtttacccgctgctcagacttccgccgtaccggctctgccgcactggatctggcttatctcgctgccggccgtgtggacggtttctttgaaatcggcctgaaaccgtgggacttcctcggtggtgagctgctggtccgtgaagcgggcggtatcgtcactgacttcaccggtgaccaccgttatatcgacagcggtaacatcgttgcaggcagcccgcgtgtagtccgcgaactgctggcagaactgcgtgatgagctgactgagtctctgaaacgctga

SEQ ID NO: 275510 - DNA, 1152 bp, Morganella morganii
atgtttgttccgtcatcgctctggctggcgcttgattattttacgtattttttttcctacgggatttttcttccctactggggcgcatggctgaaaggtgaagggcatgatgtggcaacggtcggtatgctgctcagtgtggggctggtggcgcggttcgccggcagcctgtttatcacaccgctgtttaaagacccgtcacggctgatttttgctctgagactgatggcgctctgttctttcctgttcgcggtggcgttttatttcggttcacactggctctggctcttttttgttatggccggattcaacctctttttctcgccgatgatcccgctgggggattccctcgccgcaacctggcaaaaacagtttccgatggattacggctcaatccgtgtctggggatcggtggcatttatcatcgctacctcggttaccgggatgctgatggatatctggaagcatgaggttattctggcagcattagtggtcagtaccggctcgctgctgctgacgtcactgctgcgtccgcgcattatgccgtccggggagatgaaacagcgcgggccgcaggtgaaattccgtgttctgctgaaagataatgcggtggtccgctttctgctgtgtgtgagtctgttgcagggggcgcatgccgcctattacggcttcagtgtgatttactggcagaaggtggggtactctgatgccgcgatcggctatctctggtcgctgggcgtggtggcggaagtgattgtctttaccttcagtaataagctgttccgccgctggagtgcggccaacctgttactgctttccggtatctgcggtattcttcgctggtcactgatgggcatgtcagcggcactgccggtgctgattgtggcgcagatcctgcacagcggcacctataccgtgtgtcatctggcggccatgcgttttatcggtgcccgcaaatccacggaaatcattccgttacaggcggcgtattccgcactggcgatgggcggggcgattgcggtgatgacgttggtggcggggtatctgtatgaggatatccacggcggtatattttatctgatggcactgacagtacttccggcactgttcctgcgtccgaaagtccggccgcagacaccggaaaacgcataa

SEQ ID NO: 275511 - DNA, 1254 bp, Morganella morganii
atgttaaagcgtgaaatgaatattgcagattacgacccacaactctggcaggcgatgaaagacgaagatcgtcgtcaggaagagcacattgaattaattgcctctgaaaactataccagcccgcgcgttatggaagctcagggctcccagctcaccaacaaatatgcggaaggatatccgggcaaacgctactacggcggctgcgaatatgtggatatcgttgaacagctggcgattgaccgtgcaaaagaactgttcggcgcagactatgccaacgttcagccgcactcaggctcccaggctaacgtcgcagtgtactccgcactgctgtcaccgggcgatacagtattagggatgaacttagcggaaggcggtcacctgactcacggctctccggtaaacttctccggtaaactgtacaatatcgtcccttacggtatcgattctgccggtaaaatcgattatgacgatgtcgctgaacaggcgaaaaaacatcagccgaaaatgatcatcggcggcttctctgcttactccggtgtggttgactgggcgaaaatgcgcgaaatcgctgacagcatcggtgcttacctgtttgttgatatggcccacgtagccggtctggttgctgcgggtgtttatcctaacccggttccgcatgctcacgttgtcaccaccaccacgcacaaaaccctggcgggtccgcgcggcgggatgatcctcgcaaaaggcggtgatgaagatctgtacaaaaaactgaactcagcggtattcccgggtaaccagggtggtcctctgatgcacgttatcgccggtaaagcagtggcgttaaaagaagcaatggagcctgaatttaaagcaaatcaggtccaggttgtaaaaaatgccaaagcaatggttgaagtcttcctgaaccgtggttataaagtggtgtccggcggtactgagaaccatctgttcctggtggatctggttgataaagacatcaccggtaaagatgcggatgcggcactgggccgtgcaaacatcactgtcaacaaaaacagtgtgccgaacgatccgaagagcccgtttgtgacttccggtatccgtgtcggttccccggcgattacccgccgcggcttcaaagaagcagaagcccgtgaactggccggctggatgtgtgacgtgttggataacctcaatgatgaagcgaccattgaagcagtgaaacaaaaagttctggctatctgtgcgaaatatccggtttacgcataa

SEQ ID NO: 275512 - DNA, 1182 bp, Morganella morganii
atgctcgatgcacaaactatcgccaccgtaaaatccaccgccccgctgattgccgccaccggcccgaaactgaccgcccatttctatgaccgcatgtttcgtcagcatccggagttaaaagatatcttcaccatgagccaccagcagaacggtgcacagcgtgaagcgttgtttaatgcggtctgcgcctatgccatgaatattgataacctcggcgcgctgggtgcggcagtggaaaaaattgccaacaagcacgccagtctgatgatcagacctgagcattacccgattgtcggggaaaacctgcttgccaccattgaagagttgctcaatccgggtgaggaagtccttaccgcctgggggaaagcgtacggcgtgctggcggatatctttattcagcgcgaagccgggctgtatcaggaaaaagcggcgtcgccgggcggatgggaaggactgcgtgaattccgcgtgatccgcaaacagccgcagagtgaacttatcaccagttttgaactggctccggtcgatggtaagcctgtcgcggattaccgcccggggcagtatatcagtgtctatatcaatgatgatgtgctggaaaatcaggagatccgccagtattccctgacgcaggcaccggacggtaaaacctaccggattgcagtcaaacgtgaagacaaaggtacgatttccggctggctgcacgccaatgtgcaggaaggtgatgtggtcagactgaccccgccgctgggggatttcttcctggaggcagaaaaagagactccggtggtcctgatttcagccggtgtcggcttaacaccgatgatggctatgctgcagacactcgccgcacaacagcatccggcagacgtgacctggctgcatgcggcagagcacggcggcgtgcatgcctttgcggaggaagtaaaccggtttggtgctcagctgcctgcgttcagtcagaccgtctggtacagagagccgcgcgcagacgaagctcatccgcacctgaccgggctgatggatttaaccgctcagcaggatgccctgctcagtaaaacccgccactactacctgtgcgggccggtagcctttatgcagcacattgcgcgtcagctgactgcaatcggcgtcagcgcagaccagatccattatgaatgtttcggtccgcacaaaattttataa

SEQ ID NO: 275513 - DNA, 270 bp, Morganella morganii
gtgcggacaatacatgtgcgggtaatacaatggatagttgcggtgtgtgctgtggttattattctggttatggccggtattattattctgcagtcagcactgaaagatcccggtcagcatgaattaccggcgctttttgcggaggtttccgggatgaatttaaataaagaagaacagaacgagctggaagagtgtattaattcggccaaggtgatgtatttctctcaggcagtaaaaaaatgtgtgaaccgggcccggtataaaaactga

SEQ ID NO: 275514 - DNA, 339 bp, Morganella morganii
atgaaaaagattgaggcaattattaagccgtttaaactcgatgatgtccgcgaagctctggccgaagtggggatcaccgggatgaccgtgacagaagtgaaggggttcggccgtcagaaagggcatacggaactgtatcgcggtgcggaatatatggtggattttctgccgaaggtaaaaattgaaattgttgtcgccgatgacattctggaaacctgtgtggaaaccattatgcagacggcgcagaccggtaaaatcggtgacggtaaaatctttgtgttcgatgtggcacaggttgtccggatccgtaccggggaacaggatgaagatgctatctga

SEQ ID NO: 275515 - DNA, 1623 bp, Morganella morganii
atgcgtcgtacacttaatatcgccctggcccagctgaattttctggtcggagatatcgaaggcaatggtgaacgtattctgaaaaccatggcggaacagcaggcggcaggagcggatctggtcatgttttccgaactggcattgtccgggtattcaccggaagacctggttttccgtcctgattttcatcagcggatagtgcagagcctcaccctgatccaacaggccagcggtgactgtgctgtgctggtgggacacccgtggcaggaaaacggtcacatttataacgccctctctttctttgagaaaggggagctccgcgcccgttatttcaaacaggaactgccgaactacggtgtgtttgatgaaaaacgctggtttacggcagggacagaaacctgtgtgattgattttcgcggctatcgtctcgggttactcatttgtgaggatatctggactgacggtccggtggatgccctgaaagcgtccggtgcggaaatcattctgacactgaatgcctcaccgtattccactgacaaaattgatacccgggatgtgctgatacaggcacactgccgccgtaccgggctgccgctggtctatctcaaccaggtcggcgggcaggatgaactgatttttgatggtgattccgctgttttcgccgcagatggcagtgtaacacatcgccttgctgcattttcagagcaaatcgcgcagtgtcagtttacggatttaaccatcacaccgatggcggatccggctccgtcgttacctgttctggctcaggtttatcaggggctggtgatggcaacgcgggattatgtccgcaaaaatggttttcagggagcgctgctgggtctgtccggcgggatcgattccggcctgactgtcgccattgccgctgatgcactgggtaaagacaaagtgcaggcggtgatgatgccgttccgttacacctcggatatcagtatccacgatgcccgtgagcaggcagagctgctgggtgtggaatttgatgtggtgtcgattgagcctatgtttgaagcttttatgcacgaactggcgccgaaattcgccggaacagcggttgataccaccgaagagaatttacaggcacgctgccgcgcggtgatcctgatggccatgtccaacaaacgccgccgcattgtgctgaccaccagtaataaaagcgagtgcgctgtcggttactccacactgtacggggatatggccgggggctttaatgtcctgaaagatgtgccgaaaaccatggtgtttgaactggcaagataccgcaacacgctctctccggcgattccggagcgggttatcacccgtccgccgtcagcagaactggcgccgggtcagctggatcaggacagtctgccgccgtatgacatcctcgatgccctgctggccgggtatgttgaaaaagatatgtccgcagatgaactgatcgccgccgggtttgatgaagcggtggtccgcaaggttatccggctggtggatatcaatgaatacaaacgccgccagtcaccggtgggaccgcgcattaccgcccggaactttggcaaagatcgccgttacccgattacatccgggtttggccgcaaaaattggtaa

SEQ ID NO: 275516 - DNA, 1341 bp, Morganella morganii
atgacagcacgccgcagcgcaaacttattattggttgatgatgatccgggcttactgaaactgctgggtatgcgcctgagcagtgaaggtttccgggtatcaacggcagaaagcggccctgaagcgctgaaggtactcaataaagaaaaaatcgatctggtcatcagcgacctgcggatggatgaaatggatggtatggcgctgtttgccgagatccagaaaacccattccggcatgccggtgattatcctgacagcccacggctccattccggatgccgtggccgccacccgtgaaggtgtgttcagctttctgaccaaaccggtggatcgcgatgcattatataaagcgattgacgatgcgctggcactttccaccaccacggtcagtgatgaatcctggtgtgaaggggttgtgacccgcagcccgctgatgctgcgtctgctggaacaggcacgtatggtggcgcaatccgacgtcagtgtgctgatcaacggtcagagcggtaccgggaaagaggtactggcccaggctatccacaaagccagtccgagagcgaaaaaaccgtttattgccatcaactgcggcgcgctgccggagcagttgctggagtccgagctgttcggccatgccaaaggtgcctttaccggcgcggtgagcagccgggaagggctgttccaggcggcggagagcggcacactgtttctcgatgaaatcggggatatgccgatgccgctgcaggtcaaactgctgcgtgttctgcaggaacgcaaagtgcgcccgctcggcagtaaccgggacattgatattgatgtccgcgtcatttccgcgacacaccgcgatttacccaaggcgatggaaaaacacgaattccgtgaagatctctactaccgcctcaatgtggttaacctgaaaattccgacactccatgagcgggctgaagacatcccgctgctggccaatcatattctgcgcgaagcggcgaaaaaacataagccgtttgtccgcagtttctctccggatgcaatgaaatgcctgatgggcgcgagctggccgggcaacgttcgtcagctgcttaacgttatcgagcagtgtgtggcgctgtccaccgtgccggtgatcagtgaggcgctggtgactcaggcgctggaaggagaaaatacggcgctgccgacctttgcggaagcccgtaaccagtttgaactcaattatttacgcaaacttctccagatgaccaaaggtaacgtgaccaacgctgcccgtctggcagggcgtaaccggacagagttctataaattactgtcccgtcatgaactggatgcggccgactttaaagaataa

SEQ ID NO: 275517 - DNA, 795 bp, Morganella morganii
atgacatttaagtccctgattgccgccgtcccgctgttgctggccggttgcgtaaaaaccgcaacgccgccggatctctccgcgctggcctctgtcgtcctgccgcaggagcggacggcggattaccggattgcggactgccacgctatctgggaactcaactctgcggccgcgacagaaaacgccctttactggctgcggatgatggattgtgctgatctgctcagcagtgacacagcccgcattatggcggggaaaatcaccccggacagctgggatactgcactgcgtcagagcattctgcttaataacaccggcacctccgccaatgacaagcgtaaggtgctggaaaccctgaatgcctacagtgccggattcccggtctccctgcgtccgctgatgaccctgtggcgggatcaactgaaacaggcgattgccctgagtgacgaacgccagcgctaccgccgcctgcagagcgatacggacggcaaaattgatcagttgcgtgcggttaactcccggctgcagtttgaattacagaataccacccgcaagctggataacctgagcaacattgagcgccagctggccggccgcaaacagccgaccaaagcggatgcggaactggaaaatgcgctcgaggagcgccgtgaggcattagaagaggcggcaggtacggcagaaccgaaaccggcagaagcaaaacctgctgatgttaaaccggcagaagccaaaccggctgccgctgaaacaaaagccgcagaaacaaaaccggcacaggaaaaaaaggagtaa

SEQ ID NO: 275518 - DNA, 1440 bp, Morganella morganii
atgacaatcttgaaaaaatggcgattatttccgcgctcgctgcgtcagctggtggtggtggcattctgtctggtattgctgccgttgctgggactggcctggcaggcgtatcagagttttgatgagctgagtaatcaggcggcgcaaatcagtatttcaaccgtacaggatgcgcggcgtagtgaggaaatgtcgagcctggcgctggaaatggagcgcagctaccgccagtactgtgtgctgggtaatgaaaccctgaaaaatgtctggcacaagcagtatctccgctatgaggactatctcgcccgccagaagcaatccactccggatccgcgctatactgatgatatcgccggcagcctcggacagttgtctgtcctgcagtgtgagaacggcgagccggttgcggcgatgaccacccatctggaagcctttgcccgcagtaacgctgatctggtgcaggctatccgtgaggcgaatttccggcgcggtgaggaacttcagaatgccatcgcccgcaaaggccagtcattcggctggcagagcctgctggtattcgtcctgagcaccgggcttatcattctgtttacccgcatgattatcgggccggtgaaagtgattgagcggatggttaaccgcctgggggaagggcgcaacctgatacagcgccttgataattttaacggcccgagagaactgcgctcgctggcgctgcggattgtctggctgagtgagcgtctggactggctggaatcccagcgtcatgaattcctgcgtcatatttcccatgagctgaaaaccccgctggccagtatgcgtgaaggtaccgaactgctggcggatgaagttgcgggaccgctgacggcggatcagaaagatgtggtatcaatactgagtgaaagcagccgccatttgcaggtgctgattgaacaactgctggagtataaccgcacgctggtggacagcccgacagaagccaaatgggttaacctcgatacggtagtgcatgaggtggttaatgcccacagcttaccggcgagaagcaaagaaatcactacagaccttgctctggatgaaacaagtgtctgggctgaacccgtcttattaacacgtgtactcgataatctctactcaaatgcggtacactatggcgctgaatcgggtaagatccggataaccagccggaaagccggtcagcatatacagattgatgtcgccaataccggtacgccgatcccggaagaagagcaggaaatgatcttcgaaccgttctatcagggctcgcttcagcgcaaaggtgctgtcaaaggcagcgggctgggactgagtattgcccgggattgtattaaccggatgggcggcgaactgatattagtcggttctgaaggtgcggatgtgtgcttccgtattcagcttccgttccacaccttactggaataa

SEQ ID NO: 275519 - DNA, 3888 bp, Morganella morganii
atggaaattttgcgtggctcacctgtgttatctgcgtttcgcgtatcaaaatttatcagcgcgttcactgaacaccacctgccggtgaccaacatctatgcggaatatgtgcattttgctgacctttccgcacccctgaccgacgatgagcacaccaaattacagcagttgctccgctacggcccgtcgctggcggaacatgcgccggaagggatcctgtttcttgtcacgccgcgcccgggaacattgtctccctggtcatcgaaagccacggatatcgcgcataactgcggtctgtcagccgttacccggctggagcgggggatcgcctactatattactaccacagggctgacagagaatgaacatcagcaactgagtgcgctgttacatgaccgcatgacagaaacggttttcagcgaactgtcacaggcacaggcgctgtttgcccgccatgaaccggcaccgctgaccgtgattgacctcgcgggtcagggacgtgcggcactggagaaagccaatatttcgctggggctggcgctggcggaagatgaaattgattatctggcggacgcattcacgaaactcggccgcaatccgtccgatgcggaactttatatgtttgcccaggcaaactctgaacactgccgccacaaaatttttaatgctgactgggtgattgatggtgaagaacagccgaaatccctgtttaagatgattaaaaataccttcgaacagacaccggatcatgtgctgtccgcctataaagataacgcggcggtgatggaaggctcctctgttggtcgtttcttcccgcagggggaagaccgcagttatcagtatcatcaggaagaaacccatatcctgatgaaagtggaaacccacaaccacccgaccgccatttccccgtggccgggggcggcaaccggctccggcggtgaaattcgtgacgaaggcgcgaccgggcgcggtgccaagccaaaagcgggattaaccggtttttctgtctccaacctgcgcatcccgggctttacccagccgtgggagcaggatttcggcagaccggaccgcattgtcagcgcctatgacatcatgaccgaaggcccgctcggcggcgcagcatttaataacgaattcggccgtccggcactgctcggctatttccggacctatgaagagaaagtcagcagtcacaacggcgaggaactgcgcggttaccataaaccgattatgctggcgggcggcatcggtaatatccgtgctgaccacgtgcagaaaggggagatcccgccgggcgcgaaactgattgtattaggcggcccgtcgatgaatatcggcctgggcggcggtgcggcttcctccatgacatccggtcaatcggatgcggatctggattttgcctctgtgcagcgtgataatccggaaatggaacgtcgctgccaggaagtgatcgacgcctgctggcaactgggtgataacaacccgatcctgtttatccatgatgtgggcgcgggcggcctgtccaacgccatgccggagctggtcagtgacggcgggcgcggcggacgttttgagctgcgcgatatcctcagtgatgagccgggcatgagcccgctggaaatctggtgtaacgaatctcaggaacgctatgtgctggcggtctcgcctgagcagttaccgctgtttgaggcactctgtcagcgcgagcgcgcgccgtatgcggtgattggtgaggcgacagaaaaacgtgacctgatcctcaatgacagccattttgataatcagccgattgatatgccgctggatatcctgctgggtaaaaccccgaaaatgcgccgcgatgtcaccacactgaccgcagatggcactccgattgaccgcagtgatattaatctgcatgaagcggtaaaacgcgtgctgcatttaccggcagtagcggaaaaaaccttcctgatcaccatcggtgaccgtactgtgaccggcatggtttcccgtgatcagatggtcggtccgtggcagatcccggtggcggattgcgcggtgaccactgccagcctcgacagttattacggtgaggcaatgtctatcggtgaacgtgctccggtcgcactgcttgattttgccgcttcagcgcggatggcggtggcggaagcgctgctgaacattgccggtgtgcagattggcgatattaagcggattaaattatccgccaactggatggccgcagccgggcatcctggcgaagatgccgggttatatgcagcggtaaaagcggtgggtgaggagttatgcccggcgctcggcctgactattccggtcggcaaagactcgatgtcgatgaaaacccgctggaacgagcagggcgaagagcgtgagatgacctcgccgctgtcgctggtgatcacggcatttgcccgtgtggatgatgtccgccggaccgtcacgccgcaactgcggagcgatgtgccgaacagtctgctgctggtggatctgggggaaggccgtaataccctcggcgcaaccgcactggcacaggtgtatcgccagctgggacagaaaggcgcggatctgcgtaatccgcaggcgctgcgcgcattctttgacaccatgcagaccctggtgcgggatgaaaaactgctggcgtatcatgaccgttcagacggcggtctgtttgtcacactggcggaaatggcctttgccggacactgtggtgtgaatgcggatatcagtgcatttgatgaggatatcctcggtgcgctgtttaccgaagaaccgggcgctgtgctccaggtgcgtgaagcggatctggatggcgttgtgcaggccttcaccggtgccggtctggcagatatgctgcatgttctcggtgaagctgtaccgggggatgattttattgtccgcagccacaatacagaagtttatcatcagtcctgccgtgaactgcggatcatgtgggcggaaaccacctggcagatgcagcgtcagcgtgataacccggcctgtgcggatgaagaacatgaagccaaacaggatctgacagacccgggtcttaatgtggtactgacattcgatcagaatgacgatattgcagcgccgtatattgtaaaaggtgtacgtccgcgtgtcgcggtgctgcgtgagcagggggttaactcccatgtggaaatggcggcggccttccaccgtgccgggtttgatgccatcgatgtgcatatgagtgatctgctgaacggtcatcttccgctggacagttttcaggcgctggttgcctgcggcggcttctcttacggggacgtgctgggtgccggtgaaggctgggcgaaatcgattctgttcaatccgcaggtacgcgatgaatttgcacagttctttgcgcgtccggataccttatcactcggggtctgtaacggctgtcagatgatgtcaaacctgcgggatctgattccgggggcggatttatggccgcgctttacccgtaaccgctctgaacgttttgaagcgcgtttcagtctggtcgaagtggcacaaagcccgtctctgctgctgagtggtatggccggttcgcggatgccgattgcggtgtctcacggcgaagggctggcagagttccgtgatgcggcacatcagcaggcgctgacggaacgcggcctggtggcgctgcaatatgtggataactacggacaggtcaccgaacgctatccggccaacccgaacggttcaccggacggtatcacggcggtcacgaccgatgacggacgtgccactattatgatgccgcatccggagcgtgttttccgtaccgtcagcaactcctggcatccggagaactggagggaggacggaccgtggttgcggatcttccgtaatgcccgtaaacaattaggctga

SEQ ID NO: 275520 - DNA, 1440 bp, Morganella morganii
ttggtacataaaaagctaaattatgtcgttatcgtcgtcgtcgcgctgttcgcggcggcgctgatcgccatcaatatcagctggccatcgcagcagccgcaactcaaccgtattcttgcgcgcggggaactgcgtgtcagcgcggtggcatcaccgcttatcagctttaataagcagggacaggccagcggttttgattacgaactggcgcagcgtttcgcggactaccttggtgtaaaactggtggtgcgggaacgcgacggtgtcaatgacctgttcagcgaccttgccaataatgatgccgatctgctcgccgccgggcttatctataatgaagaccgcctggataccgcactgagcggcccgacttactacaccgtcgcgcagcagcttctctaccgcatgggtaacaaacgtccgcgggatttgggtgatctcggctctccggtctgggtcacagccggcagtgcccacgcccgtctgctccgtcagctcaaagcggataaatatccggatctggatatccgcgaagttgccggtaaaaacagcagccatctgcttcagcgcctggcaaaaggcgaaattgattatgtcgtcagcgattctgtcagcgtggcacaggagcagcatattcatccgaatgtcacggtggcctttgaggtcacagaaaaccagccgctgacctggtatctgaaacgcagtgaagacagcagcctgaatgccgccctgctcgattttttcaaccagacacgggaaaccgacaccctggcgcgtctggaagagaagtatttcagccacatgaatcagtttaattatgtggataccaaaacctttattaatgccatcaacacccaactggccacttaccgtccgctgtttgaaaagtacgcggggaaaatggactggcaggtactggctgcgatagcctggcaggaatcacactggaacccgaccgccacctcaccgaccggcgtgcgcggcattatgatgctgacccggccgacggcggatttcttcgggattgaggatcgccttgacccggagcagagcatcaagggcggcgggacatatataaattacctgatggacaaactgccggattccatccccgatgatgaaaaaatctggtttgccctcgccgcttataatatgggctacggtcatatgctggatgtccgcaaactgaccgagatgcagggggcggatccggacagttggctggatgtgaaatcccgtctgccgctgctgagcaaaaaagcctattatcagtctctgccgtacggctatgcgcgcggttacgaagcttaccgctatgtggaaggggtgcgtcgttaccagctcagtttacagggctatctcgatttacatcaggaagagctgctgttacagcagccgcaggaagaaacggcagagattctgacctctgccgcaccaaactga

SEQ ID NO: 275521 - DNA, 528 bp, Morganella morganii
gtgactgacagtacaacaccttataataatgatgaattctggatgaggcaggcgctggcgctggcagaagaggcggcgctggccggagagatcccggtcggggctgtgctggtgaaagataatcagcgcattgccgctggtttcaatcagccgatcctcagccatgacccgacagcccacgctgaaattgttacgttgcgcggggccggggcggtgctggaaaattaccgtcttaccgatgctacactgtatgtcactctcgaaccctgcatgatgtgtgccggggcactgatccacagccggatcaaacgtctggtgtacggcgcggcagagccgaaaaccggtgctgcggggtcatttattgatttgctgaccttaccgcgtctcaatcattatatggaagtgacgggaggcgtgctgggggaggagtgttcggcaatgctcagtgaatttttccgccgccgccgtgcggagaaaaaagccctgaaaaaacagaatgcggaaaaccagcagacagagaatgagtga

SEQ ID NO: 275522 - DNA, 639 bp, Morganella morganii
atgtttgaaaatctgggcatactgaatatcggtacttatatcatcggcgttatttttattatccttgtgccggggccgaactcactgtatgtccttaaatccagtgcgacattcggatataaaaaaggttaccaggccgcactgggcgtatttaccggtgatgcggtactgatcatgttgtcatttctgggcgtggcctcagtaattaaagcctctccggcattatttaccgccgtgcgttacctcggtgctgcgtatttattgtatctgggactgaaaatcctctatgccacttttatgcagaagaaggggcatcatgaggataaaccgctgaaagcggaaaatgcctttaataaagcgctgatcctgagcctgacaaacccgaaagcgattctgttttatgtctctttctttatccagtttattgattttaattattcccatcctgcggtgagttatggcgtgctggcgctgattctggaaacggtcagctttttgtatctctcctttttaatttacagcggcactaaattatcgcagttcttccgccacaaaaaacaggcggcaaaagtgggcaacagcaccatcggactgttttttatgggctttgccgccaaactggcgctgtttacggcgtaa

SEQ ID NO: 275523 - DNA, 1479 bp, Morganella morganii
atgaaccgacttcgttattttgccgttaccaccgcgatttgcctgggcacttttatggcaacgctggatatcagtatcgtgaatgtggcactgccggccattcagcatgatctggatgcaccgatggtgtcattacagtggctgatagatgcttatgcattgtgcttatccgccgttatcctgtccgccggtccgctgagtgaccgttacgggcgcaaaaagatgtggctggcgggtgtgctgatttttaccctcggctcactgctttgtgcactggcggatacactgccgttgctgctgtcagggcgggtagtgcaggggatagcggcggcgctgctgatccccggagctttgtcgctgatcacgcatacttttgcggataatcagcagcggatccgtgtgattggtatctggtcatcggtcagtgcgctgtcactgattaccgggccgatcctcggcggcgtactggtgcataccaccggttgggaaggcatttttctgatcaatattccggttggtataatcacgtttctgctcgggcagtatggcatccgtgaaagtgcggatccggagaaagcagcatttgacccggcagggcagttactcagtatcgcagcactgggctgtgtgacgtacgggctgacagaggcgggcatttatggctggctgcatccgctgacgctgttaactgtcaccggcggaattatttttcttttattatttctgtacaccgaaaaccgggtggcaaaaccgctgttgccgctgacggatttcagacgccgcgagtatctgcactataatctggcctcgtttgtgattggttttgcggcttacaccaatgtgttttttatcgcgctgtttttacagaaagcgcagggctggaatgcccttgaggccggatggcggatgtcgccggaatttatcgcgatggcgctgtttgcattctctttcgggcggatcgcccgcaaactgagtatccggctgatcctcggcaccggtctgctgctgaccgcagcggcctgcgggctgatgactttactgacgccgtatacgccgtatccgctgacagggctgatgctgtttatgctcggcaccggtatggggttatcaattcccgccaccggggcgctgattatgcatgccgctgacccggcgcgttccggcgtggcatcggcgacactgaatatgatgcgccagaccggtatgacgctgggggtggcactgctcggcacactgatgatacagcgggcggtcagtattgcgcagcaccgtcaattgccgtccgcagagcagcttattaccggtgcacagagcggagaactgacggctgcagtgcagaatacagtttatgaagcctttgcgggcgggtttaatctggcaatggcaggcgcagcattatcggcagtatgggtatttatcctgatattttatccccgccgccgcaaaatgccgcaggaaaacgggaaaataaccttataa

SEQ ID NO: 275524 - DNA, 594 bp, Morganella morganii
atgactcagtcagcagaacacaaaccccgttttaaacctgccgatgtccggatcaatgaactgatggatgccgccgaatcactgtttctcgaaaagggatttgatgccactacggtcagtgacattgtggcacgggccggtgtcgccaagggaacctattaccactattttgccgctaaaccggacatttacgaggcattacgccaccgttatatggactggtttctgtcacagactcagcaggcgatggatgcctgtgcggcaggtgatgcggatgccagactggcagcctggtgtgatcgttctgtcacggcctatactgaaaaacaggaactgcatgatgtcctgttccatcagggatttcaccagcaaggcaatgaccatgaaaatgccgtgctgaatcagctgcttgccctgattgcggaaggtgagaagcacagtcactggcgggtggcacatccggatatcacggcaatgattatttatcacggcatgcatgcggcggtggataccctgccgcagtccggacactacaccgcacagacgctgggcggcgtgctgtatgaacagtttctgcgctttctgaaagcctga

SEQ ID NO: 275525 - DNA, 777 bp, Morganella morganii
atgagtagtatcgttataaaaacacctgaagaaattgagctgatgcgggaatcaggtcgtctgctggcaagcgtttttgccatgctggacgatttcattaaaccgggtgtttccacgctggcgattaatgacaaagttgaagattatattgtgaacacccttcagtcacgccctgccagtaaagggcagtacgggtttcagtatgtgttgaatacctcactgaatgaagtggtgtgccacggtgttccgaaagcggacgaactggtgaaagacaaagatatcattaacgtggatatcacacttgagaagaacggctttattgccgattccagtaaaatgtatgtgatgccggaagcgtcaccgctggcccgtaaactggtgaaaaccacctatgatgccatgtgggaaggtattcagcaggtgaagccgggcgcgacgctcggggatatcggttctgctattcagcattacgcggaatcacgtggctacagcgtggtgcgcgagtattgcggtcacggtatcggccgtgagatgcatgaagccccgcaggtgctgcactatggtgtgcgcggtaaaggaacggaactgaaagaggggatgacctttaccatcgagccgatgattaaccagggcggcgcgaaaatcaaaaccaaaaaagatggctggacggtggtgacgcgggataaaaaattatccgcgcagtccgagcacaccattctggtgaccgcgaccggctatgaagtgttaactctgcgtgcggatgaaacattacgctga

SEQ ID NO: 275526 - DNA, 207 bp, Morganella morganii
gtgggtattgttaaaatctccgatgaattacatgaatatctgcgccgggcgagcacggtaatgtcgcgctctatcaatgctcaggcagaattctggatcaaaatcggaatgcaggctgaaatgaatccggataaaaccttcacaatgcttgtcagcgaaatgctggaaaaagagtctgtcagccggaaaggagaacagcatgagtag

SEQ ID NO: 275527 - DNA, 1014 bp, Morganella morganii
atgtctgttcatcactcccaatccgttattctgaccggcgaccgtatcaccgggcctttacacctcggacactataccggctcgctgcaacagcgggtcagactccagcattctgccgtgcagtatattctgatggcggatatgcaggggctgacggataacggcgcgcaaccggaaaaagtaaaccgttatttttatgatgtggcggcggattacctggcggcgggcatcgatcccgcccgttcggtgatttgcctgcaatcggcgctgcccgcactggctgaactgacactgctgtatctcaatctggtgaccgtttcccggctggagcggaatccgaccgttaaacaggaaatcattcagaagcagttctcccgtacactgccggccggatttctgatctatccggtcagccaggcggcagatatcaccgcgtttaaagccgatctggtgccggtcggggaagatcagctgccgatgattgaacaaaccaatgagattgtcagtaagatcaatcatgttaccgggcaggaattactggttcactgccgtgctgagataggtaaaaccggccgtctgccgggaattgacggtaacggtaagatgtccaaatcactgggtaatgccattaatctctctgtcagcgcggatgaactgacgcgcgccgtcaatgctatgtttaccgatccgcagcatctgcgggtgtctgatccggggcggattgagggtaatgtggtgtttgcgtatcttgatgcgtttcatccggatacagtcctggttgctgagatgaaagcccgttatcaggcgggcggtttaggcgacagagagtgcaaatcagtgctgaacgaatgcctgcagctactgctggcaccgatccgtgaggagcgggcgcggctgatggcggataaaccttatctgctttcggttatccgccacgggacagaaaaagcgcgggaagtgacacagcagacgctggatcaggtaaaaagaggaatggggctgcttattttttga

SEQ ID NO: 275528 - DNA, 339 bp, Morganella morganii
atgataatcatgaacagtatggaaagttcatgtgtatataataaagggggctgtctaaacaaaagcacaacacaaggccgttacagggaaaccggtggcaggtgttgttttatacgatgtcacaccataaccgcttccgggagactgctgcgtattttgttcttacggcacggtggcttgtccgccggtacaggaagccgcgctgacggggaaaaaatcctgctgctgtccgtcctccggggaataaaaaatacccgcacaggtaagtgtgcgggtaaatcatgtcagaacgtgtacctgtacagtcaggagcaggtcagtaatgtgaatatcaattaa

SEQ ID NO: 275529 - DNA, 900 bp, Morganella morganii
atgccttatttattcttaacgctggcggcgtgtttctggggtgggaactatgttgtcgggcaccttttggtgactgaagccgacccggtgattttatcgcaactgcgctggctggtgacggcggttttactgatgacgctgtatttcagtcaggtgaaacagcagtgggaattcatgaaaaaggcaaaagggataattctgtttctgtcattatgcggacaggttttattcccggtcacattgtatatcggtctgcaatataccacagcacttaatgccgctatttatatgtcggcaacgccgtcaattgttttactgatcaatgcgctggtgtttaaagaaaaaattcaggggaaaaattatatcggcgtattattgagtacgttaggtgtgatttatctgatatttaaaggtaatctgaatttttcagaagtgatcagtcatctgaataaaggagatttgtgggcactggggtccgccatcagctgggcgttgtattgtgcttttttaagactgaaaccccgtgaggtgaaaggtaatgcatttgtggccatcagctcggtgaccggcagcctgatgatgttaccaatactgattatttatctgttttcacatgattttcagatcagtaatatgggaaactatgcctcgccgctgtttatatccgggcttgcctatctggttatcttcccgtcttggctctcatacctgctgtggaataaaggtatcctgactatcggcgcaacaagaggggagattttctctcacctgatcccgctgagtggcggtttctttggtgttcttttcctcagtgaaaaattacacagtttccattttttaagtggtgctttaattatttccggaatttatttttgttcttctgcgaaaaaacaggggtaa

SEQ ID NO: 275530 - DNA, 387 bp, Morganella morganii
atggatccgctggggcatgccacccggctggtatgggatgagcagggggactgtcttcagcagactgatccgggcggcagtatcacccgttaccgctacaatacccgcggacaactgacccgctataccgactgctccggttatcacaccacactggcctatgatgatgccgggcgtgtcaccggatttactgacagcggcgacaagaaaatcaccttcggccgtaatatcttcgggcggctgaaagcgctggtcaatgaaaaagaagaatcataccggtttgaatatgatgcactgcaccgcctgacccgggagaagagccggttattcctccggcccacactcattaaaaattattttaaaattcataattattttgataaataa

SEQ ID NO: 275531 - DNA, 459 bp, Morganella morganii
atgaagaatatagttataagactggatgctgatattgttccagggaaatcaataggtggggtatctctgagtgataatgttagtgatgtaattagatgtattaatagtggctttacgataaaaaaacatgatatcagtaattcggtaggaaaattttttcttcataaaataaatggtggtgcaatatcatttactagtgatgaacatggagtaattattgcattatggtgtaagccaccatatagcggtagctataaaaataaactatatccgggaattacggcatcaaaattgaatgaggtatcaaaaaaacaagaaattataaaaggctatcttgttattgataaagattttcatgtttattatggaatgcctgaggatattgatgattttgattgtttttcagatttgaatgatgatgttatatttaacgaactatatgtgggggatttaggctaa

SEQ ID NO: 275532 - DNA, 1344 bp, Morganella morganii
gtgacgcaccatccgtcaaaaagctgcctgtcactggaatttaaataccgcggcagctataaagaaccggaaaccgcacaactctcctgttttcttgatcccgctgtctcctccgccggtattttattattgtggctgagtcagtattttgatcatatcgaacaggctcacggcgatatgctgtatcacggtgacgaaacccggttcagctttattcctcagatcggaaaaaataattcggtattagaaggagcagaggaaaaaccgaactggccgcaaaaactgctggaagggttatatatcgatcatgtgcaccattttatcaatattgatgttccggcgattgttccggaacttgactgggcattatcagacaccttcacactgaatatttatttcagcaaacagctgccgctgcgtaatgatcagctgacaaacagttttctgcttaattgtgccgccgtggtgaatcaggaagaacaaaaagaaatcatactggattttcatgaaaatgaagcggtttaccgtctgccgctggatgatgcccactacattacggaactggaacatattcagctggctttcgagcctcacgaggaattccgcggcgttgtcgctgacttctacccggtaacacacctggcaccggcttcccgcctgctgccgcaatatcaggatgcctggttttacgcgctcagcatcgataaaaccatcaccggccagaatcattattatatccatttttatgataatcacggtaaagcactgaccgttctgccgggcccgcatttccgctgtacttaccgctgtattatcagtgcaccgcaaagccgtgcggaggatatctgccatctcagcccgctgctgccggatctgctggaagccaccggtatcacacaatgcacgccgtgctacccgccgataacggataatcacgcttactggaatctgctgtcacactacagtgccaacagctttatgctgtcgtcggtggattcggtaaaacagctgatcagcgactatgtgctgtatcaggatacagaccggcagcgctgcaaacagataaaccagctgctgagcggtattcacgcggttgattcagtactggatgaccgtcttgtccggggaaaaccttaccgctgtctggatctgacaatcactcttgatccgcataaatatgacaataccggcgatgcctttatgtttgtcatgcatttatatcatttcttcccgttctgcctgtcagaaaatatgatgctgaaaatgaatgtgcaatttaccgataatgatacggtctggcatttggcgccttatttactgaacgggtataaatcactgatttaa

SEQ ID NO: 275533 - DNA, 381 bp, Morganella morganii
atgtttaaaccaaacagcattattctgtacgtcagcgacgttgagaaaagtacccgtttttacaccagacttcttaatgcagagcctgttgaacaatacagtgaattttctgtttttgccttatcggacgatatgatattaggacttcaggcaaaatccggcatcgaccctgcaccacaaccacatattggcggtatggaaatatgcatgtcagatatcagtaaccgtgaagttgatgagattttccgcaaatggagtgaattggggatggagattattatgaaacccgcaatgctggatttcggctacaccttcgtggcaaccgaccccgacggacatcgcctgagagtctgtgcgactgacaccacaaatattgactga

SEQ ID NO: 275534 - DNA, 657 bp, Morganella morganii
atgacatctgtggacagagtactgcacagtttagtttgtgcccttttttttgctggctggttcttaattcagtttgttatgctggccttccccggcgcagccaccagtagcggagcttttgccgcatggccgctgttcatgatcttatttgttttgccttattccctgttttcccgtgcattttaccagaagcggaccggactgatgcccttcggtacgatacagttatcaagcctctggctaccggtaatctcaatgattatattatctgttgcaaccatgttttacggtgaagatgaaacatggttactgcggatatttaccttttcccctttacaccagtttatttttgttgtggctgtcgttttcgcagccccggtcattgaggaaattattttcagaggctttctgctgaatgcagggataggatacggcccgaatggcaggcacgtggctattgctgtcacttcactcttgtttgcgtcagcacactatcagtaccattctcccgtcacgtttattataatttttgtgatgtccgttattttttgtctggtcagaattaaaactaattcccttatagcaccgattattctgcatgccctgtataacggcatacaaatgctgttactgtttattctgacggatatcagctaa

SEQ ID NO: 275535 - DNA, 123 bp, Morganella morganii
atggatgagccggtgaagaaaaaatataatatagcgctcgcggtattattgctgattatgctatccgctgtttatatatggttatcatcggtttactttctggactatataatcttccgttag

SEQ ID NO: 275536 - DNA, 261 bp, Morganella morganii
atggcgttactgattaccgaacgttgcataaactgcgatatgtgtgaacctgagtgccctaatgaagcgatttcaatgggggattctatctatgaaattaatcctgatttatgtactgagtgtgtcgggcattatgataaaccgacctgccagtcagtctgtccgattaccaacaccattattatcgatcctgaacataccgaaacacaggaaatgctgtgggataagtttgtgctgatgtatcacgccgataagatttaa

SEQ ID NO: 275537 - DNA, 387 bp, Morganella morganii
atggcaattgtcggcatcggaacagatattgttgaaataagtcgtattgaagcggttatcgggcgttccggtgaccgctttgcaaaacggatcctcagtgacgcggaatgggacgtgtaccggcagcataaacagccggtgcgctttctggccaagcggtttgcggttaaagaagcggcatccaaagcgctgggcaccgggatccgtcaggggctggcgtttaaccagtttgaagtcagtaatgattcactcggcaaacctaatctgacctttctcggctatgccggagaactggctgccgcccgtgaagtcacacactaccatgtctctattgccgacgagcgtcattacgcttgtgctacggttattcttgaaacaaacacctga

SEQ ID NO: 275538 - DNA, 732 bp, Morganella morganii
atgagtgaagttttattgggtgtaaacattgaccacattgcaactgtccgtaatgcacgcggcaccaactatccggatccggttcaggcggcatttgtcgcagaacaggcgggggcggaaggtatcactgtgcatctgcgcgaagaccgccgtcatatcaccgatcgtgatgtggaactgctgagacaaaccattcagacccgcatgaatctggaaatggcggtcactgatgaaatggttgatatcgcttgccgtattaaaccggcattctgttgcctggtaccggaaaagcgtcaggaagtcactacggaaggcggtctggatgtcgccggtcagaaagaaaaaatcgcccgtgcggtgaaacgcctgactgaagcgggtattaaagtttccctgtttatcgaccctgaccatactcagattgatgctgcggatgatgtcggcgcgccgtttattgagatccacaccggtgcttatgcggacgcggaaacgtctcaggaagaagacaaagaatttatccgtatcaaagatgcggtagcctatgcggctggtaagggcctgaaagtgaatgccggacacggtcttaactatcacaacgtccagcgtgttgcggcactgccggcgatttatgagctgaatatcggccatgcgatcatcggccgtgcggtcttcagcggactggctgctgctgttgcggatatgaaaaccctgctgcgggaagcccgtcgttaa

SEQ ID NO: 275539 - DNA, 759 bp, Morganella morganii
atggacggctggcagcgcgcatttgtactccatagtcgcccttacagtgaaaccagcctgatgctggatgtgttcactgaacaggaagggcggcagcgcctgctggcaaaaggggcgcgccgccgccgttccggtctcaaaggggctttacagccctttacgccgcttctgatccgctggggcgggcgcggggaactgaaaaccctgcgcgatgcggatcctatctccctcgctttacctctgaccggcactgttctttacagcggcctgtatatcaatgaactgctctcccgggtgctggctaacggcgttacctattccgccctgttttttgattatctgcgctgccttcagtatctcgcggccagtgataccacaccggagcaggcactgcgtcagtttgagctggcactgctgcaccatatcggctacggcgttgactttcttcactgtgcgggcagcggtcaggaagtctctgataccatgacgtaccgttaccgcgaggaaaaaggctttatcgccagtctggtggtggataacagcagtttcaccggtcgtgaactgaaagcacttgccgcccgggaattcccggatacggaaactttacgtgccgccaaacgcttcacccgcatcgctttaaaaccctatctcggcggaaaaccattgaaaagccgcgaattatttcgtcaatttgtgcgcccgccgttggtttcaaaagaaaatggccgcggtggttcctcttcgtctgaaaaaggttaa

SEQ ID NO: 275540 - DNA, 909 bp, Morganella morganii
atgagcgaagaaaacacctattgcggctttgtcgcgatagtcggacgtcccaatgtgggcaaatccaccttactgaaccagttactggggcagaaagtctctattacctcgcggaaaccgcagactacgcggcaccgcattatggggatcgatacacaggataattaccagattatctatgtggataccccggggctgcatattgaggaaaagcgggcgatcaaccgcctgatgaaccgtgcagccagcagctccatcggtgatgttgagctggtgatttttatggttgaaggcaccaactggacgcctgatgatgagatggtactgaataaagtccgctctctgcgctgcccggttctgcttgccatcaacaaagtggacaacgtggaagataaaaccaaactgctgccgcatattgcgttcctcagtcagcagatggatttcctcgacgtggtgccgctcagtgccgagaagaaaatgaacgtcgataccattgcgaacattgtgcgtcagcacattccgcaggcaccgttccacttcccggaagattacatcactgaccgttcgcagcgttttatggcctctgaaatcatccgtgaaaaactgatgcgtttcctcggcgatgaactgccgtactcggtgactgtggaaatcgaacagtttgttgtgcaggacaacggcgtatttcagatcaatggtctgatcctcgttgagcgcgaaggccagaaaaaaatggttatcggcaacaagggcagccgtatcaaaactatcgggaccgaatcccgtattgatatggaacgcctgtttgatgcccgtgttcacctcgaactgtgggttaaagtcaaagccggctgggcagatgatgaacgtgcactgcgcagcctgggttatgttgacgacctgaagtaa

SEQ ID NO: 275541 - DNA, 612 bp, Morganella morganii
atgcaggcactcactcaccgcagtgccagcagcaaacataacgaacgcctggaatttctcggcgattctattttaagttttgttattgccaatgatttatatcaccgcttcccgaaagtggatgaaggggatatgagccggatgcgtgccacactggtgcgcggaaataccctggcggaactggcccgcgaatttaacctcggcgaatgtctgcgcctggggcccggggagctgaaaagcggcggcagccgccgtgaatcgatcctcgcggataccgtcgaagccctgattggcgggatttttctcgacagtgatattcagacaattgagcggattatcctcagttggtatgaatccagactgaacgaaatctcgcccggggataaacaaaaagacccgaaaacccggttacaggaataccttcaggggcggcatctgcctctgccgaactacctggttgttcaggtaaaaggtgaagctcacgatcaggagttcaccattcactgccaaatcagcggtgttgaacagccggtaaaaggaaccggttccagccgccggaaagccgaacaggccgcggcggaacaagcattaattttgttggagcttgaatga

SEQ ID NO: 275542 - DNA, 993 bp, Morganella morganii
atggcgaacacctttgcgctgatcctgaccctggcaacgttggttaccgggatcatctgggcggtgaataaatttaaaattcagcctgcccgtaagaaaaaactggcgcgcatggcggagctgactgaaggaaccatggatcaggcccatctggctgagactgtggccaaaccgggctgggtggaaggtaccgcatccctgttcccggtgctggcgattgtcctgattgtgcgctcatttatttatgagccgtttcagatcccgtccgggtccatgatgccgacgctgttaatcggcgactttatgctggtggaaaaatacgcttacgggttaaaagacccgatcacgcagaccaccctgattaaaaccggggagccgaagcgcggtgatattgttgtgtttaaatatccggaagatccgcgtgtcgattatgtcaaacgtgtgattggcctgccgggcgataaagtcgtttatgacccgtatgccaaagagttacaggtctatccgggctgtaccaaagaccagagcagctgtgaaaccctgccggtcacctatggtcaggagtatgaaagcgagtgggcaatccgctgggaaaaatccccgctgggcggctcctttatgagcggcggcgcacgtcagttccctatcgaagatgatatggaagtcggttatcgtcgtcaggcggaacggattgaaaacctgggaccggttgctcaccatattctgaccgttccggaaatcaccccggacagcatcagcgggcagcgcctgttccgtcagccgggattaccggagtacacctgggtggtgccggaagggcattactttatgatgggtgataaccgcgataacagtgcggacagccgtgtctggggatttgtgcctgagcaaaacctggtcggccgtgcaagctttatctggttaagccttgaaaaacaggaaggtgaatggcctaccggtctgcgcctgagccgtttcggacggatagaatag

SEQ ID NO: 275543 - DNA, 1800 bp, Morganella morganii
ttgaaaatcaaccatatccgaaatttttccattattgctcatatcgatcacggtaaatccacattatccgatcgcattattcagatttgcggcggcttatccgaccgtgaaatggcggcgcaggttctggattcaatggatctggaacgcgaacgcggcattaccatcaaagcacaaagtgtgacactggattacaccgcgcagaatggtgaaacgtaccagcttaactttattgataccccgggacacgttgacttctcctatgaggtctcccgttcactggccgcctgtgaaggggcgctgctggtggttgatgcggggcagggcgtggaagcacaaacactggcgaactgctacacggcgatggaaatgaacctggaagtagtcccggttctcaataaaattgacctgcctgctgccgacccggagcgggtggcggaagagattgaagatatcgtcgggattgaagccgccgatgcggtgcgctgctcggcgaaaaccggcgtgggtgtgaccgatgtgatcgaacgcctggtgcgcgatatcccgccgccggaaggtgacccggatgcgccgttacaggcactgattattgactcctggtttgacaactatttaggggttgtgtctctgatccggattaaaaacggcacactgcgcaaaggcgacaaaatcaaagtgatgagcaccggccaggtgtataacgctgatcgtctcgggatcttcacaccaaaacaggtcgataaagatatcctcagatgtggtgaagccggctgggtggtctgtgcgattaaagacattctcggggctccggtcggtgataccttaaccggcgcacgcgcaccggcggataaaccgctgccgggctttaaaaaagtcaaacctcaggtctatgcgggtctgttcccggtcagttctgatgactatgaagctttccgtgacgcactcggtaaactgagtctcaacgatgcttccctgttctatgagccggaaagttctaccgcgctgggcttcggtttccgctgcggcttcctgggtcttctgcatatggagattatccaggagcgcctggagcgtgaatatgatctcgatctgatcaccaccgcaccgacggttgtctatgaagtggaaaccaccagtggtgaaatcgtctatgttgacagcccgtccaaactgccgccgctcaacaatattgaagagctgcgtgagccgatcgcggaatgtcatatgctgctgccgcagcagtacctcggtaacgtgattaccctgtgtattgagaagcgcggtgtgcagaccaacatggtgtatcacggcaatcaggttgcactgacctatgaaattccgatggcggaagtggtgctcgatttcttcgaccgcctgaaatccacctcacgcggctatgcatcactggattacaacttcaaacgtttccaggcgtctgacatggtgcgtgttgatatccttatcaacggcgagcgggtggatgcgctggcactgatcacccaccgtgataactccatgtaccgcggccgtgaactggtggagaagatgaaagatctgatcccgcgtcagcagtttgatatcgcgatccaggctgccatcggtatgcatattattgcgcgttcaacagtgaaacagctgcgtaaaaacgttctggcgaaatgctacggcggtgacgtcagccgtaagaagaaactgttgcagaaacagaaagacggtaagaaacgcatgaagcaggtcggtaacgttgagttaccgcaggaagcgtttttagccattctccatgtcggcaaagattaa

SEQ ID NO: 275544 - DNA, 7482 bp, Morganella morganii
atgaataaaataacccgaattcttgagaagctgaatcagggacgtgaacaacagcccctcacactggcagatcttataccgctctcccttgccgaagttcgtaacatagcaggcggccatttatcccgtgaagaatcacaaatacttcactacgcggcaataaaagaaaagcagaacaatattttgttcaccgcacgcgcgctgacccgcgccaacccgctgctgagaaaagaaatggggcgtgcccgccggcgcggtgccgcaccatacggtgactttgatgacatcgttatgccgcgtgctgatgagtttgccgccccggggtcagtatcttcaatgttttccccggccggttatctgacggagctttaccgtgaggcccggggtctgcatcagacaaacagtacgcataacctggataaacgccgccctgacctggcaaaactggttctctcccaggagaatctggataaggaagtttccactctgatgctggcgaatgatcagctggaaacggcactgatggcaaaagccggtaagacagataaagccgcttacgatgaaaccctggcgacatcccgctacagtggtgtgaccccgtataacgccccgtttgagctggtacgcgaagccatggcacaacaggacttttcgctgccggacaatattctgagcaaagggacggcctccgcggcacagcttgcgctgtccgccggtatctcaccggaactgtataccatactgaccgaaaaaaccggcgggttaagtgacgcggaaacagacgccctggtgaagaaaaactttccgggagtaaataccaaagagctgatgaaccttgatgccctggcgaattattatgaactgccgcgggatgagattcaggcattaccgggaatggattttgatgacaaacccgatttatccggtatcccggacggttcatcactgaaagatacacctgacctgtacggaaaaaataaaacacaaaaaataaaagcaaaagacgcaggcggagatattctttatacattgacacataccagtttggaaaatagatattcaaactgcataaaattcgaatatattgacctcattccgctgggtaatgaccattactacattaatttcagtgtaaaatatctgaatagcgatgattaccataatataaccatgggaatcgcaacagataaagatcattatcctgaagatctttatcataatagcgagaagaaaattgagacagggaagcactacagtatcccggtgatgataaatgcagagatagtacccgaaatcaccattatggttaaagctgggactgactcaggcaccacgtatacgtacactacatttgctatcaccagaacaccagcccccctcttccggctcaacaaaaccctgcgcctggccaaagcctgcggcctcagcccgctgaacacacaccgaactctaccccgcctgcgttacaacaataacgaaactgatgatattgtattacagcgcttcaccgaaaccctgcattacagcaaacgttacagtcttgatatggaaacagcattaatactgtgtggtgctacaatcagtcagaccgacgatgacgggcaactcagccagtttgaccgcctgtttaataacccgccgcttaacggcagcatttttagtccaagtgacgattacattccgatgaaaacggatgctgaagacccgcgccgtgaagtactgaaacgggctttccgggtggataacaccgggctgtatcagttgtttgatctcattgttccggatatgttggagcgtaacgaagcctataacagtattaagctgctcagttatttctggcggttacgcctgctggccgatgttcaccacctgacggtggcacaactgcatactttgtggcggcagtatcccggctacgactccgagggcacttatgagttcagtgagcaacaataccgtgattttattcattttatttatcagaccacccaatggctgacagcacagaatatcaccgctgaacaactgtccctgctgctgacaaccgatgccccggcaaccccgaccaaagagatgaacaccctgctggatgccctgcgtaacggcggtattgacagtaccgatgccgataccctgcgcgcctccatggccccggtgattgccgccgcgatgcagctggaaagcccggaacagggggaatccctgctgcgctggctggataataatcacccgtacaatgcacctttcacccgcactgtctggccgcttatcaccaccgaaaaaccgtctgcggatcagcaggaaaaaattgccgcctggtgccaggcactggcacagcgggtgctggttatccgtacctttaccttcagtgatactgaactgcagatattgtcacagggcgcaccggctgattccgttgccgcactgcgcgacatcagcgatttccataacctgatcaaccgctgcggtgacaacgccggcaccgtgctggatgccctgcaggacaacacactgacggtggcggctctcgccggcgccctgaatctgtcagagtccgtgattacccaggcactgacacaggccggtcaggaaaccgaactcaccacctggcagcagttagccacactgccgtcacggctggacctggcggatacactgcatatcaccccgaaagatatcactaatctgctgaccgtttctgacaatcccgccccgtcttatgcggagctcaccaccctctccggtctgttacagtccggtctgaatgaacagctgacaacacagctgaataaccggattcagccgcgccgcagtgaagccctcagcggcgaataccgcacccgcattatgggtaacgccaccgcaaaccgcgatgatatctggcgtgaactgctgattgacggcaaagtcagcgcagacatcaccaccacgcggctggcggatgccattgccggtattcagctctatgttaaccgcacgattgccggtgatgaacccggcgcaatcagtaccgttctggcgcgtcagttctttaaagactgggatacttataacaaacgctacagcacctgggccggcgtatcacagttagtgtattatccggaaaacaccatcgacccgaccctccgtaccggccagaccgggatgatgaacaccatgctggagcagctgtcacagagtgagcttaacagcgataccctggaggacggcttccgccagtatctgaccgcctttgagcaggtcgctgacctgaaagtcatcagcggttatcatgatactatcagcattgatgagggtaatacctggtttgtcggcaccagccagactgaaccgaaaaaatattactggcgtaaagcggaccacagcaaatgtcagaacggccattttgccgccaacgcctggagtgagtggaaagagataacctgtgccgtcagtccgtatcagaatatggtgcgtccggtggtctaccgttcacgcctttatctgttgtgggcagaacaacaaatacgtaaagacagggacggtaatgacgatattttgtcttatactctgaaactgactcatataaaatatgacggcagctgggcatcaccgttcagttatgatgttacgccaaaattcagcgaattaaccgggcaggatgtggggttatattgcgctgctgattatgaaaacgatatattatcgtgtatcttttatacaaaagaaaaagagggcgacctgcatcagagtacagttccccccaaagaatatgccgggttacagattcttgcggatatggagcaaacaccgttcctgggtatagacagtttcattaaaacagtaataccgcagctggataccgttaatatatcccgtattaataccacactggaaaatatgaatgcgccgaccctcgatccggaagaacaacagggtagtccggatctggctctcggacttgatctgattagctacaatctccggaaagaaggtaataactgtattctgtctgtcgagcccgttgtcgatgtgacaattaatgccggcacaataccggaaccgttgcgggcactgtttgccgctaaatattcaggcgggaattatgccttatatgagttcactgatacgtctttcagctcagaaaatacggatatccccggcggaaaatgcagccttcatcttctttatgataaagcccgttcaatcagttatctttacctgactctcccgtccggtaacaaacaacctgatattatcaggcaccttacgtcagcactattaaatgtgggtggtactccatcaggaggaatataccttcaatgggaaggtagtgacaatcaatatcattatttgagttccggaccggtaacaacccggaatccaatcataaaacaaaatatggacatatcagtttttgaaaaaaactatatcgggacaataaaaacgggcgagcctgagcttattttatctgaagactacccggcctgccctgaactccgtattattaacggcgatacaacagtgctggaatttacccaatcctgtactccgaatcatccggctgtgttatccgacggcagttttcatttcgacagtacatttaaccgtcaatccctggatgtcacggcctttgttaaaaataaccaactcaatttaccgtttaaaattgattttaaacgcgtgagtaatgcgaaaatcagcggaagccgtcactataatctgacgatgaaagtatcggcaggtaactcgtctgcaaaaacagggtctgcagttatctccctgcataccacgccggacggtgcccggtatatggaatgggacgtgtaccgcacccgcctcaataccctgtttgcccgtcagttaattgagcgtgccaaccgcgggattgatgcggtactgtcaccggaaacccagaatctgcgggaacccaaaccgggagacggaacctatgtgacactgacactgaaaccgtatgacccggcgattcatggcagtgaccgccgctttacgattcagcgttgttatgtcctcactgctggcgacgcatatcctgttattgacggcacggtaagtacagaaacatcaaccacggttaatctgtttaccccgaatctgggatataacgacgacagaatactccttaatgcacattttcagagcggcgatacagagcggattctatttattcctgacggaaacggtggctggaagttagacaccgactatcacagcagcttccccggtctggaatctgtctccggcctgtcacaacccgatgaaccgatggacttcagcggtgccaatgccctctatttctgggaactgttctattacaccccgatgatggtggccatgcgcctgttacaggagcagaactttactgaggcccaccgctggttaagctatatctggcgtcctgccgcaaccggtgccggtgactggcgggtccgtccgctgctggaggataccgcctggaacgccgacccgctggattcggttgacccggacgcggtcgcccagaatgacccgatgcactacaaagtcagcaccatcatgaaaatgctcgacctgctgattgcccgtggtgacagtgcttaccgcatgctggagcgcgataccctgaatgaagcgaaaatgtggtatatgcaggcgctggggctgctgggcgataaaccggtcaccgtcatcagcggtaactggaataacccggcgctcagtgaggccgccgatgatacccgggaacaacagcgccatcaggccatcagcgccctgcgtcacggcggtctgatgccggaacggcattccgccaatacgctgaccgggctgttcctgccacagcagaacgaaaaactgctcggctactggcagaccctggacatgcgtctgtttaatctgcgcaataatcttgccattgatggtcagccgttatctctgccaatctttgccgctccggccgacccggcagccctgctcagtgccgctgctgccgcatccggcggaagcaaagcgttaccgtctgccgccgtcccggcaatgcgcttcccgcaggcgctggaaagtgcccgttcgctgacaggtcagctgatgcagttcggcgccaccctccagggactgattgagcgtcaggatgcggaagccatgagtgaactgctgcaaaatcaggccggtgcactgatgctctcttccctgcgtatgcaggagcaggcactggcagagctggacgccgagaagaaaacactggaacagagccgtgccggggcacagtcccgttttgacagctaccgtgccctgtatgatgaaaatgtcagtgccgcagagcagcggacgatggatctgtatctctcttcttcggtcctgagtacctccgctgaagcactggcgatggcggaagccgttgctgatatggcaccgaacgtcttcggtatggccgtggggggcagccgctggggcggtatcccgaaagcgattggttccggtatcagcctcgcggcatccgccaccaaaattaccgcagacaatatcagccagtctgaggcatggcgccgccgccgtcaggaatgggaaatccagaaaaacagtgctgaatctgaagtcagacagattgatgcccagctggacgccctgactgtccgccgcaccgccgctgaaatgcagcgcgaatatctggaaatccagcaggcacagactcaggcacaactggaattcctgcagcgcaaattcagcaacaaagcactctacagctggctgcgcggccgtctggcggcggtctattaccgcttctacgatctgaccgcggcccgctgcatgatggcagaagccgcttacggatggcagaccggtgagaccacccgctatatcaaaccgggtgcatggcagagcgcccatgccggactgatggccggggaatccctgctgctgaacctgaccgagatggagcaggcatggctgaaatgggatcaccgcgcactggaagttacccgtacggtgtctctggcagacgtgtacagcgctgataaggtggatctggccgcgaaaattgccgaattactgacaggcagcggatcaggcagcacaccggcggaaaccgggctttcactgaccacggataaacagctgcatgctgcattcaacctgaaagcactgaatattgcggaggattatcctgccggactgggtaaaacacgccgcatcagacagatcagtgtgacgttaccggcgctgaccgggccgtatcaggatgtgcgtgccgtgctcagttacggcggggatgtcagactgccggacggctgcaaagccattgcggtctcccacgggatgaatgacagcggtcagttccaactggatttcagcgacggccgctggctgccgtttgaagggatcgcggtggataatgacagcagtctgaccctgagcttcccgggggcaacaactgataagcagaaagcgctgctgctcagtctgagcgatattatcgtccatatccgctacaccatccgttaa

SEQ ID NO: 275545 - DNA, 4242 bp, Morganella morganii
atgcaacaatcagacaatatcagtcctcaggcgccgtctctgccgaaaggcggcggtgcactgaccggacttgccggacaggcgggtgcggccggtccggacggcgcggcatcattatctctgccgctgcccgtcagtgccgggcgcggttatgccccttctctctcactcagctacagcagtcaggccggtaacggcgccttcggtatcggctgggatgtgaatcttcctgcggtcagccgccgcacccgcaaaggtgtcccttcttataccggtgaggatgagtgtcttgatcctgccggtgaagtcctggtggctgtccccggcactgcggataaacgccagaccctgctgggtgtaaaactggcggtgtcttatcagataacaacttactgcgcccggacggaacgcgatttcagccgtctggaatactggcagccgcagggcagctcctcagagccggatttctggctgtggtataccgcagacggtcaggtgcatctgctcggttatgaatccgccgcccgcatcagtgacggcagcaataccgcccgctggttactgaatgcctcggtctccgccaccggtgagcagatttattaccgttaccgtgcggaagatgatattaactgtgatactcaggaaaaagccgcccatcctgactgtcaccgtcagcgctatctcagtgaggttcattacggcaatatcaccgccgggcgcacattcccctgtcttaacggcaacgatgccgtcaacgccggctggctgtttgtgctggtgtttgactacggcggacgcacccttaaaccggcagaaaaaccgctgtttaacgccggttccggctggttgtgccgtcaggacccgttctccggttatgcttacgggtttgatctgcgtacccgccgcttatgccgccaggtactgatgttccaccgcctggaaaccctcgctgagaaagcaaagggtgaggatgaaccggcactggtctcgcgcctgctgtttgagtatcaggaaaccgcgtttatcaccacactgaccgccgcacagcagatggcatttgaggatgacggcaaagtacagtctctgccgccgctgaccttcggctggcagacctttgatgtcccggctgccccgcaatggtcacagccggagatgggaaaactcaatccgcagcagccgtggcagtatctggatctgcacggcgaaggtatttccgggattctgtatcaggacagcggcgcatggtattaccgggcgccggtccgggatcacggaagcgataatgtgaacgcggtgatatgggataaaccacagcggctcggtaatattcccgccctgaaagacggcgcgatgctgaccgaccttgatggtgacggacgtctgcagtgggtcgtcacacagccgggtgtacaggggcaataccgtcagcagacagataacccggcacagtggctgcatttcacaccgctcagtgccctgccgctggaatacagccatccccgtgcgcaaatgaccgatatcgacggtatcggtgccaccgacctggtgcttatcggcccgcgcagtgtgcgcatctggccgggcagcaaagacggctggttatccgcacagactatcccgcaggcggaaaaaattgtcctgccgtcaccggacggggatgccgccacgctggttgctttcagtgatgtgctcggctccgggcagcagcatctggtgcagatcagtgcagacggtgtgctctgctggcctaatctgggtcacggccgctttggtcagccgctgacactgaatggcttcagtaaaaaacgcagtgaatttaatgccgcgtatgtttatctcgctgacgttgacggcagcggtaccgccgatattctgtatgctcacagcgattatatcgaaatctaccgtaaccgcagcggtaacgggtttgataaaccggtgactgtgacgctgcctgccggtgtccgttacgataatacctgccgcttacaggcagcggatgtgcagggactgggggttgccagtctgctgctgacggttcctcataccggaccgcgtcattatctgctgcatctgaccaccgaaaaaccgtggctccttaatcagattaataaccggacggggatgtcgcaaacgctgcattaccgcagttcggcacagttccgcctggatgataaagcccgcgagccggtctcatatctgcctttcccgctgcatacgttatggcggacagaaaccacggatgaaatcaccggcaataaactggtcagcgaagcccgctatcaccacggagtctgggatgcccgtgaacgggaattccgcggcttcggctgcacggaagtcctggatacggataccgccgccgcccgcgataccagcggggtactgacgatgccggtactgacccgtaactggtatgccaccggttataccccggtcgatacacaactgaaaaatgaatactggcagggtgataaaagtgcctttgccggatttgttacccggctgacaaccggcagcggtgatgatgaatcaccctgctctgaggccattgcacaaaaacaggcattctggctcagccgcgcgcagaaagggatgcaactgcgcactgaggtatacggtaaagacggcagtccgcaacaggatttaccgtacagtgtcagtgagcagcggctgaccgtccgtctgatcacaccggatgcggatatgccggtggtccggccgtcggtatcagaaagccgtgaatatcactatgaacgcatggccgcggatccgcagtgttcgcaatccgttgtgctcagtgcggatgagtacggttatccgttgcgtgaagcggtgattcattatccgcgccgtccgaaaccggcgaaaaatccgctgccggataccctgcccgcatcactgtttgattccggttatgatgaccagcaattgcagctggtgattgcgctgtcacggcacgcacggcatcacctgaccagtctgaaacaggaacagtggctgaccggcctgcctgatgctgatcgcagtgatatttttattctgaaatccggactggttccggccacgggcctaaacacggaaacactgcctgcgctgctcagcaataatcagtcggcacgccactttgccggacaacagaggacttactggctgaataacgataatcagccgtcagtaacagtgccggtctggccgccgcgccggagttatacggataccgcagagctggatgagacgattatcgctgccataaaatcaggtacagatatcacggggcagttactgaaaaccggctatatcagcgcggattacctgtttgccggcgccacagaaacagggaaaaaggtctggattacgcgttccggtcatcagacttacgggacaccggaacagttccggcttccggtcaccgtccgcgataatccgctggtcggggaacgtcatctgacctacgacaggcatcactgtgttatcactgaacacaccgatgcctccggacttgtcactgccgcaaaatatgactggcgttttctgtctgtccgtgaaatcaaggatgtcaatgacaacatcagtcaggtacagactgatgcgctgggacgggtgatcagcagccgtttttacggtacggaaaatggtcagaaaaccgggtacagccggaaaccgctgacactgccggagtctgtgcaggacgcaacggagatgaaaaaacaactgccggttgcgcagtgttttgtctatgccgcagacagctggatgctcagcggtacagataaactgccgccgcatgtgctgaccctgacaacggatcgctatgatgatgaaccggcggataaaagcacacagcaaatccgtcagcaggtcaccttcagtgacggtttcggccggattttacagcagtccgtccgttttgaggacggcgatgcattccaccgcaataaaaacggttcactggcggccggaagccggaaaaatgaaaaagcaacaacccgctgggcagtatcaggccgcacggagtatgataacaaagggcatgccgtccggacgtatcagccatactttgtcaatgactggaaatatgtcagtgatgacagtgcgcggcaggatctgtacgctgacacgcactattatgatccgctcggccgtgagcatcaggtgatcactgctcagggttatcagcggcgcacactgtacaccccgtggtttgtggtcagtgaggatgaaaacgataccgcagcgtaa

SEQ ID NO: 275546 - DNA, 468 bp, Morganella morganii
atggtaaaagagtgggcaaccgtggtgcgctggcagaacgggcgcgcggtgctgcgttacgggtcatctgccggatgcggcagttgcaaagcccgggcggcatgcggctcatatctgctgaataaactggggccggaagcggagcatcagcttgagattccggtcagtgagccgctggtgaccggccagaaagtggaagtcgggatcccggaaggcagcctgctgcgctcggcaatgctggtgtatctcacgccgctgctgggtttatttgccggtgcggggctggtgcaggcactggcggaaagtcagtctgcggttctcgcgggtggtctgctgggcggtgcagcagggttcctgctggcgcgtaaaattgcccgccactggagcggctcagcggattatgagccggtcatcctgcaaatcggcctgccgccgtcagagctcagtattgatatgtgtgagtcctga

SEQ ID NO: 275547 - DNA, 954 bp, Morganella morganii
atgaaacgaatctggttatccgttgcttttctgacgggcagcctgttactcgcagcaccggcctcagcacaacaaagtgctgaggcgttgctgcagaatatgggtaacgcttcccgcacactcagttatgaactctcttttatcaccatctccccgaaaggtatcacgccggtccgttaccgctatgcggttatggatggtcagcctgtcgcccagattatgcagatggacagctcccgccgggaaattgtccagcgtggtcaggagatcagctactatgagccggggctggattcattcagcctgagcggtaatcacattgttgattatctgccgtcgattattttcgcggacttcagtgcgctgaaagcctattacaattttattgatgtcggacggatccatattggtgatcacccgggccgggtcgtgcgcatcacctcaaaagataattcacgttacaattatattgtggtcgcagatgaagaaaccggtctgccgttacaggtggatctgctggatcaaaataatgtttcactcgagcagttccgcgtggtttctgcttccgtgaataacagcagtgtgacggaagccctgaaagcggtgcagtccgtgaccatgccgccggtactggctattccgcagccggaaaagatcaaatttgactgggatgtgatgcgtctgcctaacgggtttaaagaaatgacccgcaaccgccgtcaggtgggcgagcaggaatgggttgagaccgtgatgttcagtgacggcctgttctcattttccgtgaatgtcgccaaagccgtgaagacaccagaaaatcaacagacaatgcgccagggttcgcgtacgctgtacaccacacgtaaaggtgataatgagatcaccgtctttggcgaactgcccccggcgacagcccggcagatagcggacggtgtgacattcagcggaggttaa

SEQ ID NO: 275548 - DNA, 636 bp, Morganella morganii
atgcaaaaagagacactttccgcactgatggacggagaaactcttgacagtgaagtggttaccgcactgacacaggatgcagatctgcaggcagaatgggctggttatcaccttatccgtgataccatgcgcggcgacctgccggatgttatgcattttgatattgcgtcacgggtagctgaagcactggcgcaggagccggtttatatcgcacctcaggcgatccctgagtctcagcctgaaccgaaaacatggcgtgattacggatttgtggcaaaactgcgcccgtgggccagtcagttaacacaaatcggtatggcagcctgcgtgtcactggccgtgattatcggtgttcagcactataataccgacggcacagagagcgtggttaacggtgatgcgtccgcattcaataccgttccgtttatgggcagtgcgtcacctgtcagcctcgatctgaaaaacggcgccggtcttgccccgcaaacccgttttgatcaggagcgcggtgcgcgtctgaatgcgattttccagcagtatgaactggatcgccgtgtacacacggatggtcagcctgaagttaaacagacagccaccccggaacagggtcgcgtgtcttcacaaccacagcagtag

SEQ ID NO: 275549 - DNA, 579 bp, Morganella morganii
atgagcgagcagttaacggatcaaatgctggttgatcgggtacagaagggggatcagaaagcctttaatatgctggtggtacgttatcagcacaaggtggcgagtctggtatcccgttatgttccgcagagtgatgttccggatgtggcgcaggagtcctttattaaggcgtaccgcgcagtcgggtcatttcgcggtgacagtgcattttatacctggctataccgtattgcggtcaatacagcaaagaattacctggttgctcaggggcgccgtccgccgtccagtgatgtggatgccggagatgctgagaattttgaatcctcaggggcgttaaaagaaatttcgaaccctgagaacttaatgttgtctgaagaattaagagcggtggttttccgcacgatcgattccttacctgaggatttgaaaacggcgattacattgcgtgagctcgatggtctgagctatgaagaaatagctgagattatggattgcccggtcggcacggttcgttcccgtatcttccgcgcacgcgaagccatcgataataaagttcagccactgatacaaaatcagtga

SEQ ID NO: 275550 - DNA, 744 bp, Morganella morganii
atgatgacaaacgaaaaacaatcgccgcgccgccgtggttttgcctgcaaacaattttttgtggcccatgaccgctgtgccatgaaagtcggtactgacggggtgctgctcggcggctgggcaccgtgcgaaaatgcccgccatattctggatatcggtaccggcagcgggctggtggcgctgatgctggctcagcggtcattgccggatacaccgattgatgcggtggatattgatgctgacgccgcagcgcaggccgcagagaatttcctcgcgtcaccgtggggtggccggatgaaggtgtttcatcaggatatcggtgagtttaccgctgcctgcccgcaatcccgttatgagcttatcgtcagtaatccgccgtatttcgccccggcggtcgcctgccgtaacagtgcccgggaaaccgcccgttacaccacatcactggatcaccctcagttgctggagcatgcggcacagcttatcacgccggacggtctgctctgtgtggtgctgccgtacaccacaggacaggattttatcgctgccgccggtgagcagaactggtttctgcacacacagattgccgtgtcagataaaccggataccccttttcaccggacattaatcgccttatcgcgccgtccggtcagtgcgctgcacaaaacgatgagtattaaaacggaagagggccgttacagcgctgatttcaaatcatttatcaccggtttttatctgaaatactga

SEQ ID NO: 275551 - DNA, 1347 bp, Morganella morganii
atgactgcaactactttttctgaacttgaactgaacgatgaactgatccgcgcactggatgccaagggctatgagcgcccgaccgccatccaggaagccactattccggctgcgctggataatcgtgatattctgggttcagccccgaccggcaccggcaaaactgccgcttatctgctgccggccattcagcacctgtctgacttcccgcgtaaaaaatccgggccgccacgcgtgcttattctgaccccgacccgcgaactggctatgcaggtggcggatcaggccagagaattctgtcagttcacccatcacgatgtcgccacgatcaccggcggcgtggcttatatgaaccacgcagaagtgttcagtgagaaccaggatattgttgtcgcgaccaccgggcgtctgctgcagtatataaaagaagaaaactttgactgccgcgcggttgagatcctgattcttgatgaagctgaccgcatgctggacatgggctttgccaacgacatcgaaactatcgccggtgaaacccgctggcgcacacagaccatgctgttctctgccaccctcgaaggtcaggctatccgcgatttcgccaaacggatcctgaatgagccggttgagatcgaagccgacccgtcacgccgtgagcgcaaaaaaatccagcagttctacctgcgtgccgatgacctggagcacaagaaagccctgctcgcgcatttgctgaaacagccggatgtcaccaaaacggtggtgtttgtccgcaaacgtgagcgcgtgcgtgaactgtctgactggctgcgcacacaggatattgtctcctgctatcttgaaggcgaaatggttcaggcgaaacgcaacgaagccatcagccgcatgactgacggccgcgccactgtgcttatcgccaccgatgtagcctcccgcgggatcgacatcgaagacatcagtcacgtatttaactttgacctgccgcgcaccgcggatgtctacctgcaccgtatcgggcgcaccgcccgtgccggacgcaaaggggtggccatttcactggtggaatcccacgatcagccgctgctcggcaaaatcatccgttatattgaagagccggttaaaatgcgcgtgattgatgagttacggccgaaaacccgtgcgccatcggagaaagcgacgcacaagccgtcgaaaaaagtgctcgccaagcgcaaagagcagaaagccgctgaaactgagaagaagaaaaaaaccaaaatccgtcaccgcgtcagtaaaaatatcggaaaacgacgcaagccaggcgcagaccacgcgggacaaactcctgcggccgctgagccacaggaataa

SEQ ID NO: 275552 - DNA, 822 bp, Morganella morganii
atgttgattgaacactatttttcgcagttactggctttctcatccacgccgcattgtcagtcacttttgcagcggcagcatctgaccgcagcggatttattgctgccggcacccgccgggatccgggaggatggttttcccgatgatattaccctggcccggctgtgttcagacagttatcagcccggcagccgggacatcggtggtgtcagccgttctgatgcgcagacactggcctcgctttcgctgacggaagagcagttaagcagcccgtccggcctgcagagtatgatttatcattaccgtgataccggtattctggcgtttgcgggcagcaatgatatgtcagatatgataacaaatatccgccaggggcgcgggttaccggcccggcagtatcaggaggcggtatcgctggcggcacatctgttgtcgcaatccgtttgtccgtggttgtttgtcgggcattctctcggcggcgggctggcttcgttctgtgcggtggtactgcagcagcccgctgtgatattcaacgcggcggggctggcggaaaacacgctggcggaagagggggtatctctggtgacggcgcgcgcgcgcggggcagaacttatccgtcattatgtgctggagcatgactggctcacgcatatccaggacgggctggatattccgaaagcactggggcagcggatagcgctggagtattatccgccgcagcatgcgcattccgttttgcagaaactggttctcggcgtgaaggcacataccctgtcgcaggtggttaccgcgatggaacagatggatgaaacccgggagtaa

SEQ ID NO: 275553 - DNA, 384 bp, Morganella morganii
atggttactggtattcaaattactaaatccgaaaacgctgcactggttaactctttctggctgctggatgacagcaaagacgaagtacgctgcatctgtgcaaaagaacaatatgcagacggtgatgttgtttcccgtgccgcattaggtcctttcgagtaccgcgaagtgaatttacaggttcagcctactgtccgtgttgagggtggtcagcacctgaacgtgaacgttctgcgtcgtgaaactctggaagatgctgttaaacatccggaaaaatacccgcagttaactatccgtgtttccggttatgcagtgcgtttcaactcactgactcctgaacagcagcgcgacgttattgcccgtacttttactgccagtctgtaa

SEQ ID NO: 275554 - DNA, 699 bp, Morganella morganii
atgtctgcatcactgacctggcatgatgtcatcggccatgagaaaaaccagccctatttcattgaaacactccgtgttgtcgctcacgaacgagaaattggtaagaccatttacccaccacagaaagacgtctttaacgcattccgttatacggagttgtctgatgtgcgggtcgtgattctgggacaggatccgtaccacgggccgaaccaggcacacggtctctctttttctgtgctgccgggtattcagccgccgccgtcactcgtgaatatgtataaggaactggaagcggatatcccgggatttacccggccgaatcacggctgcctcgtcagctgggcacaacagggcgtgctactgcttaatactgtgctgacggttgaacgcggccaggcacactcacacgccagactgggctgggaaacgtttaccgataatgtgattgcggctgtcaatgcccattgtgacggtgtgattttcctgctctggggcgcacatgcccagcggaaaggccagtacattgatcagcaaaagcacgtgatactgaaagcgccgcacccgtcaccattatccgcacaccgtggtttcctgggctgcggtcacttctcaaagacaaatgcgatactgacagagcgcggtcaggtgcctatcgactggcagccggtgatcccggcagagcttcagcccggcgcataa

SEQ ID NO: 275555 - DNA, 579 bp, Morganella morganii
atgagtagtcacgaacaaaaaacgcacgaagaacctgttgcagatgcagcggagaccctgaacacggcagcagagcagccggaaacggagcaggcggatgccgccgcagcggcacaggcccgtattgcggagctggagcatgagctggaagagtcccgtaaaacggaacgcgaagcgatgctgcgcgccaaagcggagattgaaaacaaccgccgccgtatggaacaggacgttgaaaaagcccataagtttgcattagaacgtttttctaatgaattattacctgtgattgataacctggagcgcgcactgagtgcggtgaatccggaagatgaagcacagaaaagtatgctggaagggctggagctgacactgaaatccttcctggatgccgtgaaaaaattcggtatcgaagtggtcgaagagacaaaagtgccgttcaatccggatgtgcatcaggccatcagtatggtggatgctgcagatcacgagtcaaaccatgtggtgacagtgatgcagaagggctacaccttaaacggccgcctgctgcgtccggcgatggtgatggtctccaaataa

SEQ ID NO: 275556 - DNA, 900 bp, Morganella morganii
atgctgacggacaataccgcaaaaaacaaatcgttccgctgtatcggaattgtcggccatccgcgccatcctgaagcgctggcaacacacgaactgctgtatcactggctgctgaaaaaaggtctgcgtgtgattgtcgaaagtgatgttgccgctgaaatgcggctgaccgatgctgtcaccggcacgctgccggatatcgggcagcaggccgacctggtgattgtgatcggcggagacggcaatatgctcggtgccgcccgtgtgctctcccgctatggcgcggatgtgatcggcgtgaaccggggaaacctcggctttctgactgatcttgcgccggacaatgcactccagcagctcgaccgcgtgctgaccggggaataccacgtcgaaaaacggtttctgctcgatgccggggtactcagccccaacggcaaactgcgccgcagcaccgcactcaacgaagtggtactccaccccggtaaagttgcccacatgattgattttgaggtctatattgacgagcgctttgccttttcccagcgctctgacggcctgatcatcaccaccccgaccggctccaccgcctattcgctttccgcaggcgggccgatcctgacacccaatcttgatgctatcgccctggtgccgatgttcccgcacaccctctcctcgcggccgctggtgatcagcagccacagcactattaccctgaaattcccgcagaccaacattgactatgaagtcagttgtgacagccagatagcgctgccgatacaggaaggagatgtggtcaggatcaaacgcagcagcaaaacactcgatctcatacacccgattgactataactatttcaatacgttaagcacaaaactcggctggtctaaaaaaatgttctga

SEQ ID NO: 275557 - DNA, 1662 bp, Morganella morganii
atgttaacccagctcaccatcagtcagtttgccattgtccgcgagttagaaatcgacttccgcgccggtatgtccgccatcacaggtgaaaccggtgccggtaaatccattgccattgatgcactgggattgtgcctcggcaaccgcgcggatgccaatatggtgcgtcccggcgctaaccgcgctgatatctgcgcccgcttctccctgaaagataccccggccgcccgtctctggctggaggaacatcagctggatgataatcaggaatgcctgctgcgccgcactatcaacagtgacggccgttcccgtggttttatcaacggcacagccgtaccgctgtcacaactgcgtgagctgggcacactgctgatccaaatccacggacagcatgcccaccagcatctgctggaaagcagccaccagaaaatcctgctggacacctatgccaaccagggcttactgctcggtgaaatgaaaaaagcgtggcaacaatggcacaacgcctgtcaggcgctggctctctatcagcagcaggcactggagcgggaagcccgccggcaactggttgattatcacctgaaagaactcggtgaatttgaaccccgtgaaggggaatttccggacattgatgcggaatataaacgtctggcaaatgccggtcagtttctgagcctgagccagggcaccttaaacattctcagtgaaaatgatgaaaacaacatcatcagtatgctcaatcatgcccgtcatgaactcagcgagctgatctcactggatgaaagcctgtccccgttactgaccatgctggaagaagccgccattcaggtggatgaagtcagcaatgaactgcgtcactacagtaaccgcgtggacctggatccgaaccggctgtatgaactcgaacagcgaatctcccgttacatcagcctgagccgtaaacaccacaccacgccggaagagctatatgtcctgtatgcacagttgcaggaagagcagcagatgcagcaggaaagtgaacagcacagcgaagaactgagccgcgaagcggaacagtattatcagcaggcgctgacgattgcacagcagttacatatggtcagagagcactacgcagctgaactgagtgaacttatcacacagagcatgcaccatttatccatgccgcatggccgctttaccgctgacgtgatttttacccccgaacaactaagtatggacggcgcgagcagagttgaatttaatgtcaccaccaacccgggacagcctcatcaggcactggcgaaagtggcatccggcggggaattatcccgtattgcgctggcaattcaggtgattaccgcgaagaaaatggacaccccggcactgattttcgacgaagtggatgtgggtatcagcggcccgacagccgctatcgtcgggaagttgctgcgcgaactgggcgaatccacacaggtcatgtgtgtgactcacttaccacaggttgcgggttgcggacatcagcactactttgtcagcaagcacaccaacggcacggaaaccgaaaccgccatgcaactgctggataaaaaagcgcgggtacaggaactggcccggttacttgccggtgctgccgtcaccaaaaatacccttgccagcgcaaaagaattgctggcagcatga

SEQ ID NO: 275558 - DNA, 387 bp, Morganella morganii
atgcgttgtaaattgctgattgccgcaacgacatctttgttgctgttaactgccggttgttccactctggagcgtgtcgtttaccgcccggatatcaaccagggtaactacctgacaccggcagacgtggcgaagatccagaaaggaatgacccaacagcaagtcgcctatacactcggtaccccgatgttacgtgacccgttcggaacacagacctggtattacgtcttccgccgtgaaccgggccatgagccggtgaaacaggaaacactgacactggtctttgactcagccggtacactgagccaaatcacgaacaccaattacaagcctgacggcggtgacgaaacagcaagtgaaatcgccagtgagactgtcactgactga

SEQ ID NO: 275559 - DNA, 1272 bp, Morganella morganii
atgtctaatcgcttaaagctacaggacggaaaaacgctgactcttgcgtctttgggtggtgcgctggaattttacgactttatcgtattcctcaccttcgcaccctttttgcagacactcttcttcccgagtgactcaccgctgctttcgagcatcatgacctatctgacctacgcggtcgcttattttgtccgccccctcagcggcgtgatcatggcacatttcggcgacctgattggccgcaaaaaaatgtttatgctctccctgttcctgatggcgatcccgaccctgctgatcggtctgctgccgacctatgagcagattggctatgccgcaccggtcttgctgctgattatgcgtctgttacagggcatcgcattaggcggagaagtgccgagcgcacacgtctttgtcaccgagcatgtcccgcagaaccgtatcggtctggcgaacagtatgattgccagcggcctgacattcggcgtggttatcggccactttgcggcttacctgatttacaccaatttcagcaatgaccagatcttaagtttcgcatggcgttatccgtttatctgcggcggggttttaggcctgattgccgtgtatttacgccgctatctgcgtgaaacgccggtattcctggaaatgaaaaagcgcaaagaactgattgatatgccaatcaaagaggtactgaagagctacaaaccggccacgatgatctctattcttgccacctggctgctgaccaccggtgtggttctggtcgtcctggcaccaaacctgatgaaatccgatatctttaaaatcgacccggaatttgtcagtaaaatcgctatcctcgccaccgtcatgaacatggtcggcagcattattgcggggattgtgtccgacaaactcggcatccgcaaaaccgttgtgatatacagcatcctgctcgctgccaccagctatgccttctttaattccctgggcagcggtgaccacaccacgatcggcttcttatattccctggctgccctgttcctgggtctggttgcctgtgtgccgattattattatcaaactgttcccggccaatatccgcttaagcggcatcgggttctcttataacatcggtaacgccctgttcgccggactgaccaccttcaccgtaccggtcattgccgaacacgttaacccgatgtttatcgcctactatattctgttcctctgtgctctcggcctgtttatcagcttctgcctcggcaaaaaatccatgaagttttatgtctga

SEQ ID NO: 275560 - DNA, 1290 bp, Morganella morganii
atgtttacactctttcggctggctccttcccccggaatacgcagttcacaaattaccgcccttatccctgaattatgccgctctctgaatgtaactgaaatccggatgattgattttatccccggaacaccgtacatcggattgcttgtaaaaaatgaattccggagaatagtctccttcagccactgttttaataaatggacagaagataaatcgctgccgcaactttcggtaatggcgggagaaaatataaccggcgaacctgtcagtctggatttaacacaattaccacacctgctgatcgccggaacaaccggctccggtaaatccatgctgatgcattccctgatactgagcctgctgtaccggacatctcctgcgaatgtccggctggtgctgtgtgatgctcaccaccctgaactcagcctttaccgtgatacgccgcatttactttttcctgttctgtctgacagcactgaaataaccgaaactctgcgttttctgactacggaagcagaaatacgacgcaaactcttcccggcaatgaatgcccctgacctccggcgttataatgaaaaaattgccctggcagaatcattcggaagacctattccggaccctttttcgcggccggaaaacagtatggagaaacatccccgtctgagtcataaaccggctattgttgtctgtatcgaaaatgccgttcagctgattaatgatcacaacaatattgaagacttaattttacctctgctgcaacagggaggaatgaccggtattcatttattgctcacaacacgcagcccgctgccgacaaaaataaaccagcaacttaaatttcatatccctgcccgtattgcaatgacagtgacttccaaagcggactctcattttattatcgggcaacatggcgctgaaatattatccggaaatggtgatatgttgcttatcacagctgattccgcgaaacctcagcgtattcagggagcatatatcagcgacagtgatatacataatgccgttgattactgcaaaaaatggggagatgttaattatcttaccaccggaagaactgttgtaccggacgcctgtgatttggatcccctatttgacagggctgtccagtttgtcacagaaaaacagcaggtttcaatatctggcattcagcgggaattccgcattggttacaatcgtgcagccagaatcgttgaggacatggaagagatgggaatcatcagcgaaccattttcagacggaaggcgggaagttttagttccgggtcttttttga

SEQ ID NO: 275561 - DNA, 1596 bp, Morganella morganii
atgcaaaagatattacgtattgatgaaactgataatttaattgtggcactgaaggatttgcatgccggtgaagtgtatcagtggggtgatgaatcaatcactctggtcacggatgtgaaagccaaacacaagtttgccctggaagcagtgccggaaggcggtattgtctccatgtacggcaccgctgtcgggaaagcaacaaaaccaattgcccgcggggaagtaattaccgtggacaatattcgccattatgccgccccggtatcactggaggagagcggagactatgagtggcagatcccggatgtgtcggtctggaaagaccggacatttaaggggtatatccgtgatgatggccgggtaggtacggcaaattactggctgattttcccgctggtgttttgtgagaaccgcaatgtcaccaagctgacggatgcgctgaatgaggcgctgggctacaccaataacagcctgaaaagtttcgccttcgatctgaccgccggtgaacaggcgcagaccgcaaagcccaagctgttcccgcatattgagggggtacgctgtattacggtgaccagcggctgcggcggtgccacctctgacagtaaaaccatgtgtgatgtactggctgcgtatgcggatcatccgaatgtgatcggtattactgtgttcagcctgggatgtgaaaaagcgcagcgcaagatgttcaaagagtcgctggcggcgcgtaatccggcatttgataaaccggcgctctatttccggcagcaggaatggaacagcgaagaagagatgatgcagacggcgctgaaacaaacctatgagtgcatgaaagcagtgaagcctcagagccgtacggatgtgccgctgtcatatcttaagctcggcgtgaagtgcggggcatctgacgggttctcgggcatttccggtaatccggcgatggggctggtgtctgactggctggtgacactcggcggcgcttccggtctggctgaattcccggaactgtgtggtgcggaaggggatatggtaaaacgctgcatccgctttgaggataaaaagaaattcctcgatctgatgggacagtatgagaaaaccgcgaacttctttaataccactatcgcggataacccgagccccggaaatattgctgatggattaattaccgatgcgattaaatcaaccggtgcggcgaaaaaaggcggaaaatcgccgatcagtgcggtgtgtgactatgcggaaccgatgccggacagcggactgtctctggtctgcacaccgggaaatgatgtggatgcggtgaccggattggtggctgcgggctgtaacgttgttattttttccaccgggctgggaacaccgacaggaaaccctatcgtgccggtcgtcaagatttccaccaacagcgctatcgctcagcgtttgtcagatatgattgactacgactgcggtccggtgatagaaggtgtgccattgccggaaatcagtaaagggctgtttgagcgcgtgattgaaacggcaggcggggaatataaggtgaaagcagaccgtctggagcagttcgattttctgctgtggaaacggtcactggatttataa

SEQ ID NO: 275562 - DNA, 1287 bp, Morganella morganii
atggcgactatcacagcttatgacaatcctgctttaaattccgcgattcagaaatcgtggaggcgtttagtacccctgatgtttattttgtattttgtggcatttattgaccgtgtgaatgtgggctttgcgaaagatgccatgcaactggatatcggattatccgattccgcctttgcgctgggggcggggattttcttcgccgcctatgcgctgttcgggatcccggcaaacctgatcctcaataaaatcggtgcacaaaagtggctgagtattacaacggttatctggggtgtgttatctgcgatgaccgggtttgtgaccaacgagacgcaatttattgtgctgcgtttcctgctgggactgggtgaggcgggtttttatccgggaattttattactggcttccatctatttcccgaataaagtccggggctcggtgattggtatttttgtcctgggcgtgccgctggcgctgacactcggttcgccgttatccggcgcactgctggaattacacggctggatggggcgtccgggctggttctggatgtttgtgattgaaggtttaccggcggttgttatcgggatcttcgcctttttctggctggatgacagcccggagaaagcccgcttcctgacagcggaagagaagaaagccctgacagagcaactggccagtgagaatgcgaaaacagaaacgacgtctgtgctgtccgcactgaaaaatatcaaggtctggcacctggcgcttatctacggcaccatccagatctcggtctacgggctgatgtttttcctgccgtcgcaggtggcttccctgatgggacagagtctcgggtttaaagcgtctctggtggcggctattccgtgggcatgttcggcgttcggtgtgtattacatcccgcgtctggctgataaaaatccgtcccgccgtgtggctatttccgtgatgtgtatgctggcagcggcagttggtctggcattatccgcctttgccagtccggtctttgccatcgccgcgctgtgtctcagcgccgtcggttttctgtctgtacaaccggtgttctggacattcccgccgcagttactgagcggtcctgcgctggctgccggcatcgggttctgtaccaccatgggggcattctgttctttcctcgcaccgatcatccgtgtggaaatggataaactgatgaacagcaatacggcagggattatcacactcgcggtgatcactgtcggctgtgcactcctgattgctttactgaaaaagaacacacaaaaataa

SEQ ID NO: 275563 - DNA, 909 bp, Morganella morganii
atgaacaatgtgggtatggaaagccgttacatcacgccggctgtaacaatttttgatgacaaaggccggattgataccgaacaaaaccagcaggtgtatgactctctgaaggggcatgtctccggatttgtggttatgggcagtaccggcgagtttttttcactggatatggaaagctcaaaaacactgatcaggttatgcggcagttatgacaaagggggaatgaaagtgtatgccgggaccagccgcccggatgtgaatgagtccgccgcgctggcgaactatgctcatgagcagggtgtggacggggtcatgattatcagcccgtactatttcccgctggatgatgagggcgtttaccggttttacagcgcggtcgcggaaaaaacgtcagccaatatttttatctataacttcccggaacgtaccggttactcggtgtcaccggaggtgtgtctgcgtctggcggatcgctatccgaatattatcgggctgaaagatacgatccccgatacattacatacgtcgcagattattcagacggtaaaaaaagagatcccgcattttgaggtttatgccggttatgacaataacttcgcccatgttgtgctggcggggggaaatggctgtatcggcgggttatccaatattgtgcctgagtttttctcatcctggatggaggcatttgcacagggtgatatggctgccgtagctgcacatcagcgcaaagtggatcagctgatggccgtttacggcgtgcactcaccgtttatcccgacctttaaaaaagcattacagatgcggggcattattcagtcagactactgcacagcgccattcagcagcctgaatgcggagcagactgaacagctgatgcagatactggcggatgctgaaacagcacgctga

SEQ ID NO: 275564 - DNA, 774 bp, Morganella morganii
atgtcaacggagcatatgccgacaatacgggtgttagaggtactcagcgttctggcggcagaaaacaccgggatttccctcacacagctggctgggaagaccggtatattaaaaggcacgctctacccgattctgaaaacgctggcagaacgccgttatattaattatgacgaaaacacccagctttattttctgggtatcgcctgctccattctttcccgttcattctttgaaaaatcgtactggctgaaaatggtgcaccgtgagatgaataatattgtcaacgagtgcaatgaagtgtgccagatggggatattagatggcccggatgtgctatatatcgataaagtgcagtctgcacaaaaagttcagttagtttccaatatcggtacccgcttaccggcggtttattccgcattaggcaaagcgatgatatgccattacagcgatgctgatattctccgcttatatcctgacggctttaccccgctgacaaaatacagtatcaccaccattgcggaattacgtcagcaactggaagaggtcaaaataaatcattacgccactgacaaccgcgaaataaacgaagaaacccgctgctatgccgtttcattacgtcagcgcaataaaattatcgccgctatcagtgtctccgtcccgacattccgcagtaataatgaaaaaaacaaccagattatcagcgtattactcagcagccgcgaacgtatcgagcaggaattgaatacattgcaggatgtggagttttatcagtag

SEQ ID NO: 275565 - DNA, 588 bp, Morganella morganii
atgacaccaaataaccgaaaattacctgtttttaaatatcatcccgatccgctcggaaccggtgctttttcagcagataagaccgttaagtgtgattgctgtcagcaacctactgatatttattatgaaagcccgttttattctgtcgctgatattgatgcattatgcccgtggtgtattgcggatggttccgccagccggaaatttgagggtgaattccaggatagcgccagcgtggaaggaattgactgtgaatatgatgacgatggtgaattttcacacaccactaacccgtatccggatgaaatgctggatgaactggttaaacgcacgcccggttaccggggatggcagcaggaagtgtggctggcacactgcaatgagccctgtgaatttatcgggtatgtttgctgggatgatataaaagaccggctggatgaatttgtttctctggaagatgatattcaggaatatggtttttctgttgaagagttatccggcctgttacataaggacagcgatgcacagggatatttattccgctgtctgcattgtaaaaaattacgcctgtattttgattttagttaa

SEQ ID NO: 275566 - DNA, 984 bp, Morganella morganii
atgaatacacatttcatttacataccatcaagtgcgatgaaaaatttcgataaaataataaagaccagaaacatctggggagttactggaaataattcatttagcataggtgataatgttatttttcttataaaacttaaagatatcagcactaaagatagcggattaaaaactggtttcccaagagttacaattgataatttccatggtcacctcgatagaatatactcatgtaaaataacaggggacagacaagattacgaaaaatccgaaacaccgtgggataaagaaaaatataaaaatggttttatatttaaggttataaatgaaagtgagaatatttttacagataactttaccttagatgtcagagagtatataaaagaaaccggttcaaccggaaaaacagtcagcataaatagctttttattgaaagaaactattcctttatcaaaaaaatatgagtatcacactgacaatactgaattttcagaaccaccttcaaagagtacatcttcacgaacaaaaagcggtaaaaactgcatctcaaaaaactacattgatgaagccattaaaaataacgaaattggttttcatggggaaagatttgtatttgagttcgaaaaaaaatatctaataaaaaataacagggaatacctatctaaaaaagttacacatgtctctcatgataaaggagatggagatggctatgatatcttatcatataacttagatggctcagaaaagtatattgaagtaaaaacaaccactggtaataaaaggactccattttacttttcttctaatgaacttattttttctaaaaaaaatcacaaacaatactatctatatagagttttcaacttaaaaatcaataaaaatcaaataaatgcaagcctttattatttaaaaggaaaacctttagatgaattatttgaagtagaaccagttcagtattcagctttacctaaatctcatgagtga

SEQ ID NO: 275567 - DNA, 483 bp, Morganella morganii
atgacaaagaaaaaagttcacaaaccaggctctgccaccatcgcgctgaacaaacgcgcccgccacgactactttatcgaagaagagatagaggcaggtctggcgctgcagggctgggaagtcaaatcattacgcgcaggtaaagccaacctgggggacagttacgtcatcctccgtgacggcgaagctttcctgtttggtgccaacttcacaccgctcagcgtggcatcatcccacgttgtctgcgacccgacccggacacgcaaactgctgctcaaccagcgtgaactggacagcctgtacggcaaaatcaaccgtgacgggcacaccgtggtcgcactgtcgctgtactggaaaaacgcctggtgcaaagtcaaaatcggcattgccaaaggtaagaaagaacacgacaaacgcgatgacatccgtgaacgtgagtggaaattagacaaagcaagaattatgaagcacgcagggcgttaa

SEQ ID NO: 275568 - DNA, 435 bp, Morganella morganii
atgccgcaaattagccgctccgcactggttccgttcagtgtggaacagatgtacaacctggtgaatgatgtccgtgcgtatccggaatttttaccgggctgcgtgggaagccgtattatcagccacgggcaggatgagatgaccgcgtctgtggatgtatccaaagccggtatcagtaaaacctttgtaacccgcaatcagctgaccagcaatcagcatatccgtatgcagctggtggaaggcccgttccgtaaactgatgggcggctggtcgtttattccgctgagtcctgaggcgtgcaaagttgagctgaatctggattttgaatttaccaataaactggttgagctggccttcggccgtatatttaaagagctggccggtaatatggtgatggcatttaccaaacgggcaaaagaggtttaccgtgtctga

SEQ ID NO: 275569 - DNA, 300 bp, Morganella morganii
gtgtctgatatttctgttgaagtctgttatgccctgcctgataaacagtttctgatcccggtgaaaataaacgaaggcgccacggtggaagccgttattcttgcctccggtattttagcattacgggatgatgtggatttaacgcagaataaagtcggtattttcagccgtccggcaaaactgacggatattgtcagtgatggtgaccgcgtggaaatataccgtccgctgattgctgacccgaaagaaatgcgccgcaaacgggcagcagaagccagccgtaagaaaaaagaagactga

SEQ ID NO: 275570 - DNA, 588 bp, Morganella morganii
atggacgtccggtttcttaaatccgtattctgcaaatcaggtatcagccggatgacacattcagtacagacactggtttttttgcgccacggcgaaaaaccggataacgacagtggccagttaaccggcaaaggattaaaccgcgcactggcgctggcggatctcctgattgcccgttacggaaaggcggatgccctgtatgccgccgcaccgaaacagagcaagctcggcaattcgctgcgttcccttcagaccatcaccccggtggctgtccgcctgtcactgccggtacatctggaatttcacgccaaagaaaccaaagccctgcgcgatgcgttactggataaaactcatcacgggcatacggtctttgtggtctgggaacacgataatctgataaaagtagtgagggatattctgaaacagaccggcggggactattcggatatgccggcctggccgcgtgatgattttgacagcctgtggatactgaccattacccgcagtcagacagagaccaccgttacgttttcacaggaaaaacaggggctggataatctggacagttatttcccgcaggtccggtaa

SEQ ID NO: 275571 - DNA, 504 bp, Morganella morganii
atgcgccagattaccatccgcttagccgacccttccgatgcagcggcgctgtgcgatatgcaccaggattttacgtcttatgccaatacattacagatgccgtacacctcgcggaagttctgggaacaccggatgagtcagggtgatcagtcagccacccggctggtcgctgttattgacggcgtggtggtcgggctgctgggtatcaatcagaacagtaatccccgccgccgccatgtggtgaattttggtattacggtaaataaaagctaccgcggccagggtgtcggcagtgcattaatgcaggcaatgattgattattgtgataactggctgggcatccgccgtattgaattagaagtatttgccaataatccggacggcctggcgctgtatgaaaaattcggttttcagcgcgaagggattgcccgcgattatgcattccgcgacgggcgctatgtcgatgctattctgatgagccggataaacgatcaaatcaaataa

SEQ ID NO: 275572 - DNA, 510 bp, Morganella morganii
atggaatataaatgggtctgtattcagtgcggggaaaaagagattccgcaatacgcggaatattgtgatgagtgcgcggaaaaacggatgtcacggatcggcggctggctgtggctgccgttaattaccctttttctgtcactgggtgccggtggttacacactgagtgagtggtatgatttatatcagcaaaatgcggggtatattcctgaccgcgtactgcaggtcatgtatattaatattgcttttaccatactgactatgctgctgatactgacaacgctgtattatttcttcaggctctcccgttatctgccgaagctgtttattgcctttattctttttgccatcgcctcggaagccattcaggaaatcgtgctggttaatctgctggatgttaatgttgacttcactctttattatccgctgataagattggttatttacgctatcatctgggtttcgtatttcctggtgtctgaacgggtaaaaagaacatttgttcattaa

SEQ ID NO: 275573 - DNA, 441 bp, Morganella morganii
atgaataagtttatttttccggcaatcgtttgtgccgccacactggtcacactacctgcgaatgcaggtaaactgccggataatccttatttatcgactgcggtactcagtagtgcgggcagtgtctacagctctgtgatgataagcggtgcgattttatcgccgatcattttaccggctcagctgagtgcggagtctgtggaaaacaataagaaagaaaaagtcaccaccatcaccggcaaaaccgataaaaatgaagatgtcaccctgctggttgccactgaaaaactggagaaaaccccggtgaatccgggtgataaactgacactggaaccggctgaaaaaggctccggtgcgtatctgaaaaaggacggaaaaatcatttcccatatggtaactcaggatgatcgtgaattaacccatcaggagaagatgccataa

SEQ ID NO: 275574 - DNA, 813 bp, Morganella morganii
atgcgactgctgaaatccgtttttgcggctgccctgctcactgcgtccggccttgcatacagcggcagtcagaactgtgcggataaatccccgcccacgccgcaggaagccgcacagcgcaccgcacaggccaaagtgctgaatgactggctggaaaaacagggtgaccgcgtcgttctgctggtccgtcagggtcagacactgagtgactacgggctgagcttttcccatgccggttatgccgtacgggaaagaaacggcacctggcgggtgtatcataacctcaatacctgcggtactgcgcaatctgagctgtggatccaggggctttatcagtttattgatgatgacctggccgggaataccatcgccaccctgcacttcccgccggccttacagtcccagttgctgaaagtgctgcgtgacccggaactgcgcaaagccctgcacaatccggcgtataatatggtggcgcatccgtttgcgaccgacagccagaattccaacggctgggtgctgatggtattcgcggcagcccgctctccgggcgtgaattcggtttctgccggggtaaactggctgaaatcagaattctatatcggctcctccgccgaggccggattaatcaaacgggcactggcggacagcctgatgccgcatatgtccactgacgggcagccggtgaccggtattgtcacctttaactccggcgacagcctgctcggttttctcagccgctacggcaaattccgggttgagtgcagtcacggcagcttcggcagcgccgtctgtatggtgccgctgccggaataa

SEQ ID NO: 275575 - DNA, 1407 bp, Morganella morganii
atgagcaaacacgaaacgtcatccgcgcctccggcgcatgaccacgattttatgtttacgcccataccgatgacacaccgccgcgagacctggaaacaggtgctggtctggataggtttcggttatgtggcaaccgggttatttatcggcggcgccctggccggggccaacggcggaccgggaatgtcatttccgatggcgctgctggctatcgccatcgggatgggattgttgtttattctcacctcgctgctcggcattatggcgcagcgcaccgggctgagcctggcgctgatcagccgtttttcctatggccgtttcggcgcgaacctgccgatgattgcgatggggctgctgaccctcggctggtttgctgcgataaccgggatggtcggggatatctggggcacgttcctgggtaatcccagcgggattatcgtctttaacccggcggagcacggctacaacggtgtgccgatcaccctggaagtttttctttcctgtgtcatcgccggcctgctgtttacgtacacctcactgcacggcatgaaaggactggaaattatcgccattccggtatcgccggttattatgattatcgctgtgatcaccggttatgcgatgttacaggagggcggcgggttatccgtctttattgagaattccaaccgcaatgaagggctgatgctctcaaccgcgatcacgatggtggtcggcagctggattgccggggcggtgatgggcgtggatctgttccgctttaataagagtatttctgcagtattctgggggtcggcggcctgttttatcttcaccaacccgctgctcaatgtggtcggttatatcggcaccatgacggtcgggatgccgaactacattacctggatgattgagaaaagcttcctgctggcgctgatcggggtgatcacctggacactgtcactgtggaccaccaacgacgcggaactctactgtaactcgctctataccggaccggtgctggattccgttggtgtgaaagtgaataaaaacgtcctgatcctgaccacagggattatcggtactgtgctgggcgctatcggtttttaccagatcttctttgctgattttataaactatctcggcattatggcaccgccgctggccgggccgctgctggcggattactacatcacccgcaaatgccgctacgacatcacacagattaacagtcagccgaaatacaattacgccggggtgatcagtgcgctggccgggatggcttccggtctggtgatggcactgaacaatattctgtctgactggccgaccggcctgctggcattagttattaccgttattatttatctgatattgcatccgctgctggcggcaaaagccacctcaccggccacagggagatcataa

SEQ ID NO: 275576 - DNA, 780 bp, Morganella morganii
atgaaaaaagtctatctgaatgagttcaccactgaagagctgaaaaaccggttcgataagggcgaaatcgacagcgccattaccattttcggcagctgtgagagccacggcccgcatctgccgctcggtccggatctgtttgtgccggaagccgttgcccgccgggcggcgcagcgtttatcccgcacgattgtggtgccgggtgtgccattcggcacttccgtacactataacggcacaccgatggcgattaacatccgctttgaaacggtgattgcgattgcggaagacatgtttgagagcctgattcagtacggcatcaaacacatttttgtcttcaatggtcacgacggaaatattccgtcgctggatatcgcacagcggaatgtcaaagcgcgtcataaagatgtggtttttgcgttcctgccggcctggtggtccgtactcggcggccgtctcggggagaatttcttccgtgaatggaacggtctggggcatggcggtgagggagaatcctccattaccgctgcggtgtgtcctgatctgtgcgacctgagcaaagcggtgcgtcagatgccggaagacagcatccgccacggcgataatgtacagattatgtgggatatcaccgaggtttcagtaacaggtgccaccggcgacccgacttacgccagcattgagaaaggcgaaaaaatgctggatgccctgacagacctggtggtggagagtattgaggcgctggaaaaaaccaactggaattatgatttacgcactaagtaa

SEQ ID NO: 275577 - DNA, 741 bp, Morganella morganii
gtgatatatccggttgatttacatgcccatacggttgccagtacccatgcttacagtaccgtccgtgaatattttaccgaagcggcggagaaaggaataaccctgtttgcgatcaccgatcacgggccggaaatggcggacgggccgcatccgtggcattttgccaatatgccggttctgccgcgcatgattaacggtgcggggctgctgtacggtattgaggccaatattaaaaatcaggccggagatacggactgcaccgataaaatggcgcagcagctggatattatcctcgccggttttcacgaaccggtgttgcagccgcaggggcaggccgccaataccgaagccatgatcgccactatccgcagcggaaaagtgcagattatcacccatcccggaaacccgaaatatccgctggatattcaggcggtggcgcaggcggcaaaagagtgcaatgtggcgctggagatgaataactcctcatttctgcattcgcgggcgggcagtgagaaaaactgccgtgcgattgctgaggcggtgcgtgaccacggcggctggatctctctgggttcggattctcactatgccggttatctggggaattttgagcgggtggtgaccatgctgcgggagattgagtttcctgaagcgcgtatcctgaatgtcaccccgcgccgggtactggattttctggaatcacacggacgaccgccaatcccggaatttgccggactctga

SEQ ID NO: 275578 - DNA, 492 bp, Morganella morganii
atgattgcaatcagtgcctgtctggcaggtgaagccgtccgttacgacggcagccataaattatatgccccgctgaaagcgctgcagaacagcggcatggcggttccggtatgccctgaaatcctcggtggtctgccggtgccccgcgccccggcggaaattaccggcggtgagggttgtgatgtctgggcgggtaccgcccgggttaccggcagtgacggcgaagatgtcaccgatgcctttaaacagggcgcactgcgggcgctggagcatctgcaacaacgcaatatcacgcatgtgatccttaaagctaacagtccgtcctgcggcagcggcctgatctacagcggcgcatttgacggcacgcttaaatccggcaacggtgtggcaacggcgctgtttgaggcaaacgggatcaccgtctggcatgaagaccatccggaactacccgcgctgataaaacagctgttacaaaacggaaaaagtgcatga

SEQ ID NO: 275579 - DNA, 663 bp, Morganella morganii
atgcacgcacccaccccgtcagaaaaaccggtgttatccgtttttgattttgacggcacgctgacccgccgtgacagttttgttccttttctgcgttttgctttcgggaaacgtgttttttctctgcggatgctgcgcctggttctgccgacactgcgctgcttctcacgcaaactgacccgcgacgaactgaaagaagtgctgatcaccacctttctgaccggtactgatgcccgctgggtggagaaaaaagcacaggaattctgtgaacgttactggcataagatgatgcgtccggaaggtctgcgcgcagtggcggcggaaattgcatcgggtgcggaagtcacactctgttcggcatccccggagctggtgctgcggccgtttacagagcggctggggatcaaacttatcgggactcagctggaagagaaagacggcattctgaccggaaaaatcaacggcaacaactgccgctgcggccagaaaattgcccggctgcaacaggtttacggcgatttatccgcataccatatgcgtgcctggggggattcacggggggattatgaactgctgtacgccgcaggcgaacctcactggcgccattttcaccgcaatccggcgaaatatgaaaaacgccgcaaacagttttcatcccgctga

SEQ ID NO: 275580 - DNA, 312 bp, Morganella morganii
atgatgacaaataaccggagctccggggaaatatccccggcaacggaacaggatctcacggcgttaattgcccttgataccgttgcggcacaggagccgcaacggtgtgaggcgatccggagctggattgagcagaaagtctgttttgtgctgcggcgtgaaggcaaaattgccggttacggcgtgctgcattatcacttcaaaaagcagtttatggaattaccagctgatgcacaggatgcagcctgtaaacagggtattgatgcgttagcccgggctaaagccatgatggaacagcaaatgccgaaataa

SEQ ID NO: 275581 - DNA, 3591 bp, Morganella morganii
atgaagggtcttattgtgagtaacgaaatacatagcatgatcaccactgatgccaatcaggcggtggcccggatggcgtatcagctgaatgaagtgatcgccatctatcctattaccccgagttccaccatggccgaatatgctgaccactggtccgcgaccggggaacccaatttgtggggcgatgtcccgcgcatgatggaaatgcagtccgagggcggagccattgccaccgttcacggcgcacttcagaccggcgcattgtcgaccactttcacgtcctcccagggattgctgctgatgattccgtcgctgtataaaattgccggacagctgatcccgtttgttctgcatgtggcggcgcggacggttgcgactcatgccctttctattttcggcgatcactcggatgtgatggcggtgcgtcagaccggctgtgctctgctgtgcgctaacagcgtccagcaggctcaggactttgcggtgatttcacagatagccacactgaacagccgcgtgccgtttattcatttctttgatggtttccgtacctctcatgagatgaacaaaattattgctgtcagccgtgcggagctgagcaaactgatcccggcagaggcgatccgcgcccaccgtgacagagcactatcgccggaacatccggtaatacgcggcacatctgctaatccggatacctatttccaggcccgtgaagcgactaacccgtggtatgacgcggtttatcagcatgtcactgatgcaatggctgcatttggtgaggtgacaggccgttattatcagccgtttacgtattacggacatccgcaggcagagcgcctgattatcctgatgggatctgccgccggtccggcagaggaagtggcggataaactgattgcgcagggcgaaaaagtcggcgtgctggaagtgcatctctaccggccgttctccgcacagcatttcctcgatgccattccggaaagtgtgcaacacattgccgtgcttgaccgcaccaaagaagcgggtgcgcaggcggagccgctctatctggatgtgatgaccgcctttgccgaagcgtatcagaacggcgagcgggcgcagttaccgcgtattatcggcggacgctacggcctgtcatccaaagagtttgatccggattgtgtgatggcgattttccgcgaactgacgttaacctcgccgaaacgccgctttacagccggcattattgatgatgtcaccgggctgtccctgacaccggttccggcggagctgccggtcactcaccgcctcagtgcgctgttttacgggctgggcagtgacggcacggtttcggcggccaaaaatgccattcagatcctcggcagtcataccgataactacgcccagggcttttttgtctatgactcgaaaaaggcgggcggccttaccgtttctcatctgcgcatcagtgaacagccgatccgcgctacttatctgatccggcaggcagattttattgcctgtcatcagtggcagttcctcgacaaatatgaaatggcggaaaaactggcaccgggcgggattttcctgctcaacagcccgtatccggcggatgaggtctggcaccatatcccgctggatgttcaggcgatcctggcggagaaacaggcgcaactgtatgttatcaatgcctaccgcattgcacgtgaatgccgcctcggtgcgcggattaataccgttatgcagatggcgtttttccatctgacggcgttgttaccggcggcggaaattcagtcttatttacagcaggcgattatccgcagctacagcaaaaaaggggaaagtgtcgttcatgataacctgatggcgatagcccgcaccccggaagccctgcaccgcgtgccgttacaggcagtggatccgcacagtcagccgcgtccgccggtcgtgccggataacgcgccggactttgtcaaaaccgtcaccgccatgatgctggccggacgcggtgatgctctgccggtatcggcattcccgccggacggcacctggccttccggcaccacccgctgggaaaaacgcaatatcgcggagatgatccccatctggaaaccgtctctctgtacccagtgcaactattgtgtcgcggcctgtccgcatgcggctatccgcgccaaagtggccgatcccgcggatttcagcggtgcaccggatacactgcagcgtctgccggttaaatcccgcgatatgaaagggatggattatgtccttcaggtcgccccggaggattgcaccggctgtaatctctgttatgaggtctgcccggcaaaagatcgggaggatccgtccgtccgcgccattaatatgcagccgcggctggcgcatctggcagaggaaaaagccaactttgatttcttcctgcaactgccggacactcccgcatcccggcttgagcgcattgatatccggacatcacaacttatcacgccgctgtttgaattctccggcgcctgtgcgggctgcggtgaaacgccgtatatcaaactgctgacccagttgtacggcgaacaactgctgatcgccaatgccaccggttgctcttctatttacggcggtaacctgccgaccacgccgtacaccaccaataaagagggacgcggtccggcctgggccaactcgctgtttgaggataatgccgagttcgggctggggttccgcctgacggctgaccagcacaaaaaacgggtgaaacgtctgctgatgacctttgcggcgcaactgccggatgaattacggcagcggctgacggatgaagcactgtctgcggatgaaaaacgtgcggctatcacggaactgcggacattactggcggataacccggatctgcgtgcccgtgagctgtcagaggatgcgcattaccttctgccgaaatccgtctggctgatcggcggtgacggctgggcttatgatatcggcttcggcggactcgaccatgtgctgagcagtggtgagaatgtcaatgtgctggtgctcgatacccagtgttactccaacaccggcggccagcagtcaaaagccacaccgatgggggcagtcactaaattcggcgaggagggtaaaggcaaatcccgcaaggatctgggcgtgtccatgatgatgtacggcaatgtgtatgtggcacagatagccatcggcgcgcagatgaatcagacggtgaaagcgattcaggaagcggaatcctatcccggcccgtccctgattattgcctacagcccgtgtgaggagcatggttatgatctggcattcagttacgaccagatgaaagccctgaccgccagcgggttctggccgctgtaccggtttgatccgcgtcgtgacggaaccggcaaagcaccgctggtactggattcccgtccgccgtcacaatccctggccgaggtgatgcatcaggagcagcgttttaaccgcctcagcagcagtgatccggcgagagccgcagttctggcggaaaaagcggaacaacggacggcaaaacagtatgcactgcttgaattgctggcctcacaaaaatctgaaccggccggaaccggcattgttcaggaggatgcctga

SEQ ID NO: 275582 - DNA, 243 bp, Morganella morganii
atgaatgactatctgattttatttgaaaatatgctcggtgtggtggcgatgcgcaagcatctcacggcggccgggcagcctttcaccgtaacggatatcccgccgtcactgggcaaagcctgtggtctggggatccgcctcagtgtcagtgatgattcactcccggcactgcgcggccgtccgcaggtcacggaaatataccgctgtgaagcagctgaatatgtactgacggcggcggagtaa

SEQ ID NO: 275583 - DNA, 804 bp, Morganella morganii
atgctgagtatcggtattgactcgggctcgacagccaccaaaggaattttgttcagtgatgaagacggcggcgtgatcctgcgccgcttcctgatcccgactccgttccggccgcagtccgcgattctggaagcctgggaaaccctctgcggtgaatgtgacaccaaaccgtatctgaccctcaccggctatggccgcaagctggcggactttgcggacaaacaggtcacggaaatctcctgtcacgggatcggggcacgctggctgcatccgcagacccgcacggtcattgatatcggcggccaggacagtaaggtgatccggcttgatgagcacgggcatctcacggattttctgatgaacgacaaatgcgccgccgggacggggcgttttctggatgtgatcagccggacactcggcaccgatatcacggcagtggatgacaccatccgcgggattgagccgcatgctatctccagcatgtgcacggtttttgccgaatcagaagtgatcagcctgcgatctgccggggtggagccggagtcgattctgtcgggaattgtgaattcaatggcacaacgtaccgccgggtttgccaagcggctgagtaccgtgccgtcagtgctgttcagcggcggggtcagccgcagtcagacgttctgtgagcggctttcacagcacctgggggcggaggtgatcacgcatccggacggacagtttgccggtgccatcggtgctgccatttacggcatccgtcagttacagaaacaggcagccgtgacctccggggatatccgttcatga

SEQ ID NO: 275584 - DNA, 1158 bp, Morganella morganii
atgtcattagtcacacaacttccgtcgatcttttctgatttctccgatgcccgccaacagggctttctcactgtaatggaactgaaagagcagggggtccctctggtgggaacctattgcacttttatgccgcaggagattgctatggctgccggtgcagcggttgtctccctctgttcaaccagtgatgaaaccattgaagaagcggaaaaaaccttaccccgcaacttatgtcctttgatcaaaagcagctacggattcggtaaaaccgataaatgtccctacttctatttttctgacatcgtggtcggtgaaaccacctgcgacggcaaaaagaaaatgtatgaatatatggcggaatttaaacctgtccatgtgatgcaactgccgaataacagtgaaagtgcggaatctgtcgcgctctggcgctcggaaatcatccgttttcagaaacggctggaagagcagttcggctgtgaaattacagaacaggggatccgcgatgcaattgatttacgcaatcgcgaacgccgcgcattaaccgaattttaccgcctcgggcagctcaatccgccagccatgaccggccgtgagatcctcagtgtggtctatggtgccactttcaaatttgataaacgcgctctgatcggcgagctggaaacgctgaccgccaaagtgcgtgcggaatatgctgccggtaaacggctggatccgcgtccgcgcattctgatcaccggctgcccgattggcggggcggcggaaaaagtggtgcggattatcgaagagaacggcggctgggtggttggttatgaaaactgcaccggggcgaaagccactgaacagtgtgtggatgaaaatccgcaggccgatgtttatgatgccctgaccgaaaaataccttgctatcggttgctcctgcatttcaccgaacacacagcgtctgaatatgctcagtgagatggtgcaggactatcaggtggacggggtgattgatgtgatcctccaggcctgtcacacctatgcggtggaatcgctgctgataaaccggcatattcgtgaaaaacacgatattccgtatatggcgattgagacagattattctacctctgacactggtcagcttgctacccgcattgccgcctttattgagatgttataa

SEQ ID NO: 275585 - DNA, 432 bp, Morganella morganii
atgttaacaggaatgaatcatctgaccctggcggtcaccgatttggatcgcagcctgcatttttaccgcgatattttgaaaatgacgctgcatacccgctggaaatacggggcttacctgacctgcggggagttgtggatctgtttatcggcagacccggaaatcattcaccggcctattcatcagggttatacccactacgctttcacccttcctcctgagcagttcccggctttccgctcacttctcgccgctcatcagataacactctggaaacgtaaccgcagtgaaggtgattccgtctattttcttgacccggacggacatcagcttgaggcgcattccggcggaatacagcagcggctggatgcctgccgcgaagcaccgtatgaagagatgatatttccggcacccgggcagattaatgtgtaa

SEQ ID NO: 275586 - DNA, 447 bp, Morganella morganii
atgtctgattacccagccgttcccggtgtgctgtttgtcgccggttttggtccggtgacccgcgaccccgcccgcagcaaacacttctttgcggatactgtcggcctgccgctcagtgaatctgaaggcgtacctgattacctgactgccgatcacaccctgcacggtgtaaaacacttcgcgctctggccgctcagccacgcggctgtctcctgtttcgggcaggacagctggccgccgtcacatccggtgccgcaggcatgggtcgagtttgaagtgcgcgacctggcagcggccacagaatttttacagtcacagggctatccgctgctggtggcaaacagaaccgaaccgtggggacaatccgtcacccgtctgctcagcccggaaggtttacttgtcgggctgactatcaccccgtggctgcgggataacaccggcgaataa

SEQ ID NO: 275587 - DNA, 432 bp, Morganella morganii
atgtcatcattacgtttatcttatcctaaactcagtccggcagcgtatgcggggctgattgcctgtaaaaatgcactggaaagcagcgcgttatcccctgaactggttgagctggtgtatctgcgggtatcccagattaacggctgcgcattctgtctggaaatgcacacggcggcactgcgcaaacggggcatggttcaggagaaacttgacgcactggcgggctggcgcgtgagtgaacgtttcagtgatcgcgagcgggtggcgctggaatggacggaagcggtcacactgttatcggctcagaatactgatgacgcaatctggcagcgtgtgaaggtacatttttctgatgcggaaatgagtgatctgacaatcgcggccgggctgatgaatgcttttaaccggattgctgtcagtctgcgccagtag

SEQ ID NO: 275588 - DNA, 345 bp, Morganella morganii
atgctggcgaagtttctcccgatttttctgcttgttctctcaaatatttttatgatgtttgcctggtacggacacctgaagtttgctggtaagccccttattgcggtgatttttttcagctggctgattgcgctggcggaatattgtctggcggtaccggccaaccggatcgggcatcagtattacagtgccgccgagctgaaaaccatgcaggaagtgatcactctgtgtgtctttatggtattttctgtcgcttatctgggtgaaagcatcacgctgaatcaccttatcggtttcggatttattgccgccggggctttctttatttttaaagggccgttttaa

SEQ ID NO: 275589 - DNA, 441 bp, Morganella morganii
atgcgtttattaactctcttattattgtttgtctctttatccggttatgccgccggaggatcactgaacggctattataaatgtgagatctcatccgccagttatcagcgaaaacagggcgcaatgcgtgatttttattttccggataaacagagtgaatccgtcgttctgtttcataatgaccgctttacggtgctggatacgcaaccatccccgtatcattccccggcactgacaccgattaaacagtttgccaccatgtcaaagcaggatttgcaggagatcggcgaagataccctgatttatgccggtacttacaacgggctcgcctatttcacaccgtcgcagcggcgctttgtcttcggcttaaataaacgcaccggcggtaataacggctcatttctgctggaactgcaaaactgccgccggacaacctcctga

SEQ ID NO: 275590 - DNA, 894 bp, Morganella morganii
atgaataatataaagaaattagatttaaatcagctggttaccctgcatgcactgctgcgtgaacgccatgtcagccgggcagcggtgtctctgcaccgcagtcagcctgctgtcagccacacactgaaccagctgcgggatttatttcaggatccgctgcttatccgcagacagggccgttatcatctgtccggtaaggcggaagcactgtatgcgccgctgacgcaggctctgagtcagctcgatgacctgatcgcacaacaggatttccggccggaaaattgcacgcggcggtttaatatcgctatgtctgattacggggcggcgattttcagcggaaaactcatccgttatctgcggactgtcgcgccgcaggtcgacttgcaaatctggcagggcagccgcgaggagatgcagggaaaattgcaggaaggcagcctcgatctggccttcggggtatttacagccacggattatactctccgcacaaaaacggtatttacggacaccatggtcagtgttgcggacaaacaatactgcaccaacggcacgatgccgatggcggactggctctcgcacccgcatatcctggcgagcatgaagccgtatgaagccaatgaaattgaccggcagctacaactgctcaattaccggcggcgtattgcggtctctgttccttactggcagattgcttcgcaactgccggaaggcacggatctgatcctgacggtggcgcagcgggcactgccggaaatactcagcccgtcattacaggtatttgcgccgccgctgactatcgcaccgctcagttttcagatgttatggcaccagcgcagtgaaggggatgcggcactcggctggttgcgggaagtggtgatgcaggtgtgtgactga

SEQ ID NO: 275591 - DNA, 537 bp, Morganella morganii
atgtcaaccttatcattatccgctattgctttgattgtttgtgctttttttgccggtgccatcgtgccggtacaggcggtcagcaatgcagtgttagcacgccatctgggtcatccgttatgggccagtcttgtatcattattaatcagtattattgttttagcaccgttattattaatatttaaagttccgaagccggtgctgagcgcggatttactgcatcagccgttctggatctggctcggcgggatagccggaatgctgtacctgacctctgctctgatcctggtaccgaaaatcggtggcattacctttttcgtgatggtgatagccggtcagctggtgatttccgcgctgattgaacacttcggtttgttcggaatgccgaaacaaccggttcagatagccaaactcgccggtatcggcctggtggtggcgggtgtgctggtgatgcagtttgcaggtgaaaaaaagccccgcaatactgacagcggggcaggaaatgcaactcaaatcgaacagacaataaaaagatag

SEQ ID NO: 275592 - DNA, 915 bp, Morganella morganii
atgaacagtaaaacggcagcagccttcgcgttcctcggcattatctggggaaccaactttatttttatgcgccaggcgagtgagtggatctcgccggtacagattgtatttttgcgggtgttatgcggctttgtaccgattgcggtgatggcgtggatgcagaaagcagtgcgccgcgagcacctgaaatacaccgggcatttcctggtgatggcgcttctggcaacggtaatttattactgggcgtttgcttccggcacctcattactgctctccggggtctccggcgtgctcagcggggcaattccgctgttctcgtttattgtcgcagcgatttttctgcgtcaggaaaaaatcacggtaatgcgtctgtgcgggctgatgctcggctttgccggagtgattctgatcgccaagccgtggcaggtcagcggggagagtatcagtctcgccggggtgggttatatgattctgggatcactgagtgtgggaatttcttttgtgtatgccaaaaaattccttgcggataaacagattgccccgctggcgctgaccacctatcagattggccttgcgctgctgatcctggcctgcatcacaccgtttaccggcattaccgccattgcgcaggacagcaccgccagcctcgggctgattatcgggctgggattgctcggtaccggggtggcatatctgacgtattactatctgatcctgaatctgggggcagtggtggcctcatccgtgacctacatcccgccggtggtggcactgattgtcgggttcctggcggccaatgagcagctcggcgtggcagagattctgtcaatggtgctgattatgagtggtgtctttttattacagcgtccttcgcgccgcccggaagcggagaaggaagctgaagctgtgcagtaa

SEQ ID NO: 275593 - DNA, 903 bp, Morganella morganii
atgaaccgttatccgccgatgaaagccctgctggcctttgaagccagcgtccggctcggcagctttatcaaagcggctgaatccctgaatgtcacaccgggcgcggtcagtcagcagataaaaaagctggaggaggagctgggtgtgatgctgttcgtgagggaaatccgcaagctgacggtgacagagacaggacagaaatactatcgcttaattcagcccgcgctggaacagatccgcgccgccggtgagacaatccgctatgcggcacgccataccctgaccctctccatgccgcccgggctggcctccaaatggttctcccccaggatgagtgattttgtccgaacctttccgggactggatctgcacctgaatgccaccgcagccctggtttcgctggaaaaagacaatgtggatctggctgtccgctatacggatttatcccgcacgcaacctgcacgggtgctgttatctgacgcgccctgccgtctgttctgtcatcccgcttatgccgcacggttgtcacttcacagcccggcagatctgaaaaatgcggtactgctgcacaccacactctatccttactgggacagctggctggaacactatgccgggatagcgtccggcggcacaccgtttaccacagggctgcatttcgatcagttcttactggcgattgatgcggcggtgcatcagcagggtattctgattgccaatgatttcctgctggagcatgagctgacacagcagacacttattcctttgtttccggaactgacgctgcattccggcaaaggattttatctgctgcataaccgccacagcgccgatcaggcgatgatcagtactgtcagtgactggttttgtcatgcatttgctcacactgcggagaatcaatga

SEQ ID NO: 275594 - DNA, 2208 bp, Morganella morganii
atgaacaagaaaaaatgtgcggtcagtgagttgctcagcggcatgccggaactcccgtttgaaacggtttctctcagtgagtgtgatttcacggcggtgtctgtgtgtctggtggctccggcagataccggcaacggccggctggcgcggatccggcaacggggcttcggccagccggtttttatggtgctccgcgacggtgaaacagaggcgctgccggatggtatctgcggggttatcgatctccgccgcgatgacagccgtacggtcggtgacacacttctgcgtgcggcacaatcctatgaagagagcctgttgccgccgtttttcgggcggatgaaacactataccgcgcagcaaaatatctcttttgcctgtcccggccatcagggcggggaatttttccgccgtcatcccgccgggcagcagtttacggactatttcggtgatgcactgttccgggcggatctctgcaatgcggataccgcgctgggtgatctcctgatccacgaaggggcggcgctggccgcgcaacagcatgccgcgaaagtctttcatgcggacaaaacctggtttgtgcttaacggcacgtcgtcatccaacaaagtggtgctgaatgctctgctgacaccgggtgatctggtgttattcgatcgtaataaccacaaatccaaccatcacggcgcattgatccaggccggtgccacaccggtttatctcgaggctgcacgtaacccgttcggttttatcggcggcattgacgcacactgttttgatgaggattatctgcggacactggcggcggaagcagcaccggaaaaagcgggcgacaaacgcccgttccggctggcggtgatccaactggggacgtatgacggcacggtgtataacgcccgtcaggtggtggacagcatcggcccgctgtgtgattacattttgtttgattccgcgtgggtcggctatgaacagtttatcccggtgatgcagatgtgttcaccgatgctgctggaactgaatgaaaacgatcccggcattctggtgacgcagtctgttcacaaacagatggccgggttctcccaggcgtctcagatccacaaaaaagataaacatatcaaaggtcaggcgcgttatgtctctttccggcagatgaataatgcctttatgatgcatgcctccaccagcccgttttatccgctgtttgccgcactggatgtgaatgcgaaaatgcatgagggcgaacccggacggcgtttgtgggcggaatgtgtcagaacggggattgaagcccgtaaactgttgctgcggacgtgtcagcatatccgtccctttatccccgctaccgtggacggccgtccgtgggaagaggcgaaaaccggtgttatcgccgcagaccggcgttttttcaattttgtgccgggcgagcgctggcacggttttgagggttatgcggacgatcagtattttgttgatccctgcaaattattgctgaccacccccggggtggatgtcagcagcggggagtatgaggatttcggcgttccggcgacgattctggcgtattacctgcgcgaaaatcagattgtcgcggaaaaatgtgacctgaattccatcctgtttttactgaccccggcagaaacaccggaaaaaatgcagcggctgatccggcagattgcccggtttgagcaactgctggacagcgacgcggcgctggaaaacgtcctgccgtcactgtgccgcacgtatccggtgcgttatgcgggatacacactgcggcagttatgtcaggaaatgcacgatctgtttgtgaaacataatgttaaacagcgccagaaagagatgttccgccgtcgctgcttcccggcggtacggatgtcgccgaaagcggcacatactgaatttgtccgcggcaatacagagcgggtagctgtgtcagatatagccggacgtatcgcggcggaaggggctctgccgtatccgccgggtgtcttgtgtgtggtgccgggggaagtctgggaagccccggttcagcgctatttcctcgcgctggaagagaccgccgatcgctttccgggcttcgcgccggaattgcagggggcgtatattgaacaggatgacagcggacaccagcgtgtgtatgcctgcgttatccgtgatcctatcattgattctccgcagtgtgagcaaatgcatgacaaaaccagtcactga

SEQ ID NO: 275595 - DNA, 534 bp, Morganella morganii
atgctgcaattacttccggttacctcaccggctgatccggtactcgatgatattcgtccgctgtatgaatccgcttttccgctgcatgaacagcgcacgcgggcagggcgggaaaaactgtttgcacagccgggctattatctgtatcagataagggataatgaccgctttgccggatttaccggctgctggcagatgggttccctgttttatattgaacacattgcggttgcgccgcagatgcgcggcagtggggtcgggcagcgggcgttgtcacttttttgtaaggaaaaacagcgggttgttctggagatagatccgctgacggatgaggtggcgcaacgccgtctgcgtttttatcagcactgtggttttgctgttaatgactatgttcatcatcacccggcttaccgcccggaatttccgccgcatgagctggtgatcctgagttatccgcaggttattaatccggaagaatatcagcaatttaagcactttcttatccatcacattatgccggaaaatctgttgtag

SEQ ID NO: 275596 - DNA, 789 bp, Morganella morganii
atgaacaatcagaattatgtggtgatcaccggtgccagcgccggtatcgggcgggcaatcgcagccgcttttgcccgccggggtaacaatgtggtgctggtggcacggcgtgaggatgcattactgacactgaaggcggagctgatgcagcagaacccggacatcacggcggaaatccgcgtgtgtgatttgtccgtgcccggcaatgcggcggcgctctatcactcgttgtcttcactgaatattattgcgtggattaataatgccggtttcggctattacggcacggtggcagagcagccggtgtcggaagcggagaagatgcttgccctcaatgtgaatgccctgatggtgttgtcggcgctgtatgtgcaggattatcagcatacggaaggtgcgcagctgatcaatatcagttcggcaggcggatatacgattgttccctccgcggtgacttactgcgccacgaagttttttgtcagtgcttatacagaagggctggcgcgtgagcttatccgcagcggggcaaaactgcgggcaaaggtactggcaccggcagccacacagacggaatttggtcaggtggcgaataataccgattcttatgattatgaccggactttcgggcgttatcataccagtgacgaaatggccgcgtttgcgcttgaactgtatgacgcggacagtattaccggcatgattgaccgcgatgatttccgctttcagctggcggatacgcggttcccgcatgcggaaaacagccggtcaaatcagaaagtgactccataa

SEQ ID NO: 275597 - DNA, 369 bp, Morganella morganii
atgcattattccatcagtgagttttccgccttaaccggtctcagtatccataccctgcggttttatgaaaaagaaggcattctgatcccgcagcgccgggcaaataatcaccgttgttattccgcccgtgatacggagtgggtgacgtttatcacccgactgaaagaaaccggcatgccgctgaaatccatcaaacattatgcggatttacgggcccggggagaggagacggcacaggcgcgtatggatttgctgctggcacacagcggggcattacaacaacagatagcggtgctgaatgatcattttcagcacctggaacgaaaaatagattactaccgtgatttactgaccacggcagtaatctga

SEQ ID NO: 275598 - DNA, 1560 bp, Morganella morganii
atgcagttacttcgaaacttatccatccggttcgtcatgctgtcgatactcggtattttgtgtctgacactcggatgtgtcagtttttacagtgactggtcactgtcgagagtgtctgacggcaatgcgaccgatcgtcagttagtccggcaactgacggtactgaatcagggaaatgaccagtatttccggtttatttcccggctgaaccgcgaaatgcagaaaaaagcggaaggggaagaaccggatttaaaaccgtctgcggaagcgatggagaatatggggctgcacctggcggagatgaaacggatttctccgggaccgatggatgtgcagatgtcagaaaaggtgattgcccgctggcaggcactctatgatgaaggcgttaaaattcagatgcagctggcggagcagggggatcaggcgggttaccgtaagcagtcccatgatgtcacaccgcagctgagcaaagaattcgggactgtcagcgttgagttcacgcaggtggcggaggcgcggatcgaacagacccgtacccttgtggacggcctgatgaccaccacgcggattgtgattatcagcggcacactgttcggtctgctgatcctgatttttgctgatcgctatctggtgaagatgatgcagcgcccgctgaacaatgtccgtcagcattttcgccgtattgcgggaggggacctcagtcagccggtggaaagtgatgcagccggacgcaactgtgtcggtaaattattcccgctgctcagtgagatgcaggacagtctgcgggacgcagtgaattctatccgtgaaggcagtgataccctgcgtgacagtgcttctgagattgcgcgcggcaatacagatctctcctcgcgtaccgaacagcaggcagcggcgctggaagagacagcggcgagtatggaagagatcaccgcgacagtgaaactgaatgcggatcacgcgcatcatgccagcgaactggcggaagtgacgtcctcaacggcgcatcagggccatgagatgatcgccgctgttatccgcacaatggacgaaatttccgagagttcacgcaaaatcgctgaaatcaccaatgtgatcaacagtattgcattccagactaacattctggcgctgaatgcctcgattgaagcagcgcgggccggtgttcacggacgcggttttatggtagtggccggtgaggtacggacactggccagcaacagtgcggatgccgccaaagaaattgagcgtctgatagccaatgcggtgtcccgtgttgatcagggcattaaacttgtcgccggcggcggggaaaccatggaggagattgtccgtgcctccggtgaagtcaccgagattatgaaagaaattgccattgcttcagaggagcaaaccaaagggatcttacaggtcggcactgcaatcactcagatggataccgtgacccagcagaatgcctcgctggtcagcaatgtctctgaaaccgccgccgggctggaattacagacacaggcgctgcagaactccgtacagaaattccgcctcagtgctgcggactga

SEQ ID NO: 275599 - DNA, 252 bp, Morganella morganii
atgatctggcagggccatacggatactgttatcggcagaaaattcaaaagttataattttttgttattttttaaaattttgttgtttttcaggttaatagctgcacgtttttcggtggatcaagatatttttctgtctgtatgtcccaaattcgcacaaaaacagacaattcctgataaaaaaatacaaaccactgcacactacatacagatatttacactccttgcggatataaaaggtaaattcatttaa

SEQ ID NO: 275600 - DNA, 915 bp, Morganella morganii
atgaacatagacgggcttcgcggaagtattattcagagtctggtgttgtggattgagcaaaatctggaatctgatttatcactggatatcattgccgcacgggcgggttattccaaatggcatttacagcgcttatttaaagagcacaccggtgtcgtgatcggaaaatatatccgtgcccggcgcttatcctgtgcagcaaaggcattgcggatcacccgcagcagtattctcgatatttcggtgaaataccgcttcgattcacagcagacattttgccgcgcctttaaatcccagtttaataccaccccttccgcctaccgcaagaaagcaggctgggacagtaatggcttctgttttccgttacaggcggaaaacctgattccgtttcagtctgaactgaccgaattaccggaaatgctgttagcgggctctcatcattatcaccggaaacatctgtctgactggcagactgaaaaccggaaattccggcgtgaattttgggagaagttttttaaggaagtggatattattccggcggatttgtatgccatacatgccccgtatgaatcaaccgcagatgacatcagttatgcctataccacggcggtcattccgtccgtattatcagcggacagcatccgccgcgcatcactttctccggtgaccttaccgggcgggcattatctcagaattaccattgatccggccatgctgaaaaatctgcccggtgattacaacaatattattcatgctgcctattccggcacgctggcagaaatgaacctgctgcgcagacggggcccggatattgaacactataaactgctgcccgcagagcggcatgatgagttcattgccaacggcttacagtatgtggaagagattaattactacatcccggtcatgcgataa

SEQ ID NO: 275601 - DNA, 225 bp, Morganella morganii
atgataccggactatacagaaagcaattttgccggtattgagcacggtaacgggatttcggtgatccgttttcatgcaccctggtgtgagctgtgccgccggagtggacaggagtttgcctgtatttccgggccgcagccggcttctgtcttcacacaagccgtacataatgcgttgttatcgcatgaccgggatgtagtaattaatctcttccacatactgtaa

SEQ ID NO: 275602 - DNA, 237 bp, Morganella morganii
atgatgaatataaataaaattgttggagaacaaatcagagcacacagaaaagaacagggattatccggttcagaattaggtgacaaattaaaattaagtcagcagcaggtttcacgctatgagcgcggggaatgcaatattccgcttgatatgctgtttactatttcacttgttctggaagtgccttttgtaaagctgtttggtgatcttaacaacagccgggattatatgttttaa

SEQ ID NO: 275603 - DNA, 549 bp, Morganella morganii
atgaaattaaatattattggtgcatctgttgtatccgctttattattctcagctgctgcatcagcagcagatccggtaatcgtaaacggcggtacagttcattttaccggggaactggttaacgcagcatgcgcagtcagcactgaaagcagcaaccagactgtggaattaggtcagtaccgtactgctaaattagcagcttccggtgacatgtctactccggttccgttcaaaatcaaactggttgactgtgatccggctgtggcaaccactgctgctgttgcattctcaggccagagcatgaccggcgacgctaccttattagcggttaactccgggactaacgcaccggctgcacagaacgtcggtattcagatcagtgataccgcatctaaagtattatctccaagcggtgctgatttctcagcaactaaaaccttaatcgaaggtactaacgtattagatttcactgcccgttatgttgccaaaggcgcaactaccccgggtcaggcaaatgctgatgcgactttcgttgttaaatacgaataa

SEQ ID NO: 275604 - DNA, 699 bp, Morganella morganii
gtgatttctgattattttaaaaatagtgcattgatattgtttttcacactgatgtcagggtttgcttattcagcgtcaaatcagaactcaggaattgcactgggtgcaacccgggtcatttatcctcaggatgcaaaacaaacatcactgtctgtgattaaccacagcccgaaagaacgttttctgatcaactcgtgggttgataacgacaatggcaaagagaaagactttgttatcacaccgccattatttgtgatggagcctgccagcgaaaatattctgcggattgttaacctggctcaggatttaccgaaagaccgcgaatctgttttctggctgaacgtaaaagcaattccgtccgtggataaagagtcactggaaggaaaaaacgtgctccagctggctattttgtcacggattaaattgttcgtcagaccggtaaatttaccgatccagacagaagatgcggcagaaaaaatcaccatcacgcagaaaagcggcgcgattacgattgataacccgacgccgtattacaccactttcgtcaatattattttagacgggcgtccgcttgagaatgtcatggtcgcaccattcagtacccatcagattgccggtaaaaacggccgtaaactgacttatcagacaattaatgattacggcggactgcgcaaacagcgcgaagtgaatctgaattaa

SEQ ID NO: 275605 - DNA, 2589 bp, Morganella morganii
atgagtaacatcaaaaaggttttcacacatacgccggtttattttgctgtgcttgccgcggtgacgtgttttttccctgcgggaaccgccggtgcgaaaccttcctttaacgccgcgtttttaaccgatgacctgtctgacgcggatgtctctgatttatcccgctttgaatcgggcggctatcagccgcccggtacttacctggttgaactgtctgttaataatgactttgtttcctcctctgaaatcacctttaccgaactgaaaaataaagagggtgagccttatttattcccctgcttcagtgcggagaccattatcggtttcggggtaaatatcgcccgtccggaggaattaacagagcaggataaacagtgcttcccgtttaccgaaaaaattcccggttcagaatatcactttgattttcagaaacagcggctgatgctcagtttccctcaggccagtctttccggacaggcccgcggctatattccgccggacagatgggaatccggtattccggcactgtttatgaactatttcgcgtccggaaataacaactcggataataccagcagctactacgtgagcctgaactcggggtttaacctcggtgcatggcagttccgtcagtcaagctcctggaattacaacaaaagtaaaaacaccagcaacagtcagtggcgcagcctgatgaattatgttcagcggccgattattgccctgaaaagtcagctggttatcggtgacggcaactcggacggcagtgtctttgattctgccgggttccgtggtgtgcggctgttttctgtcgataatatgtatccggacagccagcagggctatgccccgaccgtccgcggtatggcgaaaacggatgccaaagtggtgatccgccagaacggctatgtcatttaccaggtttatgtcccgccgggcccgtttgttattaatgacttaaacccggccacctccagtggtgacttgcaggtcaccgtcgaggagaaagacggtacccagcagcagtatattgtcccctactccacactgccggtgctccagcgtgaaggccgcgtgaaatatgatgtgatggccggggaattccgcagcggtaacagcaaccaggataaaccgaagtttattcaggcgaccctgctcgccggtctgacacgggatatctctgtgtataccgggacacagctggcagacaaatataaatcggtactggtgggtgtcggtcagaatatcggccgctttggtgctttctccttcgatgtcacccatgcaaacagtgaactggcggacggctcgaatcacagcggacagtctttccgtttcctgtacgcgaaatccctgaacaccaccgggaccacgttccagttattgggttaccgctattccaccaagggcttctataccttaaacgatgtcgcgtataagcagatgtccggctatgaatttgccccggacggcgaggatggcaatgacggcaagccgatcattataaattatcacaacctgctctataacaaaaaagggcgcttccaggtcaatatctcacagtcatttgaccaatacggctcgctctatatatccggtaaccagcaatcttactggaaccgcagcggtaaggatgagtggtatcaggccgggtattccaacagctggaacgggataaattactccgtttccctgagcaccaccaaagcactggaactcaaagagcgcgataacatgctttcggtgaatgtgtccgtaccgttttcctcattctcgtcgcgtaatgcgcgcagtaatgatgcctttaataacgcgtatgccaccttctccgccaccaataactccggcggccgcgaggcttaccgcgtcggcgtgaacggcacactgctggaagacagaaacctgagctattccgtctcacaggggcatgtcagccagcagggttataacggctcagcgggcctggattatcagggcacttacggcgatttcgggatcagctataactacgacccggatcagaatcagctgaactaccgtgcctccggcgcagtgctgttgcatgaaaacggattgacattcggccagtcaatcaatgataccacggtgctggtcaaagcaccgggtgccgctggtgtggcggtggaaaactacaccggggtgaaaacggactggcgcggttacgccattattccttatgcctcggcttaccggaacaaccgtattgccctgaatccggattcatttaatgacaatacggaaatcaaaaataacgtgcagaacgtggtaccgatcagcggggctgtcgcccgcgccacgtttgataccagtatcgggatccgggcgctgctctcgctgacccacaacggcaagccgatccgcttcggcagtatggtgcaggaaaccggctctcagatcagcagtattgctgatgatgacggacgtgtgtatttaaccggcctgccgctgaccgggaaattactggtgcagtgggggaatcagccgggtgatcagtgcaccgcggattatgattttacccgtcaggaaatcaaagggccgttactgcggaccgcgcttgaatgtaaatag

SEQ ID NO: 275606 - DNA, 999 bp, Morganella morganii
atgaaaaagagatacgcaatcccgttattaatggcatttttacctcttccggcgctggctgtggtatgcagtaatgcggcgggcggaaccagtgaggtcttttacgatctgaccgacagctttacctccgccaataaccaggtgggtcaggtaaaagtgttaaccaaaaacttcagcgaacgggttgagggaatatgccctgtccactccggcaataaccggacaatgcgcagctatgtcgccaatatgccggtggtggaaacggaaggatcctataaatacctccagctgaatgattatctgcgcggggcgatgagtattactgacagctccgccggtacattttatccgccgcaggactatgttctgatgggaacacacccgaacgtgaccaagggaaaaccgttcggcattatggacagtaattttaccttccgtctgaaagtcacccgccgtttcgttgatcaggtggtgatcccgaaaaagaccttatttaccgtctatgtcacgaccgcaaatactgacccgctgagcacgccggtttataccatcagctacagcggcattattaatgtgccgcagcaatgcaaagtcggggttaatgatattgtggtgattaacttcggcaaaatcggctcacagttattcagccaggccggtgccggtaataagcctgccacagtgaataaaaaactcgaaaatatcgcgatccagtgtaccaacgtggaagcgaaagcttatctgacactgcgtatcgaagcggaaaaagtaaacggtaatatgattgtctccgataacccggatgtcggttttatcgtcggtgatcagaacggtaatgcattaacgccgaataatatcggcagtgttattccgttccagctcgacggcgcgggctctgcccggacagcaattaccgcctggcctgtcagtgtgaccggcaataaaccgaaagaaggtgttttccaatcccgcggttatttacgcgttgactacgaataa

SEQ ID NO: 275607 - DNA, 534 bp, Morganella morganii
atgaagaaatacattaaacaggctctgctccccctgctctgcggtggtctgctgatccattcagccgccgcttatgaactcggccgggtcaatattgagttgtccggtgaaattgtcgcttacagttgcggggtcgaagtttcccaggcaaataaaaaagtcgaactggggcgctgggcactgaaaaatttccgcgccgccggtgataaaacacaatccatgccgttcagttttcagttacagaattgtccgccctcttctgccgtcacctttgtcttcagtggtaagaaagataagctggacagctcactgctggcaataaatgagggagcaagtgctgcgggctctgtggcggtggagatcctcgacagtcagaaaaaccgcctgccgatggaaaccaaaagcccgaaaattgccatggatattaacggcaacggtcaggcacaattttatgccaactatatcgccaccggaaaccgcccgacacccggcatcgctgacgcggatgccacttttatgattacctacgactaa

SEQ ID NO: 275608 - DNA, 777 bp, Morganella morganii
atgataaagaataaattactgacaggttgcctgctggcgctggcttccgcacatgcattttccgcatcacagccgggtttttatatgtcggctaaagccggtgccgggttattaaaaacaacggataattcgttacagggatccggtatgacagcgggtgcgctgtcatataatatcgaaaaagaaaatctgaaaaatataacagatactgttttttcaccggggatagcggtgggatatcagtttaccggtgatacttatcagcctgtccgtgttgaacttgcctatcagcactacggaaagcaggatgatacgatgtctttttcaccgtctgtttccggttactggcataaccagaaaaataatacctttccgctgccgtcagagtcttcgctgtatatgaaaacaaaagccggtacgctgatggtgaatgtctattatgacattccggtcaataatgatatcagcgcgtatctgatggcgggtgcgggtgcggcatttatccgtaatgatgtttcctgggataccaatgtggccgggcaggcactcagtgccggggcatcaaaaaatgtcactaatctggcatggtctgcgggggcgggtatttcgtggaatattaatgagaatatttcgctggataccgggtatacctataccgatgccgggtcggcagaaaacagaattgttgcccgcaacgggattaatactgcgacaggttataccaatacagatgtgaaattacatttgctgtatgccgggatccggtatcatttttaa

SEQ ID NO: 275609 - DNA, 558 bp, Morganella morganii
atgaatagtattaacagtaaattttccggaacagggaatataaaaggtattttggcttttatgctggcagcagtattcagcccggcagctgtttcggatatcggcagtattaacttaattatgaaagctaatctggtttctaatgcctgtaccattacaccgggcacaatgaatcagacagttgacctgggaacctgggcagtaaaacaatttcaggaaacaccacggggtgtgccgccaaagcagtttttcattgagctgattgattgcggccatctggcctcgggcgtaaaagtgaagttttcaggcacagtggatcctgtcaatgataccttatttaaactggatgccggcagtacggccacaaatatcggaatttctgttctcgacagaaataaggatgttataaaacccaacacagaaacaattgtatatccgctgagaccggacgccaccaatattccgctggtattttatgcgcaatatgtcgctaccggtaattctgtcggtgccgggaccgctaattctcaggcaacctttacgctggaatatctttaa

SEQ ID NO: 275610 - DNA, 1002 bp, Morganella morganii
atgcgtaaaataatgttatcaggtttgcttctgttttgtgcaaacagctatgcggtaacctgtacttccggatgtaatgatgtctatcttaagatagagcaaaatctggcatcaaatgaaaatgataccggtgcacagattaacagtaacacaataacatcgcctgatgtcaacatgaaggcaacacataatggttatcttatgcaatgggcgaaatttaatggtgatacaattccgacaccgcagtctcatgcaactaactggcaattcaaacgggttgatgattatatttctgtggcactggggcgggattctccctgtatcggaagcaccggaaaaatctatgtgccttttaatgaacgggtttacggtaacggaaactgtacaccggtagattataataatggcgggaacattactatatttgcccgtgattggcagagccggctccgtattgaccggaaaattgtcagtggtacctattcaaaaaacattctgattggtcagttcggtttttgccagccggataattgtgcttcaccccaggtagtgcagaatatttatttatctctgaatattacggttccgcagacatgttccattaatgccgggcaaacagtgatcgttgatttcgggaatatatcaaccggggcatttaaaacggcgggtgccagagcacagaatattaacccgaaggaaagctcgttatcggtgacctgcgataatattgcttcaggaacaaatctgaatatgcgtttacaggccaataatgttgcgggaaatattgttatttccgataacagtgatgtcggatttattgttactgacagtagtgataaagaactgacacccaacagtctgtcgagttttattccgttttccctcgacggaaacacgcgggctaatgcacggatccgtgtttatccggccagcgtgaccggcatcagacctgatgagggtccggtaacatcacaggcttatttacggattgatttcccgtaa

SEQ ID NO: 275611 - DNA, 2634 bp, Morganella morganii
atgcagaaattaactctgctgaaaggattgccatgctttaaatttaacaagataatgttaatgctttcatgtgcaatgataaccggcaacatggtcattattaagaacggctatgcagatgaattttttaaccctgcatttttgtcagataacggtaatgaagttgctgatttaagccggtttgataaggggctgggacaggctgcgggtgaataccgggttgaagtttttcttaacggggagtatgtggcaacacaggatattctgtttgtcagtaatgaaaaagatggcgaaataaaaccgggtacagatgatagtggtttaattccctgcttaaccactgactggttaaaaaaatacaatattgataccagtaaagccgtattactgaatgacagctgcgtggattttcgttcaacttacgataaatcacaggcccgttttgattttgaagagcagaagttgcgtgtggatattccgcaggctgcatttatcaataatatcagagggtatattccgccgtcagaatggcaggagggaatcaacgccctgttactgaactatggttttaccggcagccacagtaaaaacaccaaaaatgatgaacgatataataactattttttaaacctggacagcggtattaatctcggtgcgtggcagctgagaaataccagtacctggaattatacatctgaccggcgtacagataacagccagtggaataatatccgcacctatgtgcagaaagcgattattccgctgaaaagtcagctgaccatcggtgacagttttacggaaaatgatattttcgacagtgtggggttcagaggggtaaaactggcctctgacgataatatgctgccggacagtatgcgcggttttgcaccgactgtcagaggcgttgccaacagcaatgctcaggtgactatccgtcagaacggctatgttatttatcagtcttatgtttcccccggcgcatttgaaattaaagatctgtatgcaacgtccagcagtggtaatttggatgtcacggttaaagaaaataacggcacgatcacacagtttacggttccgtattctgcggtaccgatgttacagcgtgaaggccggacaaaatatgaagtaaccgcaggggaataccgttccggttcatccatgcaaaatagcccggatttctggcagggaactatcagccacggtttttcagaaggtgtgacggtatatggcggaacacagttatcggataactaccgggcattttctgccggtgccgggaaaaaccttggtgtatggggcgcaatttcagcggatattacacaggcaaacagccgtttacccaatggtgagcacaaacagggacaatctgtccggtttttatatgccaaatcactgaacgaactgggaacaaactttcagctgatgggataccgttattccaccaaagggtattacacattaagcgaaaccagttataaacagatgagcggctataatatcaaaactcaggatggccctgagtttaaagacgctgaaattattgattatcataacctctattataccaaaaaagggcagtatcaaatcaatatcagccagcagtttgatggttacggctcggtgtatattaccggtagtcatcagacttactggggaaccagtgaaactgatcagtcatttcagctgggttttaacggcaaccgggaagatatcacctatggtgtgaactggtcacaaaataaatcggtcggattggcagataaagataagcggattgcctttaatatttcggtaccgctgagccgctggttcggcggcggggatgctgcggatattaccggatcccggaataatatttattccacgtatacgctgacaagggatgataagaataaagtctctcagcagctcgggatttcaggaacgttacttgaggataataaccttaattataacgttcagcagggctatgccaataaaggtgaaggggcatccggcagcgcgtcggttaattatcagggcggatacggcgaggctggtgccggttataactacggcagaaactggcagcaggtgacttatacggtccgcggtggtgttctggcacatcagaatggtattacattaagtcagccgctcggccagaccaatatattggttgaagctccgggtgttaaagatacctctgttgaaaatgcgaccggtgttttcaccgactggcgcggctatgccgttattccgaatgccaccgcttaccggaataaccgggttgcactggatgttacctcattaccggataatgccgaactggataatgctgttgattatgtggttccggtacagggcgctattgttaaagcaaattttaaatcccgtatcggcctgaaagccatggtgacactgttacagaaaaacggaaaagtggtaccgttcggggcaatagttaccgatgaacataccggtaaagcaaatattgtcggtgacgatggtgtcgcatttatgtcaggtctgccggaaaaaggaaaactgaatattgtctggggaaatggggctgattcacaatgcacggctgaatatcatttaacggccggaaataatatcccgatcagcaatatcagtgcccgctgtttataa

SEQ ID NO: 275612 - DNA, 702 bp, Morganella morganii
atgtacaggtcagcatttaatatgagaaaaatactattttcttttatcatcgtattcctttttccggcagtggcatcggcaggcggaattgcactgggtgcaacccgtattatttacccgatggaggcaaagcaggtgtctctggcggtaacgaatacagatgaaaaaaatcgctttctgattcagtcctggatagatgatgcttcagataaaaaaacaaaaatattcacagtgactccccctttgtttgtcagcaaaccaaagagtgaaaatacaataaaaatcattaatacaggtgctgagttacccaaagacagagagagtttattctggctgaacagtaaagcgataccgtccgttgagcgtgaacaggttgcagataaaaacgtcctgcaaattgccgttctggccaggatcaaaatgtttgtccgcccggcaggcttaccggtgaaagcaggcgacgcttataaaatgctgaagttcagcagagtcagcggcggaataaatgtgattaacccgtcaccgtattacctgaccgttgttaatatgacgattgccaatcagaaaattgagagttttatggttgcaccattcgctgaaaaaatagttaatacagcacaaccagctgccggcggaatatcatatcagacaattaatgactatggtgctaatacgccggtaattaacgttaattcatattaa

SEQ ID NO: 275613 - DNA, 543 bp, Morganella morganii
atgcataaattaatcagcacggtatttttattgtgcggtatttctgccggtgcctatgccggaaataaaacgcataccattattgacgggggtatggtgcatttaagaggcgggctggtggaagccggatgtaccctttcaacaaacaatgaaaatgatgttattgatatgggggaattcagaacaaatcagtttaagggaaccggcagttattcagacaatattccgtttaagctggtaataaccaattgcagcacagcggtaagcagcaaagtcgggctttctgtctttggttatattaatgagaaagatccgcaaataattaaacttgaagacagtgatgaaacggctaaaggcgtgggagtagccattctggataatgatggcggtattattattcctgacaacataccctcaaaatggatcaactttcacgaaggtgaaaacgtattacattttaatgccagatacagagcaacggatatgcaggtaaccggtggaaaagccaatgcatcagtatggttccatttaacatataaataa

SEQ ID NO: 275614 - DNA, 561 bp, Morganella morganii
atgttgaataaacaacgtttagttatgtctgtggttgctctcgccgtattatccgcaagtcagttaagtatggcggcaacaacggttaccggcggtactgttcactttaccggacgaattgtgaatgccgcgtgtgctgtcagcgctgactctactgatcagacggttaatatggggcagtaccgcactgcattctttaatgccaaggggaaaaaatccggtgatgtaccgttttctattaaattagaagactgtgataccagtgtatccaccaaggcgtccgtttcattctccggattatcttccgcagatgacccgactgcattgcagaccagtaatatcagcggtggttcagccggtgcggcgaaaggtgtcggtattcagattgctgatcacctggggaaagtggtgaaaccggatggttctgttttttcaaccgcacagaacttagtggatggcgtgaacgttctgaatttctccgcaaattatatttcaactcaagccacggtaacaccgggcggtgcggatgcggatgccacttttacaatgcagtatcaataa

SEQ ID NO: 275615 - DNA, 318 bp, Morganella morganii
atgcaatcactagatactgtgcgattttttgtcgaatatgacgccaataagtatttgggagccttgttacgtctgagaagaaaagaactgggcataagtggtcaggaattatccggaatgctgaatatcagtcagcagcaaatatcccgttatgagaacggattaactaatttcaatatcgttatccttttccgttttttttcctcattaggaatgacatcagaagaggttgtcagaatttttaaagaactgggactgttctattctgatttaaatatgagtcaatatcagaaattaagaataaaggagggaaactaa

SEQ ID NO: 275616 - DNA, 333 bp, Morganella morganii
atggaacgcatcatcattccgactaactacattcatgtccggagcaccccgctctggaccaaagaaaccgcaccaaaatctatctggcaaagacatctggataaaggcacccgtcagggcgtttatcctaaactgtctgttatgcagggcacgattgtctactattcctatgcggatgaaaccagccctgaaccaacagacaccctggtgatcgaagccgggcagttcggtgtctttccgccggaaacctggcaccggatagaagcggttactgacgatactgtgtttaatgtcgatttttatgtcgccccagagatcctgaccgaggagtag

SEQ ID NO: 275617 - DNA, 342 bp, Morganella morganii
atgaacgacgaaaacaaaggctttttattagagctgataaatgaaagtaacggcctgaaagcggagaaactctttctgaatccgaaaaagttatatatccctgagattgcagcggaggaaattgcgttgctggtcagtgaattagacggcaaagaaaagattaatgatgcggcactggtggtcaccatgaccaataaaaataatggtgtgtcagtggataaagacgtggattctgctgctgaattagccgatgctgaaaacgcggcgcaaatcgtcaaggatcttattaatattatccgcggctacgatatggatgaagaaaccaatatctgcggatggtaa

SEQ ID NO: 275618 - DNA, 282 bp, Morganella morganii
atggatattcgtgaagatgaaaccagtttttatattctttctgaggacggcaaaagccggatagcggaaatcacctttgtgtataccggggataatctggcaattattgaccatactatggtggatgacagcctgcgcgggcagaaagtcggtaataaactggttgcggcggtggtggagaaaatgcgccgtgaacagcggaaaattattccgctctgtccgtttgccaaaagcgtatttgataaaacccgtgagtatgacgatatccgtcacgccggataa

SEQ ID NO: 275619 - DNA, 933 bp, Morganella morganii
atggatgtcatcagtattatcatttcagcgggtaaatcctccgttgatgtcgcgctttataccttattaccgattatggtcgtgatgctgatcataatgaaatacctttctgtcagaggcgtgctggatgtgatagtccgctggctggcacctttactcaaaccgttcggcttaaccgggatgagtgcattcgcgctgatccagataaactttgtcagttttgcagcaccgctggcaacactcgcgattatggataagcggggtgtgtctgatcgccacatggccgccaccctggcgatgtgttttgccatgggacaggggaatgtgttttatccgctgatgccgttcgggctgcactggacaacctccattattatctcggttgcagggggattgtgtgccgcagcctttacctggtatgtcaccggccgccggttatccgcaacagagaccgcaagctcagagccgctgccggatgcggagcagaataatcagggaattttgtcggttatcaacagcgcgggggcggatgctatccgtctggcactcggggctatcccgatgcttatcctgtcattatccattgtcggattaatgcaggccgccggggtgattgaatggctgcaccatattctgatgccggtactgaattttatgcatattccggacagttttgtactgcccgccctggtgaaatgtgtagccgggggaaccgcctatttcggggtgatatctgacctggtacagcagggtgcggtaaccgccaatcagattaatgcgtctgccggtttactcatccagacatttgatttaccggggattggaatttttctcggtatcagttcgcggtttgtccgcttattccgttatgtgatcccggcagcactgatcggtattctcatccgcacggttttgcatatagtattattttaa

SEQ ID NO: 275620 - DNA, 696 bp, Morganella morganii
ttggttaccggaccttttattaatgccgccgccgtattaatcggcggaattgctggggcagggctgagccaccggctgccggaacgtatccggacatccatgccctctgtattcggcctggcctcgctcgccatcggggtgttgctgattataaaatgtgccaatatgccggtgatggtattgtcggtactgctgggggcggttatcggtgaactgtgttgcctggaaaataaaattaatgcggtggccggtaaaataaagacccggcttccggcacggggcggggctcaggaaagttttatcgaaaactatgtggtgctgatattcctgttctgtgtcagcggtaccggaattttcggggcgatgcatgaaggcatgaccggtgatccgaccgttctgctgaccaaggcttttatggattttttcaccgcgatgatatttgcctgctcactgggtattgcggtgtcggttattgccgcaccgatgctgattattcagctggcactggcgggcagcggtgcgttattaatgccgtttaccacacaggccatgatggcggattttactgcggcgggcggggtattattaatcgcgaccggacttcggatctgcggtattaaaatgtttgcggtgattaacctgcttccggcactggtactggtgatgccgctgtcgctgctctggtcatctttctga

SEQ ID NO: 275621 - DNA, 228 bp, Morganella morganii
atgaatacgctggaattagatacccgcgggcacctgtgcccctttccgttaattgaagcaaaaaaagccattgaaacattagcgaccggtgatgtactggtcatcaaatacgattgcgctcaggcgacggaaaatattccgcgctgggcggcagaagccggccatgaagttactgattttgaacaaatcggtgatgcgcaatggcggatggaaattaaaaaagggtaa

SEQ ID NO: 275622 - DNA, 1041 bp, Morganella morganii
atgataagtttatctcatctatccggtttattcttaggggtattactgggttttgttatgcagcgcggccgcttttgtttagccggtggtttgcgcgatctctatctcttccgcgacagcagaatgctgattgctattctgattgtcatctctgtccagagtatcggactcttcattttttcttatttcggtattgcaaaaatccccggaggcacatttccctggctggcaactctggccggcggattactttttggcatggggatggcatttgccgggtcctgctcaaccggtgcttattaccgggctgcggaaggattggcaggcagcattacagccgtcggcggttttattattgccagctggtttatccgtcagtctgccgtaaaacaggtcttttctccggttaccacaccgaagctggattccccgactatcacacaatcactgaatatcccgccgtatatcgcgattattgttttggtgctgctgacggtttttctggtgaatcgtcacctgaataaatacaaatctgttcacattcccaaaatgaaagcccggaaaaccggggtcgctcacctgctgttcgaagcccgctggcatccgtttgtttctgccctgattattggtgtcatcgctctgctggcctggccttcaagcctggcggacggacgtgtcggcgggttagggatcagcggcccgagcgcacaattattttcactggtgacggccggcgacctgaaattctttaactgggcgggttatctgctgatcgggatttttgccggggcgtttatcgccgcaaaaggcagccgggaatttcgtttccgcaacccgggttttcccgtgatgataaaaagcctgaccggcggattactcatgggtatcggcagcggcctggccggcggctgtatgctggggaataccttagtcaatacggcctggttctcctggcagggctgggcatttattccctgcattatcgccggcagctggattgtcagttattttacgatcatacgtcctcagaaaataaagtaa

SEQ ID NO: 275623 - DNA, 2169 bp, Morganella morganii
atgaataaagtcatatctgtatgcccgtattgtggtgccggttgtaaactgaatctttgtgttgaaaacggaaaaataatcaaagcagaaggtgctgatggtgttaccaaccaggggcagctgtgtctgaaagggttatatggctgggattttcttaatgataataagttactgacagccagaataaatcagccgatgatccgcagagaaaaaggtgcaccgtttgaagttgtcagctggcgggaggcgattaattataccgctcaccggctgaaacagatcaaagaaaagtacggtgcaaaatccattatgtgtacgggctcctcacgcggaaccggcaatgaaaccaactttgtgatgcagaaatttgcccgtgcagtattgggtaacaacaatgtggattgctgtgcccgggtgtgtcacggcccgtcagtggccggattacaggtgacattgggtaacggggcaatgagcaattccatcgcggatattgaacactccggttgcctgctggtattcgggtataactgtgcggattctcatcctattgtcgcccgccgggtgataaaagcaaaagagaacggcgcggaaattattgtctgcgacccgagaaaaatagaaacagctaaaattgccacacaataccttcctctgcggaacggtaccaatatggcgctggttaatgcgttcgcctataccttaatcgatgaaaatctgtatgacaaagattatgtcagccggtttacagagggatttgaggagtacaaaaaagccgttcaggattacagccctgaggtggttcaggatattaccggcattccggcctcacaaatccgtcaggcgatgagaacctacgcgcgtgcaaaaaccgcaaccattatgtgggggatgggggtgacacaattcgggcaggcggtggatgttgtcaaaggcctttccggactggcgttattaaccggcaatctgggaaaacccggtgtgggggttgcaccggtcagagggcagaataatgttcagggtgcctgtgatatgggggtactgcctaatatgttccccggctatcagaatgtgacagatgaaaatgtcagacgtaaatttgcgcaggcatgggggatcccgtatgaatcccttgacccggaggcgggctaccgtattacggaagtcccgcatctggccattgagggaaaggtaaaagcctattacatcatgggggaggatccgctgcagacagaagcggatttacaactcgtccgtaacgggtttgatgccctggaatttgtggtggtgcaggatatctttatgaccaaaacagcggaacaggccgatgttattctgccgtcaaccagctggggtgagcacggcggtatctttacctgcgctgacaggggctttcagcggtttgagaaagccattgaaccacagggaaatgtaaaacgggactgggaaattatcagtctgctggcgacagagatgggatacccgatgtcttatactgacaacaaagagatttgggatgaagtcagagagctgtgtccgctgttttacggtgtaacctatgaaaaactggaaggattggctcatattcagtggccgtgtccgtcagaagatcatccggggaccccctatctgtatcagaataatgcctttgataccccgtcaggcaaagggctgctgtttgccgcaccgtggcggaagccggcggaactgccggatgatgaatatccgctgatcctttccactgtccgtgaggtcgggcattattcatgccgttctatgaccggtaactgtaaggcgctggcatctctggctgacgaaccgggatatgtgcagatgcatccggaaaccgctggaaagctgggaattaaagaccaggatattgtgtgggtggagtcacgcagagggaaagtgatgtcccggtgcagtatcaatgaaacgattaataaaccagcggtttatatgacatatcagtggtggattggtgcctgtaatgagctgacacaggataatctggatccggtatccaaaacaccggaaactaaatactgtgcggcgagagtgatcagaattgatgagcagaaagaggccgaagctctcgtcaaagaaaaatatgctgtcatgcggaaccggttaatcggtttggttgaaacagcagaaagccagattcaataa

SEQ ID NO: 275624 - DNA, 342 bp, Morganella morganii
atgaaaaaactaatcattgttggtgcaattgttgctgctatgaccagtgccttcgctatggctgccgatagtaccggcccgaaacacgatgttacgcaaaaaccggtatcacaatggacctgtgacgattttctctctattgatgaaagtttctatccgacagctgtcggtatagccgggattatcacaggtaaaaataaggttgaagattccactatcgatgttcaggggattatgaccgcaactccggcaattattgaatcatgcaaaaaagatccaaaatcctcttttttacaaagagttgaagaatttggtaaatcatactcacaaatatccggctga

SEQ ID NO: 275625 - DNA, 951 bp, Morganella morganii
atgaaaatcaccctccccaaaactgccgtcgctttttttctggcaatatggattatactgccctggattgccggaattatggccggtcaatccacattcgggagcctgatggctttcggcgcttatttactggttgtttcctttccggttcttcctttgcaatgctcactacttttcctgctgcgcggggcgggtattatttctcttttcgctgttttggggttcagtgtcacattcggcagtgtgtcattttttatttacgcggtactttgtgcatttcttcaggctgttgcggaactgcgtggttcatacctgcgcctgcccgttgcattaggtgtgctggcttattttctttccgtgggacaaatccctgaacagggggtcacattctgcagcgctgcatttactgccgggacattctggggtgttcttccggccgctcttctattaccacgcaataataaaccgccggtggtacagccggttgatatacatcagccaccggtaaaacgatttacggtcgttatgatgctgacagctctggttgacagcatactggcaacgctgatgacagccagctctcatccgtgctggttacccgccgccggtttacgggtgatgaaaccggaacgttcggctactttgtcccggttacatgccagaagtgccggaactgtaaccggtgccgctgcaggcgggattttactgggtttttatacgactccgctgctgcatgcttctctcgtcggaatgttattattcgtgatgctgatggtcggcgcaaaacgatatggttactggacattttgtctgacagctatcgcactgacatttaatttaacgcccggtgcaggttctctttctctggcgacagaccgggtattactgacggttattgcgcttgctattggtgtatttatgctccgtttattacctgaaaaaacggattag

SEQ ID NO: 275626 - DNA, 330 bp, Morganella morganii
atgtttgtgtttgaagggcgtgaaatcgccactgacccccacggctatttactcaatgtgcaggactggcaggaagcaatggtgccgctgctggctgaacaggaagaaattaccctgacagaacagcactgggaagttatccgctttgtgcgggatttttatctggaatttaatacctcaccggctatccgcatgctggtgaaagccatcacacagaagtatggcgaagagcgcgggaacagccgttatctgtaccgcctgtttccgaaaggccctgccaaacaggcaacaaaactggccggtctgccgaaaccggtgaaatgtatctga

SEQ ID NO: 275627 - DNA, 279 bp, Morganella morganii
atgaagatcggacgacattttgccgtatacggacgcgttcagggcgttggtttccgctatcaaacgttttactgggcaaaacgccataatgtgaccggttttgtccgcaatcgtcaggatggcagtgtggaaattgaggcgtatggcgatgaaagtgtgctggaggcgatgactgcatggctggaggcgggcgggccgccgggggcgaaagtgacagatattatcgcaaccccctgtgattacagggaagttgcggtattccgtgtccgccacgaataa

SEQ ID NO: 275628 - DNA, 321 bp, Morganella morganii
atgatgatttcaagtaaattcggtatcggacaacaagttcgccataagctgcttggctacctgggcgtgattgtcgacattgatgctgaatactcactggatcagccggaagaggacgacatcgcatccaatatgaacctgcgctctgcgccctggtaccacgtcgtgatggaagacgataacggtgagcctatccatagctatctggcagaagcccagatcacctatgagatggatgaagaccaccccgataacatcactatggatgagctggctgagtccatccgcaaccagttacagtctccccggttgcgcaattaa

SEQ ID NO: 275629 - DNA, 414 bp, Morganella morganii
atgaatgacacatttctgaccggtattcttcagcaggtaaaaacgattgccgtggcgggggcgagtgataaaccggaccgccctgtttatcatgtgatggagtatctgctgggacagggataccgggtgattccggtgaatccgaaactggcaggaaaaaccctgatcgggcagatggtgtatgccacgcttgccgatattccggagccggtggatatggtggatgttttccgtaacgcggatgccgcaccgggcattgcgcaggaagcgattgccataaaagcgaaagtgctgtggctgcagcaggggattaccagcagtgaggcgaaagcgctggcggaaaacgccgggttgctgtttgttgaggatcgctgcccgaaaattgagatcccgcgtctggggctggaaaagtaa

SEQ ID NO: 275630 - DNA, 459 bp, Morganella morganii
atggaatcgaccacccgagtactgaccaagcataaaaaaattgcccttgtggctcatgatcactataaaaccaaattactggactgggttaaacgcaatctggctaaattagaaagccatgaactgttcgccaccggcaccaccggcaaactgatcagccgtgaaaccgggcttgaaatcaccggcatgctgagcgggccgatgggcggggatcagcagataggctcgatgattgcggaagggaaaattgatgtgctgatttttttctgggatccgctcaatgccgtgcctcatgaccctgatgtgaaagcgctgctgcgcctggcgaccgtctggaatatcccggtggcgaccaatatgtccaccgccgactttattattcactcgccggatttcgataacgatgtggatattgttattccggattacaaccgctatttaaatgagcggactcagtaa

SEQ ID NO: 275631 - DNA, 2055 bp, Morganella morganii
atggaattaaaatcaacacaaatggggcagacactggcccggcatccttacaaccgcgtgcggttacttaacgcaggtatcgaagtcagcggggcaaaacaccggtatgttattcctttcaatgagttaatcaatattcaatgtaaacgcggtatcgtctggggtgagctggaatttgaactgccggatgagcaggttgtgcgtctgcacggtacccagtggcaggaaactcaggaattctatcagtatcttaccgatatctggtcacgctggagtgaagaaatgagcgtggtcagcgcgggtgtgctggataaacaggtcagtgaaattaagtcggtgattcaggccgaccactggctgacacaaccggatagtcagaaactccgtgacaacattctgcacgcctttgcggcactgccgctgccccgtgcgcgtctggccggttttgacaactgtgcacagtcttatcagttttgtctggactggctcagccacaccgatgaaaaacgccgtcagcgtaaccgcgaatggacacaacaatgccttgaaacgtatgcggatttctttgccggtgtggaatcctccccgctgaatacctcgcagagtgaggcggtggtcaacggtgaaccttctgtgctggtactggcgggagccgggagcggtaaaacatcggtgctggtggcacgggcaggctggctgctgcgccgtcagcaggcgctgccggagcagatcctgatgctcgccttcgggcggcaggcggcggatgagatgaatgaacggatccgcacctgtctgcacacagaagatatccgcagtaaaacctttcacgccctcgcactgcatattatccgcgaagcatccaataaatcgccggttatcagtgcgctggaaagtgacacagccgcccgtcatgaactgattaaatccgtctggcagactcagtgccgtgagaaaaaagcacaggcaaaaggctggcgcgaacttatcagcggcagtatgaactggctggtggatgagggggaatactgggaagatgaaaccctgtgccgccgcatggtgccgagaattgaccgctggctgagcctgatgcgcatgaacggcggcagtcagaaagtgatgattgagtccgcaccgccggatatcgcaccggaattcacaaaacaaatcaaactgatggcgccgtttttaaaagcctggaaaagtgccctgaaagaagagggggcgacagacttctccgggcttatccatcaggcggtgaatctgattgaaaaaggtcgctttatctcgccgtggaaagcggtgctggtggatgagttccaggatatctcaccgctgcgggcaaaacttatccacgccctgcgggcccagaacccgcagaccacactgtttgctgtcggtgatgactggcaggcgatttaccgtttcagcggtgcggaactgacactgaccacggatttcagcgcggtcttcggcgagggcggtcagtgtgcactggacaccacataccgttttaacagccgtatcggggagatcgccaacgaatttattcagcgtaacccgcagcagttaaccaaacccctgaacagcctgacaaaaggggataaaaaagcggtgctgttactgccggatagacagctggaagcattgctgaataaaatgagcggttatgtgaccggagaagaaacggttctgatcctggcgcgctatcaccaccttaaaccggagattctgtcggtggcggcaacccgctggccgcatctcaatatccgttttatgaccatgcatgcctcgaaaggtcagcaggcggattacgtcattatcaccggactgacggatgaacgggacggtttcccggctgcggcacgggaatcggtgattgagcagggattactgccgcgggaagaggaatttatacatgccgaggagcgccgcctgatgtatgtggcgctcacccgggcgaaaaaacaggtctggctgctgtatgacaaagactcgccgtcctgctttgcggaagaattggcggatatgggtgtcagccgggtgaaaaagccctga

SEQ ID NO: 275632 - DNA, 2217 bp, Morganella morganii
gtgcttgcagcgtttctcggcttcagccggtatatttataacagccattttctttattatttccgcatcctgattgcgctgacaggtaccacactggtgccgtggctgctgcacatgccgccgaaagtcaccattgccctgacactcgggatggtagccgccgcactgacagacctggatgaccggctcgccgggcgtctgcgtaatctgtttatcacgctgatatctttctttgtcgcatctgcggccattgaactgctgtatgaccaccacctcctgtttatggcaggtcttgcggtatcaaccagcgggtttatccttctgggtgccctcgggcagcgttatgccaccattgctttcggggcactgctgatcgcgatttacaccatgctgggaaaaaacctgtttgatgactggtatcagcaaccactgttactgctgaccggcgcagtctggtataacctgctgaccctgaccgggcacctgtttttccctgtccgtccgctgcaggataatctggcccgctattatatgcagctctccaattacctggaggcaaaagcaaatctgtttgacccggatatcgaagaagattatcagcaatccgtctttgaactggcgatggcgaacagcgcactgacggaagctatgcatcaggcaaaaatgacactgttttcccgcctgaaaggtgatcgcggccagcgcagtacccgccatgcccttcattattactttgtcgcccaggatattcacgagcgggcgagttcgtctcatatccagtatcagaatttaagcaatgaactgcgttacagcgatattatgttccgctttcagcggctgatgaccatgcagggacacgcctgcgccgctgttgcgcaggccattttgcagcgccgcaaatatcaccataacccgcgttttgagcggacattttcttatctggaaaactccctcaacctgctggagcagcaaaagcccggcaacagcagtgtgatggctctgcgccatctgctgaccaacctgcgcggtgtcgattcccagcttaaaggactgaccgcagagcagactcagcttccggcggaaaagatgcaggaagatgcgcggctgtccaacgaaaacctgcagggattgcgtgatatctgggcgcgtgtccggcagaacctgacaccgcgctctgccctgttccgccatgctatccggatgtcactgctgctgtgtgccggctatgccattatcctgaccttcgatctgacccgcggttactggattatgctgaccagcctgtttgtctgccagccgaactacagtgccacacggcgccgcctgatgctgcgtatagtggggacactcgccgggatccttatcggcctgccgatcatgtattttgtgccgtcttatgagggacagcttattctgatggtgctgtccgggctgatgttctttgtgttccgcaccagtcagtacgcccaggccaccatttttatcaccctgctggtgctgttcagttttaacctgctgggtgaagggtttgatatcgccattcaccgtattattgataccctgatcggttgcggactcgcctggtttgctgtcagttatatctggccggactggaaataccgtcagctgccgctggtgattgaccgcaccatgcaggcaaacggccgttatctggagcaaatcctgcagcagtattacaacggtaaaactgacagcctggagtaccgggttgcccgccgtgatgcgcatatcagcgacggggagtttgcctctgtggtagcgaacatatcctcagagccgagcagttaccgcacatcgcaggatgaggcgttccgcctgctctgtctcaaccacacgctgctcagttatatttccgcgctcggggcccaccgcaccaaactcacggatgacactattctgcgtctgctgaatgatgccatccgctatatcgagaccgcactgcaaaaagggcaccgggaagatttgcagattcaggctatttcagatgcgctcgcacagcgcctggataaatgtacctgtgacaataacagcaccgagcagctggtgctggagcagatccgcctgttactcagcctgacaccggacattaccgggcttatccggcagatcaatgataaagagcataatctgcagccttccgccgggcggttccgccgcaaaaaacagactgcggcggaagaaacaccggacagctga

SEQ ID NO: 275633 - DNA, 612 bp, Morganella morganii
atgaaggattatttgaaattgtcagatgttcagtttgatcgtcttcaacacagcacacagccgttcggccggatccgcctgaagtcacagttcgggtgtatgggattatccattgaccgggtcactttcgcactgatagccaacagtcagctctggctgaaaagcacagaggccacccgcgagctgttctgtcgtctggaactgagtgaccggtttacttatcccaaacggatcctgccgatgcggattaattattaccgtgttccggatgcggtatggcagtgccctcagcagtgtgagttccttttttaccagacctacctgcatgcacgggaacatgcacagtcacagcagcaactgccgtcgcggattaaagatctgccgaatgtggacagagctctggaacgccgcttatggcaggcggggatccgccgcgtggatgacctctatttgctgggtgccaaagcgagctttctgaaggtcaaagcccggccgcagaatgagctgaaattgctgtttgccatcgcgggagccattgaggggtgccacagtgcggtattaccgaaagcactgcgggaggatcttatccactggcacggacggctgaactaa

SEQ ID NO: 275634 - DNA, 507 bp, Morganella morganii
atgcgccagcaggcaacccgggaatacgtccctgttacaccggcatctgtgtcacccgcccttgcggaggaacgccgtctgaacggaatggtcagcgaactggtttatcgcaataatgatatcgtcctgacccacattctgcttcctttattacgtcagcttgccggggagtcccgctggctgttatggctctcaccgggtgcaaaacttaaccgcacctggttatcgcagaatcagctgccgggtgataaaatcatgcagttgtcccgtatcccggcaatcaacagtgttgccgctatggagaaagcactcgccagcggtaactacagtgtggttctgggctggttgccggtactgactgagcaggaaaatgcccggttacagcgcgctgcggaacagggcggctgcctcggttttattatgcgtccgcaggagtggcatcatgacaatgcacctgttgcacgacaactgaatacattacaaattcactctttcccttatcattaa

SEQ ID NO: 275635 - DNA, 1059 bp, Morganella morganii
atgaaaaagacagctatcgcagtagcagtggcagtggcagctttcgcaagcgttgcgcaggcagctccaaaagacaatacctggtataccggtggtaaattaggttggtctcagtatcagaattccggtagcactatcggtaacactggtcctactcataaagatcagctcggtgcaggtctgtatgctggttatcagcacaaccagtacatgggctttgaattaggttatgactggttaggtcgtatgccttacaaaggtgacggcaacaacggtgcattcaaagcacaaggcgttcagctgaccaccaaactgagctatcctgtaatggatgacttagacgtttatacccgtctgggtgcaatggtatggcgtgcagacgcgaccgcatctatcgatagtaagcgttccaaagacaacgacaccggtgtttcaccagtattcgcactgggtactgagtatgcaatcacccgtgatatcgcagctcgcgtagaatatcagtggatcaacaacatcggcgataaagaaaccactatggcacgtcctgataacggcatgctgagtgttggtgttgcttaccgtttcggccaggatgaagttgctgcaccagttgcagaaccagctccggttgttgcaccagttgttgagaacaaacgtttcaccctgcgttcagacgttctgttcaacttcaacaaatctactctgaaagctgaaggtcaggaagctctgaaccagctgttcaacgaactggcgtcaatcgatccgactcagggcaacgtcctggttatcggttacactgaccgcatcggttcccagaactacaacctgccactgtctcagaaacgtgcacagagcgttgtagattacctggtcgctaaaggcatcccggccggcagcatccgtgcagaaggccgcggtaaagaagatcctgttactggcaacaaatgtgacaatatcaaacagcgcgctgctctgatcgaatgtctggcaccagaccgtcgtgttgaaatcgaaatccagggtgtaactgaacaagtctctcagcaggctgctcagtaa

SEQ ID NO: 275636 - DNA, 459 bp, Morganella morganii
atgaaatatcagcaactagagaatcttgaatgtggctggaagtgggcatatctggtcaaaaaacaccgcgaaggtgaggaaattacccgttataaggaaaaaagccgggctgaggaagcggtggcgcagttactgaaactggagtcacatccggtgaaagtgacggcgtggatacaaaaacatatggcaccgggactggcgaaccggatgagtcagactatccgcgcacggcgcaagcggcattttaatgctgagcagcagcatacccgcaaaaaatcggttgatctggagtttctggtctggcagcggctgtcggcgttatcacagcggcgcggcagtaccttatcggacacgattgtgcagttgctggaagatgctgagcgcaaagaaaagtatgctacgaagatgacatcgctgaaggaagatctgcaaagcctgctgggaacagacaaaaaataa

SEQ ID NO: 275637 - DNA, 1746 bp, Morganella morganii
gtgaatattaaacagctgacctggcaggcattactgcctgatgaaaacagttaccacaccatcctgcaaaccgcttctgaactgcctgctcagcaggctgatatcgtgcagccgcgcttacaggaaagcctgtcacttttcagtcatccggcggcaaagcgccgttttatgctggtcaaaagtgacgaaagcgagtgttacctgaataccatagcgcaattactgccgccggaagtcagaacccggcaaaagcgcactatgggcggtgaataccatttcgataatcacaggtttgtctttacaccatcggataacggccatttcagtgcggtgcagccgtttgctgtctgtgactggacagagccggagcagctgttcggccaggtctatacccatcatcagcatgtgcagttgcagcccggtattattcatcaggttaatggcggctttctgatcatgtcactgcgcagcctgctcgcacagccgctgatgtggctgcgtttaaagcagatggtctgcgcacaacgctttgactggctggcacacaccgaacagcatccgctgccgttcccggttgacagcatgccgctcgacctgcgggtcatcgtggtgggcgatcgtctgagtctggatgagtttatgctctccgagccggaactgagcgaagaagcactgtacggcgaatatgaatttgattgtcagctggaagaaacagaacagctgaccgtctggtgtcagtttgtcaacgggctgctgaagcaaaatcagctgccgccgctcagtgctgacggctggtatgagctgctccgtcaggggatgcgttttcaggaagataaaaggaccctgccgctcgacctgacatggctgaccactctgctgcgcgatgccgccaccctgctgcctgcggacaccatcaccgcagaagcgctgcgcaaaatcaaagacaaccgcagctggcgccacggctatctggccgatcgcgggctggatgagattcttcagggtcaggtgtatatccagactcagggcagtgctgtcggccagatcaacggactgtccgttctgcagtatccgggacacccggaagcgaccggagagccctcccgtatcacctgtgtggcacatatcggtgatggtgaatttgttgatgtggagcgcaaatcagagcttggcggtaatattcacgccaagggtatgatgattatgcaggcttacctgattgcggagcttaaactggagcagccgttcccgttctccacctccgtggtctttgaacagtcctacggcgaagtggatggtgacagcgcctctctggctgagctgtgcgcacttatcagtgccctctcctggcagccggttgaccagcagattgccgtgaccggttctgttgaccagttcgggtttgtgcaggccatcggcggcgtaaatgaaaaaatcgaaggtttcttccggctgtgtcaggccagagggctgaccggcaaacaaggtgtgattatcccggcctccaacgagcgtcacctggtcctgtcagatgatgtggttgaagcggtacgtcagggtgaattccacatatggacagcaagccacgtctctcaggcggcctcacacctgatgaatatgccgtactatgaagaggacggtaatccgtccggagaacacctgttagctataattcaggatcggattttcctggcgaacaatcaggataaaccaagaaattcgtggttttcccgctggtggaaatag

SEQ ID NO: 275638 - DNA, 519 bp, Morganella morganii
atggtcgcaaaacaagaatcctacacaaagcaagaacttgaagcctcaggacggggcgaactctttggtgaagacggaccgccgctgccatccggcaacatgctgatgatggatcgcgtcattaaaatgagcgaaaccggcgggcattttgataaaggctatatcgaagctgagctggatatcaaacctgagctgtggtttttcggttgccatttcgtcaatgatccggtcatgccgggctgtctgggcctggatgccatgtggcagttagtcggtttttatctcggctggctgggcggcgaagggaaaggccgtgcactgggtgtgggtgaagtgaaatttaccggccaggtactgccgacctcgaaaaaggtcacctaccgcatccacctcaagcgtgtgatcaaccgcaagctgatcatgggtatcggtgacggcgaagtctttgttgatgataagctgatttacaccgcaacagatctgaaagtgggtcttttcaaagacaccagtgcgttttaa

SEQ ID NO: 275639 - DNA, 168 bp, Morganella morganii
atgaaaagacaaaagcgtgatcgtttagccagagcattaaccaaaggttatcaggcgggtattttaggacgttctaaagagagttgcccgtatcttaaaattgacgaacgttctcattggttgggaggctggcgcgaggccatcgataaaagggcggtcattgcgtaa

SEQ ID NO: 275640 - DNA, 591 bp, Morganella morganii
atgaaaaaactgacaaaagcactggcattcctgggcgtttttgtactggcggggtgcagcagcaccccggtcaaacagtattatcagttacctgtggtggcggctgcggacagcagcagtgaacagacaagcttccgcagtaccggcagtgacaaccgccatccgcagttatggatccagcgtatcacgctcggggacgtgctggggaatgccgggattgtctatcagaccagtgatgtggaatacaacatcggcagcaccaatttatgggccggtccgctggagcagcaactgctgacggtgatgacggcggaactcagtcaggcactgccggacagactggtttcggtgcagccgctggaaaccaaaccggatactctgactgtcacggtcaccggttttcacggccgttatgatggcaaagtgattgtggcgggcagctggatttacacccacggtgacgcggttatccgccacccgtttaatctggtactggaacaggcagaaaacggctatccggcgctggtacgcacgctgggtgaaggctgggcgcaggtatcaaaatcggtggctgacgagctgcgtaagtaa

SEQ ID NO: 275641 - DNA, 1650 bp, Morganella morganii
ttgaacgataaaactgatgatttgacagaagcgaaggtcagcaaactgaaaagctggtcaccggtctggataattcccatcgtcacggtactgattggtgcctggatccttatcagccactttcgcggacagggaccggaaatcaccctgatcacctataacgcggaaggggtcgaagccggtaaaaccaaaatcaaaagccgcagcgtggatgtcggcgtggtcgaaagcgtcatgctggatcagagttacagccgcgtgatcatcaaggcccgcctgaacgcagagatgaaagacgttctgcgcaaagataccgttttctgggtggtgaaaccgacggtcggccgtgaaggggtctccgggctgggcacactgctttccggggcgtatatccaggtgcagcctgccaataccggcggcgaacgccatgaatttgaactgcttgattcaccgccgctggcgtctccggacgccaaagggatccgcgtgatattaaccagtcagcaggccggacaactgaatccgggggatgctgtgctgttccgtggctaccgtgtcggttccgtggaaacggccgagtttaatcttgatgagcgggaaatgcagtatgagctctttatcaacgcaccttatgacaaactggtgaccaccaacgcccgcttctggaaggacagcggcattgcctttgatatgtcctcgcagggcgtgagtgtgcaggtcggttcactctccacattgttcagcggcggtgtcagttttgatgtgccggacggctggcaaccgggtgaggaagtcaatcctaagaccctgtttaagctgtttgataaccagaagagcacacaaaactcactgtatacccagtataaaagttacctgctgttcttctctgactccgtgcgcggcctgtctccgggggcaccggtggaattccgcggtattcgtctcggtacggtggcacaggttccgttctacgccaaagggctggggcagacatttgatcaggatttccgtatcccggtgctgatccatatcgagcccgagcgtttcgagaaagatgtaggtaaagatttcaaactggcacaggaactggaaaccgcattacagcaggggctgcgcgcctcactgaaatccggtaacttactgaccggcgcactgtatgttgatctcgatttctacccggatcagccggcgtggaaagcaccgatgaaaattgcggattatgacattctgccgaccaccagcggcggcctggtacagttgcagcaaaaagtactggcggcgctggataaaatcaacggtatgccgattgaaccgatgatgaaacaggcgacagaaacactgcgtgccagcgaaaaaaccattgcggaagcacagaaaacactgtctgagctgaatgtgttactcagcagcaaagagttcaaagcgctgccgaaagacatgcaggccacgctgcgtgaactgaaccgcagtatgcagggtatccagccggggtcaccggcgtacaacaaactggttgatgatatgcagcgtctggatcaggttctgcgtgaattacagccggtactgcgtacccttaataacaagagcaatgctctggtctttgaagccgcgccgcaggcggatccgcaacctaagaaggcgaagaattaa

SEQ ID NO: 275642 - DNA, 1278 bp, Morganella morganii
gtgtgtgctcatcattcacatgattcagtcacggtgctgtgtccgcagtgcgacctggtggtggaaatccctgagctggaacggggaaccaaagctgagtgtccgcgctgccacacccacctagccgcccgctggcgtgaaccgcgccgccagccgctgatgtatgcactcagcggcctggtgatgtttgtgctcgccgggatgtttccgtttgtctcaatgaaagtggcgggtattgaaagcgaaatcacgctttatcagataccgtctgtgatgttcggggataactacggcgggctggcactgttctttatgggatttgtactggcggtaccggccttctgcctgtttgccattaccttactgtgcagcgggatccgtctgccgccttcgctggccattccggtcacgcggctgctgttcaggctgcgtgcatggtgtatggcggagattttcctcgccggtgtgctggtcagtttcgtgaaactgatggcatacggggatatcgggctgggcgtgagttttctgccttattgtctgttctgtgtgatgcaggtgcgggcattccagtgcctggataaacactgggtctggcaacggattgcaccgcgtcctccgctgccggtggcgctggaggcaggaaaaggcggtttgtgtcagggagtgcggctgtgcggtacctgtcaggcgattctgccggcagatatgcatgagtgtccgcgctgcagcagccggggtcatgcccggcggccgaacagtttacagctgaccatggcactgctgtttacctccgtgattttatatatcccggcaaacctgatgccgattatggttaccgaatccctcggcagtgatttcggctcgaccattatggccggggtgattttgctgtggggggatggctcttatccggtggcgatggtgatttttatcgccagtataatggtgccgagcctgaaaatgctggccatcggctggttgtgtctggatgccaaaggtcacggctggcgtgatcccggccggatgcactttatttatgaaatcgtggagtttgtcggacgctggtccatgattgatgtgtttgtgatagccgtactggcggcactggtgcggatggggcgtctgatgagcatctatccggatatcggtgtgattttatttgcgatggtggtcattctgacaatgattgccgccgaaatgttcgacccgcgtctgacgtgggatcggcttgaaaaaaaacgggcggagagtgctaaggagcctcaggttgaacgataa

SEQ ID NO: 275643 - DNA, 1920 bp, Morganella morganii
atgtcgttgattaatatggcgggcgcctggctcgcattcagtgatgctccgctgctggaaaatgcggagatgcatatcgaagaaaatgagcgtgtctgtctggtcggacgcaacggagcggggaaatccaccctgatgcgtgtgctgaccaaagagcagccgctggatgacggtacggttatctatgaacaggatctgattgttgcccgtctgcagcaggatccgccgcgtgatgtggaaggcaccgtgtttgactttgtcgccgaaggggtggcagagcaggcgcagcatatcaaggcattccatcagatctcaaaattagtggaaagtgacccgagtgataaaaatctgtcaaaaatggcggaactgcaggaaattttagacacgcagaacttatggctgctcgacagccggattgcggatgtgatcgcgcacctggaattaccggcggatgaaaaattatccgcactgtccggcggctggctgcgtaaagcggcactcggccgtgcactggtcagcgggccgaaagtgctgttcctggacgaaccgaccaaccacctggatatcgaaaccatccagtggctggaaggcttcctgaaaaacttcagcggcagcattgtctttatttcccatgaccgttcatttatccgcaatatggcgacacggattatcgatctggatcgcggtaaattagcctcctggccgggcagttatgatgattatctggtggccaaggaagaggcactgcgtgtcgaagagatgcagaatgcggaatttgaccgcaagctggcacaggaagaagtgtggatccgtcagggcatcaaagcccgccgcacccgtaatgaagggcgcgtccgtgccctgaaggctctgcgcagcgaacgcgcggaacgccgtgaggtgatgggcaaagcgaagatgcaggtggaagaggcgacccgctcgggcaaaatcgtctttgaaatcgatgacatcagctatggtattgatggtaaggatctggtcagccatttcagtgctcaggtaaaccggggggacaaaattgccctcgtcggcccgaacggctgcggtaaaaccacgctgctgaaactgatgctcggtgatttgcagccggacgacggcagtgtgcatatcggcaccaagctggaagtggcgtatttcgatcagcaccgtgcagcgctggatccggataaaaccgtgatggataacctggcggaaggcaaacaggaagtgctggttaacggcaaaccgcgccatgtgctcggctatttacaggaattcctgttccacccgaaacgggcaagaacaccggtgcgggccctgtccggcggggagcgtaaccgtctgctgctggcaagattgttcctgaaaccaagcaacctgctgatcctcgatgaaccgaccaacgaccttgatgtcgaaacactggaactgctggaagagctggtggataactatcagggcaccgtcctgctggtcagccatgaccgtcagtttgttgataattgcgtgaccgaatgctggatttttgaaggcaacggtaccatagggcgttatgtcggcggttattttgatgcacaacagcagcgcgcacaggttcagtcgctgaaagccccggcggaaaaagcagtaaaaccgcaggcggcggaagaaaaacgtaaagataacattaaaaaagcaaatacatctgcaaaattaagttataaattacagcgggaacttgaacaactgccgtcattgctggaatctctcgacgaggaaatacagcaactgcaaagtcaggtcagtgcgcctgaattctttaaccagccgcatgatgaaacagataaagtgctgaagctgctggcagagaaagagcatgcgctggaagaggcgtttgagcgctggcagacgctggaagcaatgcagagcgggaactga

SEQ ID NO: 275644 - DNA, 2118 bp, Morganella morganii
atgatgaacgcgtattttgccagcaccgcccgcgggctcgaagaactcttaaaaaatgaattagcgacactgggcgctgaggatctcagtattacgcagggtggcgttcacttccgggcgcagccgcgtacgatgtacacgtgtctgatgtggagtcgtctggcatcccgtattttattaccgctgaatgagtttaatgtctatagcgatatggatctttatctcgcggtacagtccgttgactggccgtcggtattctccgctgacaagacatttgccgtgcatttcaacgggactaacgatgagatccgtaacagccagtacggcgcactgaaagtcaaagatgctatcgtcgacagctttacccgcaaaaccggcacgcgcccggatgtggcgaaacagcagccggatatccgcatcaatgtctatctcaataaagaaaaagcctcgctggcgatcgacctgagcggggattccctgcatatccgcggctaccgtgaactggccggtcaggcgccgctgaaggagaacctggcggcggcgattattctgcgttccggctggcagaaagagaccccgatggtggatccgatgtgcggctccggcaccctgctgattgaagcggcaatgattgcctctgattgtgcaccgggcctgaaccgccaccactggggttttgaagcctggggcggccatgataaagcggtctgggaatctgtccgtgcagaagcgcgcgaacgcgctaatgccggtctggtcagcgcaaccgcgcgcttcttcggttctgataccgataaacgtgtgctggatatggcccgtgccaacgcccgccgcgccggggtggataaactgatcactttccagcagaaagatgccaccaaactggaaaatccgctgccggacggcccgaaaggcaccattatttccaacccgccgtacggcgagcgtctggaaagcgaaccggcgctgattgccctgcacagtgtgttcggccgtgtggtgaaaacccgtttcccgggctggcgtctgtcattattcagtgcttccccggaactgctcagcagcctgcagctgcgtgcggagcgtgaattcaaggcaaaaaacggtccgctggactgtgtgcagaaaaactatcagttaagtgacacaccaccggcaacggcgcaggatatcggggcggatttcgccaaccgtctgcgcaagaacgaaaagaaattagcaaaatgggcgaagcaggaaggtgttgaatgttatcgcctttatgatgcggatctgcctgagtataatgttgcggttgaccgctatgcggattatgtggtggtgcaggaatatgcgccgccgaaaaccgtggatccgaacaaagcgcgtcagcgcctgtttgatgtgatcagcgcaacactggccgtgctggagttaccggcgcacaagctgatcctgaaaacccgtcagcgccagaagggcaaacagcagtatgaaaaactggcggagaaacagaacagcttcctggtgaaagagtataacgcgcagttatgggttaacctgactgattacctggacaccggtctgttccttgaccaccgtattgcccgcaaaatgctgggacagatgagcaaaggcaaagacttcctcaatctgtttgcctacaccggctcggcaacggttcacgccggtctcggcggggcgcgcagcaccacgtctgtggatatgtcacgcacgtatctggagtgggcggaacgcaacctgcagagcaacggcctgagcggcagacagcatcgtttaattcaggcggattgcctgagctggctggcacagacgccggaacagtttgatctgatctttatcgatccgccgacgttctccaactccaaacggatggaggacacctttgatgtccagcgtgatcacatcgacctgatgaaacatctgaaacgtatgctgcgccgcggcggcaccctgatgttctccaacaacaaacgcggttttaaattagatcaggacggtatggatgctctggggctggttgctcaggagatcaccgccaaaacacagtcacaggattttgcccgtaaccgtcagatccataactgctggcttatccgccacgcaggcgaggaataa

SEQ ID NO: 275645 - DNA, 1125 bp, Morganella morganii
atgacgacaacacccatcacactctcccgtttatacacctttcctgtgaagtcaatgaagggcatccgccagtcgcagagccatgcaggggaaaccgggctgagctttgaccgtaattttatgataacggatgaaaccggaaaatttatcaccgcccgccgttatccgcagatggtgctgtttaccccggtgctgctgagtaacggaatttacctgcgcagcccggaaggcagcggtgccacgatactgtttgaggatttccgccctgaccacctgccgtgcgaagtctggggaaaccatttcacctcactgcttgcgccggaaaaaatcaatcagtggctgtgtcagttctttgatatcccggtacagctgcgctggctcagcccgcaatccacccgcagagtaaaaaaattcccggacactgcggtgtcgtttgccgacggttatccctatctggtggtcaatgaagcctctttccgtgaggtgcagcgccgctgcggtgccggtattaaaattgaacagttccgcggcaatattattgtcaccggtgcagagccgtttgcggaagaccgctggaaaaccattcaggtcggtgatgttgtgtttgatctgaaaaaaccgtgcagccgttgtattctcacgactgtcagtaccgataaagggattaaacacccggaaatggagccgttccacaccctgcaaaccttccggaaagccgcagataatgatgatgtggatttcggcatgaatgccattacccgcaacagcggtgtgattcaggtcggtgatgccgtcaccgtactggaaacccgcgagccgcgtcagtatcaggaacaggaagtggaaaaggtgcaggccgcgcccgcacaaccggaagcagcactggaactgacattcaacggtaaactctacccggtgaataatcagcacgtcttactggagcagctggaaggccatcaggtcaatattccgtattcctgccgtgccggtgtctgcggttgctgtaaagtcacgctggtctccggcgaagtgactccgctgaaagccggggcgataaaagagaacggcgatattctggcatgcagttgtattccgaaaaccaatattactattcgtcacgcataa

SEQ ID NO: 275646 - DNA, 546 bp, Morganella morganii
atgaaaataaaacctgacgatcaatggcagtggtattacgatgatacgcatgagcgtattatgctggatcttgccaacggaatggtattccgctcccattttgcaccacgcctgctggcgccgtacgcacggtgtcacagcccgttttctgttgatgatgccgcattattttttatctttgaagaacagattaagaaattagatattccggcacagcagtgtgctgaattaacactgaatgcgttaattgcatcgcgttttttaaagccgcaaatgccgaagagctggtatttctcattgttctgcgcaatgacaaaaccggagcaggggcagctggttgaagtggtggcggataacaatcgtcagcgcagcaactttattgtggcggaagcaggggacagtgccagtttatgtctgctggttgatccggtacttgaattacatgatcggagcatgtgtttttgtgatccgataaagatcatgaatgatcgtttattaccaagaaccccggtaacacggagtttattaatgggcagggctgtctga

SEQ ID NO: 275647 - DNA, 1011 bp, Morganella morganii
atgtattatccgctagtcaggaaggccctgttccgccttgatccggaacgcgcccacgaattcacctttcaccagcttaaacgtctttcccgctctcctttccgttttcttattcagcagcatgtcgccaccaaacccgttcagtgcatgggactctcttttaaaaacccgctcggattagccgccggtcttgataaagacggtgaatgtattgaggcatttgacgcaatgggttttggttttgttgaggtcggtacggtcacaccgaaaccacagccgggaaatgataagccgcgtctgttccgtattgtcgaagcagaagggttaattaaccggatgggttttaataacctcggggtggataacctggttgagaatattaaacaggcccgtttcggcggtattctgggaattaatatcggcaaaaataaagatacaccggtcgaacagggaaaggatgactatctgatttgtatggataaagtgtatacccacgctgggtatatcgctgttaacatctcctcaccgaatactccgggattacggacactgcaatacggcgatatgctggatgacctgttgtcagcaataaaaataaagcagcaggaactgcatcagaagcacgggaaatatgtgcctgttgccgtaaaaattgccccggatttaacagcggaagaattaattcaggtcgctgacagcctggtgcgccataatattgacggtgtgattgccaccaataccacattagaccgctcattagtgcagggattaaatcactgtaatgaaaccggcggattaagtggccgcccggtgcagagtaagagcaccgaaattatccgtttattatcgaaagagctgaacgggaaattaccaatcatcggtgtcggcggaatagattccctggttgccgcccgggaaaaaatggaagcgggtgcatctctgatccaaatctattcaggatttatctaccacgggcccaaattaattaaaaatattgtaaattgccagtaa

SEQ ID NO: 275648 - DNA, 1230 bp, Morganella morganii
atgagaaatgaaataaaccggtgcagtcgctggttacaggggatgttctccctgtttttgctgctttttgctgtgacggcatttgctcagacggagacatttccccgtatgcagggatcggtcaccgataccgccggattgctgaccgccggtgagcgcagcagtattgagcagaaactgaatgcactgcgcgagcggaccggtacgcagattgcggtactgacggtgaacactaccggctcgcgtgatattgaaagttatgcggaaaaagtctttaaccagtggcgccttggtcgtatcaatattgatgacggcattttattgctggtggcgtcagatgatcgcgcgatgcggattgaggtcggatacgggctggaaggggcggtgagtgatgcggtggcaaaccgtattctcaaggattatttcattccgaattttaaaataggaaattatgccggtggtattaatgataccgtcgatgcgctgattgccagagtccgcaatgaaccactgccaccggttaccaccccggcattctttattgccaaacaggcagggcccgtcggctggattgatattgtgcttggggcggtactggccgcgagtgcatatctgtggggcgctttcctgtatggcatggtgaaacgctttaaactgaaagcggcaattccgatcgccattattctttatctgacctggtacgccggcggctttaataatccggccggaaacggtattcatttcggggaagattttctctgcacagaattaccgcgctggagtcagttcctgttcctgcagattctgccgttctggctggtgatagtactgacattcaccatgtttatcgcggccttcttcttattcctgcttacgctcggcggattgtaccggatactgacgaaaattgtccggcctcagaaactgcgggtttcaatctgtgtcggctttttattcggcggatttgcttttattttcggattactgttttcagaggggagtctggccgccggtgtggtggcgggagtgggattcggcatgtttgtcgggatcgggcactatttcggttttgttactgtcggcggcggaggcggcagtggttcagggcgcggcggccgtggcgggggcagcagcggcggcggttacagcggaggcagccggagcagcagccgatcctcatccggaggcggaggacgcagcggtggcggcggggcatccgggcgctggtga

SEQ ID NO: 275649 - DNA, 2619 bp, Morganella morganii
atgacacaacagcggcaggcgaagtatcgtcaggactatcaggctcctgactataccattacccatattgatctcgattttgcgctcgacccgcagacgacagtggtgactgccgtcagtcaggtgaagcgcctgaatgacaatgcctctgagctggtacttgccggtgaggggctgaccctgaagcagctgaccattgacggcaaagtctggtcagattaccgcgaagaacccggttcgctgcacattcagaatgtgcctgaacaattcaccctgcaaattattaatgaaatcagcccggcggaaaatactgcacttgaggggctgtatgtgtccggtgatgcactctgcacacagtgtgaggcggaaggtttccgtcatatcacatattatcctgaccgcccggatgtgctggcgcgttacaccacccggatcacggcggacaaaggccgttatccgtatctgttatccaacggtaaccggattgatgccggggaatccggggataaacactgggtaaaatgggaagatccgttcccgaaaccaagctatctgtttgctctggtggccggtgattttgatgtgctgcgcgatacatttaccacccgcagcggccgtgatgtggcactggagctgtttgtcgacaaaggcaacctcgaccgcgccggctgggcgatgacctccctgaaaaatgccatgaaatgggatgaggagcgctttggtttcgagtatgacctcgacatctatatgattgtggccgttgatttcttcaatatgggcgcgatggagaacaaaggactgaatgtctttaactcaaaatatgtgctggcgaagaatgaaaccgcgacagataaagattatctcgggattgaatctgttatcggtcatgaatatttccataactggaccggtaaccgcatcacctgccgtgactggttccagctcagcctgaaagaagggctgaccgttttccgtgaccaggaattcagctctgacctcggctcccgtccggtaaaccgtatcaataatgtccgcgtgatgcgtgccgctcagtttgccgaggacgccggtccgatggcgcacccgatccgcccggataaagtcattgaaatgaataacttctatacgctgacagtgtatgagaagggctctgaagtgatccgcatgatccacacgctgctcggcgaagagcagttccaggcggggatgcagctttatgttcaccgccatgacggcagcgccgcgacctgtgatgattttgtgcaggcgatggaagacgcgtcaaatgtcgatctgacactgttccgccgctggtacagtcagtccggtacgccgctggtgaccgtgcgtgacagctatgatgcggataaaaaacagtatcagctgcatgtgacccagatgaccccgccaacaccggatcagcaggacaaacagccgctgcatattccgtttgatattgaactgtacggcagtaacggcgacgtgcttgcgctgcgtcatgaaggggagccggttcattcagtactgaatattacccgtgatgaacagaccttcacctttgatgatgtcagtgaaaagccggtaccgtcactgttccgcgaattctctgcaccggtgaaagtggattatccgtacaccgatgcacagctggcatttctgatgcagcacgcccgtaatgaatttgcccgctgggatgccgcacagtctctgctggcattacatataaaggaaaacatccgccgttatcaggccggtgaaaacttacaattaccggaaggggtaaccgatgctttccgtgctgtgctgcttgatgagcagatcgacccggcactggcggctcagattctgaccctgccgtcagaaaccgaggttgcggaatggttcccggtggtggatccggatgcaatcaatgcggtgatgacttttatcgccggcacatttgcccgtgaactggccgatgagctgtatgccgtgtatatcagcatgaaaaccggggcataccaaatcgatcatgcggatattgcaaaacgcgatctgcgcaatgtctgtctgggctatctggcactggatgaggacaaagagcaggcggacaagcgcgtgtcacaacagtatgcgcaggccgacaatatgactgattccctggcggctctgaccgcggcggtgaaagctgcactgccgtgccgcgataaactgctggcggattacgacaacaaatggcatcaggatggtctggtgatggacaagtggtttattcttcaggccacatgtccggatgcggatgtactggacaatgtgaaatcactgctcactcaccgttccttcactatggcaaacccgaaccgggtgcgctcgctggtcggtgcgtttgtgatgaataacccgaaagcgttccatgataaatccggtaaaggctatgagttcctgacggagatcctctgtgatctgaacagccgtaacccacaggtcgcgtcacgtctgattgagccgctgatccgcctgaaacggtatgacgacagtcgtcagagtaaaatgcgtgatgcattgctgcgcctgaaagggctggaaaatctctccggtgatttgtatgagaaaatcaccaaagcactggatgagaactga

SEQ ID NO: 275650 - DNA, 1215 bp, Morganella morganii
atgaattcagaagcaaccccgattatcacatcactgctggataccgatgcgtataagctgcatatgcagcaggcagtgttccatcattaccgctcaattcctgtggtcgcggaattccgctgccggagcagcaaacggctggggcagtacgcagatgaactgcgccgccgggtggcaatgatggcagagctgtcagtcagtgatgacgagtacaactacctgacccgcctgccgttcttttcggcagactacctcgcctggttccgccggttccgttttgatccgtcacaggtggatatccgctgtgacagcaacggtcagctggctgtacgtatcagcggcccgtgggtggaggttatcctgtgggaagtgccgctgctggcgctgatcagtgaactcgttcaccatcatgaatcaccgcaggtcacgccggaagatgccgttatccgtctgcgtgagctggtggcgcacttttatcaggatgcagagcaggcagggatcgacctcagccgctttaaactgatggatttcggtacccgccgccgtttctcttttgatgttcagaaagccattgtcactgaactgaaacagcatttcccgtatctggtcggtaccagcaattacctgctggcggaaaaactcgatctggagccggtcggcacccaggcgcatgaatggttccaggcacatcagcagatcagcgcggaactggccaacagccagcgcgcagccctccagacctggcttgacgaatatccggatcagctcggtgtcgccttaacagactgcatcacaatggatgctttcctgcgcgatttcgatgccccgtttgcccgcgcctatcagggtctgcgccacgattccggggatccggtggaatggggtgaaaaagccattgctcattatgaaaagctgggtatcgacccgatgagcaaaacgctggtcttttcagataacctggatttccgcaaagccctcgcgctttatgcccatttctgtgaccggataaacctggtgttcggtatcggcacccgcctgacctgcaatatcccggatgtcgagccgctcaatattgttatcaagctggtggaatgcaacggtaaaccggttgccaaactctctgacagccccggcaaaaccatctgcgaagatgatgaatttgtcgataaactgcgccgtgcatttgatattccccacgttcagcgcgcctgctga

SEQ ID NO: 275651 - DNA, 1401 bp, Morganella morganii
atgagcatagcgcctgtggtcgatgtactgcaaggccgtgtacctgttgacagcgaagtcacggtacagggttgggtccgtacaaggagagattcaaaagccgggatctcattcctcgccgtctacgacggttcctgctttaatccggtacaggccgtcatcgaaaataatttacctaattataatgatgaagtgcttcatttaacggcgggctgttctgtcgaagttaccgggaaagtggttgcttccccgggtcagggacaaagctttgaaatccatgcctcacaggttcgtgtggtcggtatggttgatgatccggatacctacccgatggcggcaaaacgccactctgtcgagtatctgcgtgaagtggcgcacctgcgtccacgcactaacctgattggcgcggttgcccgtgtccgtcataccttatctcaggcattacaccgtttctttgacgagcagggtttcttctgggtatccaccccgctgatcaccacctccgataccgaaggtgccggtgaaatgttccgcgtctccacgctggatttccacaacctgccgcgtaacgacaaaggcgaagtggatttcagcgaagactttttcggccgggaagccttcctgactgtatccggtcagctgaacggtgaagcttatgcctctgcgctgagcaaaatctacaccttcggcccgacattccgtgcggaaaactccaacaccagccgccacctggcagaattctggatggttgagccggaagtggcgtttgccaatctgaatgatatcgccggtctggccgaagccatgctgaaatatgtcttcaaagccgttctggaagagcgccgcgacgacctcgaattctttgctgagcgtattaataaagaagcaatcgaacgtctggaacgttttgtcacttccgatttcgcacaggttgattacaccgatgcgatcaaaatcctggaaaactgcggcaaaacctttgaaaacgacgtgtactggggcgtggatatgtcctctgagcacgaacgttacctggcggaagagcacttcaaagcgcctgtggtcgttaaaaactacccgaaagctatcaaagccttctatatgcgtgaaaacgaagacggcaaaaccgtggcagcgatggacgtgctggcaccgggaatcggtgaaattatcgggggttcccagcgtgaagagcgtctggacagactcgatgcccgcttcgatgaactgggtatgaataaagaagattactggtggtaccgtgatctgcgccgctacggcacagtgccgcacgccggtttcggtctgggcttcgagcgtttggtctcatatgtgacgggtgtctcaaatatccgtgaaaccatcccgttcccgcgcaccccgcgcagcgccacattctga

SEQ ID NO: 275652 - DNA, 1146 bp, Morganella morganii
atgaaacgcaatattcttgcagtggttatcccggctctgttagttgctggtgcagcaaacgcagctgaaatctacaacaaagacggcaacaaagttgacctgtacggtaaagttgacgttcgtcacatgttcgctaagtctgatgacaacggctctaaagaagatggcgacgattcacgcgttcgtttcggcatcaaaggtgaaactcagatcactgaccaactgaccggtttcggtcgtttcgaaaacgaaatcaaaaccaacggcgttgaaggcgacaacaaaaacaaagtacgtttagcttacgctggtttcaaattcgctgaattcggttcaatcgactacggccgtaactacggtgtggtatatgacactgcagcatggaccgacgttctgccactgttcggtggcgacaccatggcacagaccgacgtttacatgaccggtcgtaacgctaacctgctgacttaccgtaacagcgacatgttcggctacgttgatggcctgagcttcgcattacagtatcagggtgctaacgacgataactctatcgcaaaccgtggtactgcagttaaagatccagtaactggtgaagttattggttatacctcagatgctaaagctaacggtgacggctacggtttcgcaacagcttacgacctgggttggggcgtgactctgggtggtggttactctaactctgcccgtaccttaggtcagcagtataattctactgcagaaggtaaacgtgctgaagcgtggaacgttggtgctaaatacgacgctaacaacctgtacctggccgctctgtacggtgaaacccgtaatatgaccaaatacggcgaagatagcctgatcgctaacaaaactcagaactttgaattagtagcacagtaccagttcgactttggtctgcgtccatccatcgcttacctgcagtctaaaggtaaagacctgaacaacggtactaaaggcagcgaagacctggttaaatacatcgacctgggtgcttactactacttcaacaaaaacatgtctgcagtcattgattataaaatcaacctgctggacaacaacgatttcacccgtggtgctcaaatcaataccggtgacgttgttggtttaggtctgacctaccagttctga

SEQ ID NO: 275653 - DNA, 1191 bp, Morganella morganii
atgtttgagaatattactgccgcgcctgccgacccgatcttaggtctggctgacagcttccgtcaggacccccgtgaaaacaaaatcaatttaggtattggtgtttataaagatgaaaccggtaaaacaccggtactgagctgcgttaaaaaagcggaaaagtatctgctggataatgaaaccacgaaaaactacctgccgattaccgggatccctgaattcggaacagtgactcaggcactgctgtttggtgataacagtgacatcatcaccgccaaacgtgcccgtaccgcacaggcgccgggcggcaccggtgcgctgcgtatcgcggctgattttattgctaaacaaaccagcgcaaaacgtgtctggataagcaacccgacctggcctaaccataacggtatctttgccggtgccggtctggaaatctgcacttacaattactatgacgccgaaaaccattcactggatttcaatggcatgctggcaagcctggaagcggcacaggccggtgatgtgatcctgctgcacggttgctgccataacccgaccggtattgacccgactgctgagcagtgggcgcagttatcagttctggtaaaagaaaaaggtctgctgccggtctttgactttgcttatcagggctttgccgccggtctggatgaagatgctcaggggctgcgtattttcgcaaaatctcaccctgaaatgctggtggccagctcttactccaaaaacttcggcatgtacaatgaacgtgtcggtgcctgcaccctggttgccgctgatccggacactgccgatcgcgcgttcagccagatcaaaatcgttatccgcaccaactactctaacccgccgtcacacggtggtgctgtggtaacgacagtattgtctgatcctgaactgaaagaagagtggatccaggaactgaccaccatgcgtgagcgcatcaagcgcatgcgtcagctctttgtgaacaccctgcaggaaaaaggcgcgaagcaggacttcagctttattatccgccagaacggtatgttctctttcagcggcctgaccaaagaacaggttgcacgtctgcgtgatgaatatgcggtatatgcggtcagctccggtcgtatcaacgttgccggtctgaccctggaaaatatggttccgctgtgcgaagccattgttgcagtgctgtaa

SEQ ID NO: 275654 - DNA, 648 bp, Morganella morganii
atgcaatatcatattatccctgtcaccggctttatgcagaattgtaccctgatttggtgcgatgaaactaaagccgctgctattgtcgatcccggcggtgaagcgccgcgtcttatccgtgaaattgaacaacgcggtctgaaactggaaaaaattctcctgactcacggtcactttgatcatgtcggcgcaactgcggatgtggcagagcactttaatgtgccgatcgtcggcccgcagaaagaagatgctttctggatagaggggctgacgcagcagagccagatgttcggtgtggagccatgtcgtgcatttaccccggatcagtggctggaagatggtgataaagtcactgtcggcaatcttgaactggatgtgctgcactgcccgggtcatacaccgggacatgttatttttgtggataagcaggacaaactgatttcaatgggtgatgtgctgttcagagggggcgtcggccgcagtgacttcccgcgcggcaatcatcaggatcttatccgctccattaaagaaaaagtgctgccgctgggggatgagtatcgttttatcccgggccacggcccgatgtccacactcggggaagagcgccgcacaaatccatttttacaggatgaacagcctgtctggtaa

SEQ ID NO: 275655 - DNA, 549 bp, Morganella morganii
atggatataattgataacgaccgccgtaaatggctgggttttggtgcggcggcgctggggttggctttattaccgaatcacgcatttgcgtccctgaccacgccccggccgaaaattttacggtttgaaaacctcaataccggtgagtttttgaaagcagaattttttgacggtaaacgttataaccgctctgaactggcccgcctgaacaagctgttccgcgaccaccgcagtaataaagtcaaaaccattgacccgcacctgtttgaccagatgtatctgctgcaggtgatgatgaacatcaacaaacctatccagctggtatccggttatcgttctctggttaccaataatgaattgcgcagaaccacctctggtgtggcgaagaaaagttatcacacccgcggccaggcaatggatttccgtattccgggcatccagttaagtcaggtgcgcaaagcagccatgaaaatgcgggctggtggtgtgggttattatccgtccagtaatttcgttcatatggatacaggaccggtcagaacgtggtaa

SEQ ID NO: 275656 - DNA, 1734 bp, Morganella morganii
atggtgacgggagttaaaaaagttgttcccatttccgccatgataggaacactgttactgacgcctgtttcgtgggcctcaactgcaccggtaacgcatctgactgaagcagatgccaaagtggaaaatctgaaagcattttcagaatcaccggaaaatacagaaacacaggccgcagagccggtggccggtgttaatgcactgcctctgagcgatgtcgctgacagtatccgccgtgaagtgccggcggcaacaccgttactttataccgacacactgacaaacatttatgcggaacatcagctgaaaccgctgtggaccgatgaaaaagcacgtctgtccctggaaaatcagctggcggaagccgcacttgccggattccagccgcagttcacggcctggctgaatgccctggcacaaccggatctgtccccgctggcgcgggatatgattttaacggatgcggcattgggttatctctattacctcgacaacgtgagcaccaaaggcgataaatggctgtacggtgcccgtccgttcacgtttgcggctgtcagtgctccgtcactggcgaggctgaatacagcggctcataacggcaccctggcagcatttaccgatacgctgttaccggcgaataagatgtatcagccgatgcgcaaagccatgctgacagaactggcggataccgcgccgtggccggaaatggtgattaaccggacattgcgtccgggggaaagccacgaatctgtcggggcactgcgtgagatcctgcaccgctttaatctgatctctgccaatgacatgatgagccccggcgctgtttatgataaaacactggtggcggctgttaaacagtttcagttacagcacggcctggaagccgatggtgtcatcggtaaacagacccgtgaatggctgaataagacaccacagatgcgggctgccattatggcggtaaatattcagcgcctgcgcattacgccggacaatgaaccgaccgctattctggtcaatattccggatttttccctgtatttctatgtggataataatctgatcctggaatccagaaccattgtcggtcgtgcggaacgcaaaacgccgattatgtccagcgccctgaataatgtggtgattaacccgccgtggacggttccgccgaccatgagccgccaggatgttgtaccgcgcggcagggccgatccaagttacttcagcagccgtggttacactatctataacggctggagtaacaacgcctctgtggttgatccgtacagtattgactggagtgttatcacgccgtcaaacttcccgtaccggataacccaggcaccgggcccgtccaactcgctggggcgctataaattcaatatgccgaactcagaggcgatttatctgcacgataccccgaaccacagcctgtttaataaaaacatgcgggccatcagttccggttgtgtgcgggtgaataaagccaaagatctcgcagcgatactccttggtgacgcaggctggaacgaaacccgtgtggatggtgcactgaaagcgggcagtacccgttatgtttctatcccgaaccgtattccggtttatctctattatcagactgcctgggtaaatgcggagaatatcccgcaatatcgcgcggatatttaccgttacgatgacagcagcctgaaaggtattgataaattaactgatatcacgcctttcctgataaaaagctga

SEQ ID NO: 275657 - DNA, 714 bp, Morganella morganii
atgcgtaaactgaccctcaccctgagtgccctggcacttgctctgagcctcaacagtgtggctgatgccaaagtgtacatgccggaaaaagtcagtgacggcgtgaccgttgctcagctggcagaacagcatgccattcactggatttcggttgaacagattgaagagagcctgaaagggcagccgccgatggcggtgggctttgatattgacgacactgtcttattctcaagcccgggcttttaccgcggcaaactggaatactcaccgaacgactacagttatctgaaaaacccggaattctgggaaaaaatgaataatgagtgggataaattcagtatgccgaaaaaatccggtacggaactggttcagatgcacctgaaacgtggtgataccgtttatttcatcaccgggcgcagcaaaaccaaaacagaaacggtcaccaaatatgtgcaggaagggctgcgtattccggcagataaaatgaacccggttatttttgccggtgatgaggaagggcagaataataaagtcagctggatgcgtgatcacaaactgaaaatttattacggtgatgcggatgccgatattgccgcagcacgggaactgaatatccgggggatccgggtattacgcgcttcgaactcttcgtatcagccgctgccgaaagccggtcagttcggcgaggaagtggttattaattccgaatattaa

SEQ ID NO: 275658 - DNA, 678 bp, Morganella morganii
atgagtaatccggcaaactttaatggtcagcgtcctgttattaatcctgatgatgcactgatgctgttgatcgatcatcagagcggattgttccagactgtcggcgatatgccgatgactgaattacgcgccagagccgctgtactggcaaaaatggcaacactcgccaatatcccggtgatcaccaccgcctcagttccgcagggtccgaatggcccgctgatcccggaaattcatcagaatgcgccgcatgctcagtatattgcccgtaaaggtgaaattaatgcctgggataacccggagtttgtggctgcggtgaaagcatccggtaaaaagcagttaatcattgccggtaccattaccagcgtttgtatggcattcccggcgatcagcgccgtggctgacggttatcaggtgtttgcggtaattgatgcttccggtacctataccaagatggcacaggaaatcaccctggcgcgcgttgtccaggccggtgtggtaccgatggatactgcagctgtggcctctgaactgcaaaaaacctggaaccgtgcggatgcggcagaatgggcacaggcgtacacgcagattttcccggcctatcagttactgattgagagctataccaaagcgcaggacgttgtgaataacaacgagattttagattcacaacgctga

SEQ ID NO: 275659 - DNA, 4488 bp, Morganella morganii
atgattgaacgtggtaaattccgctcgctcacgttagtcaactggaacggcttttttgcgcgcacttttgatctggatgagctggtcaccaccttgtccggcggtaacggtgccggtaaatccaccaccatggcggcctttattaccgccatgatcccggatttaaccctgctgcatttccgtaacaccaccgaagccggggcaacatccggttcccgtgataaaggtctgcacggtaaactgcgtccgggcgtgtgctacgccatgctggatgtggtgaactcccgccatcagcgtgtgctggtgggtgtgcgtcttcagcagattgccggacgtgataaaaaagtcgatatcaaatcctttatgattcaggggttaccgacacagtactccccgacacaaattgtcagcgaacagctgagtgagcgccaggtgcgggttctgccgctgaatgacctgaaagcccgcctggatgaaatcgaaggtgtgcatttcaaacagtttaactcgattaccgattaccactcggttctgttcgagctgggcgttatcccgaaacgtttgcgttctgcgggcgaccgcagcaaattttaccgcctgatcgaagcctcgctctacggcggtatctccagtgccatcacccgttccctgcgtgactatttactgccggagaacagcggggtgcgcaaagccttccaggacatggaaggggcactgcgtgaaaaccgtatcacactggaagctatccgcgttacccagtctgatcgcgatctgttcaagcatctgatcaccgaagcgaccgcgtatgtttctgcggattatatgcgtcacgccaatgagcgccgtgtgcatatcgaccaggcactctctgtgcgccgggaactgctcggcagccgcaaacagctgatcagcgaacagttccgtcaggtggaaatgtcccgtgagctggcggagcagacggcctcatccgccgatctggaaactgattaccaggcggccagtgatcatctgacgctggtacagacggccatgcgtcagcaggaaaaaattgaccgctatcaggctgatgtcgaagagctgacattccgcctggaagaacagaccgaagttgcggaagaagccgcagaacagctggcggaatatgaagaacgcaaccatgttgcggaagaggaagtggatgagctgaaaagccagctggccgattaccagcaggcactggatgttcagcagacccgcgctattcagtatcagcaggcattacaggcgctggaacgcgccaaagcagtgtgtcagctgccgcagctggatattgattcactggatgaatggctggaaaccttccgcgcccgcgaagagcaggcaaccgaatccctgttagtgcttgagcagaaaatgagtgtggcgcaggccgctcacagccagttctctcaggcctatgaactggtgaaatcagtggtcggtgaagtcagccgcagcgaagcttaccaaaccgcccgtgaattactgcgcgagctgccgtcacagcagatgatggctgatcgcgtccagccgctgcgccagcagttatcggaactggaacagcgtctgcacagccagcacaatgcacagaaatcgctggatgatttctgcaagcgtatcgggcagcagattgaggcggacgggctcgatgagatgctgatgacccttgaggcgcagcaggaaagcctgagtgtcagtgtcagcgaaagcggtgagcgccgcatggaaatgcgccagcagactgaacagctgaagcagcagatccagtccctgaccgtcaaagccccggcgtggctggcggcgcaggaagctctgactcaattgtgtgagcagtctcatgagacgttcaccagcgccaatgatgtcactgaatatatgcagcagttgctggagcgtgagcgcgaagtgactgttgagcgtgatgaaatcgcgctgaaaaaagcacagctggaaaaagacattgaacggctcagtcagccgagcggcgcggaagatggccgtatgctcggactggcagagcgtttcggcggtgtattgctgtcagaaatctatgatgacatcacgattgatgacgcaccgtatttctccgccttatacggcccggcgcgccatgcgattgtggtgccggatctcagcgctgtgcgtccgatgctggaagccctcgatgattgtccggaagacctctatctgattgagggtgatccgcaatcctttgatgacagcgtcttcaccaccgaagagctggagcgtgcggtactggtgcgcagtaccgatcgccagtggcgttactcccgcttcccgtctgtgccgctgttcggccgtgcggcgcgggaaaatcagctggcagtgctggaacatgaacgggatgagctggcagaacgcctggcgacactctcttttgatgtccagaaaatgcagcgtgctcatcaggcattcagccgttttgtcggcaaaaatatctcggtggcctttgaggctgacccggaagcggaaatccgcacactgaatcagcgccgtaatgagctggagcgtgagctggcacagtttgaggatcagactgctgttgcccgtcagcagtacgcgcagatcaaagaaaacctgagcatcctcaaccgcctgatcccgaataccgctctgctgcttgatgagacactggcagatcgtgcggatgagatccgcgatgcactgaccgatgcacaggaatccgcccgtcatattcagcagtacggtgcggcactgcgcaaactggagccgatggttgctgttctccagagtgacccggagcagtatgaagccctgatccgcgattatgaaaacgcgaaacaggttcagcagcaggcccgtcagcaggcgtttgccctggaagaagtcgcgcagcgccgtcagcactttaattacggcggatccgccggcatgctgacagaaaatgccgatcttaatgacaaactgcgtcagcgtctggaacacgcggagtctgatcgtgcccgtacacgtgagatgctgcgccagcagcagaccaaatgcgcggagttcaatcaggttctggcctcactgcgcagctcgtatgaaaccaaatcggacatgctgcgcgaacttgagcgcgaaatgagcgaaattggtgttcaggcggatgccaatgcggaagagcgcgcccgtgtgcgccgtgatgaactgtacaatcaggtcagccataaccgcgcccgtatcaatcagctggaaaaacagctggggatcggcgagtcggaaatggataatctgcaaaaacgtctgcgcaaagcggagcgcgattaccagcagatccgcgagcaggtcgtgaccgccaaagcggggtggtgtgcggtgatgcggatggtgaaagaaagtggtgttgagcgccgcctccaccgccgtgagctggcttatgaagatgcggacacactgcgttccatgtcggataaagccctcggtgcactgcgtcaggccgtggcggataacgaacatctgcgtgatgcgctgcgtctgtccgaagatccgaagcgtccggagcgcaaagtacagttctttatcgaagtgtaccgccatctgcgcgaacgtatccgccaggatattatcaaaaccgatgacccgatcgacgccattgaacagatggaaatcgagctggcacgtctgaccgatgaactgaccgcccgtgaacaaaaactggcgatcagctcgaaaagtgtggccaatatcatccgcaaaactattcagcgcgaacagaaccgtatccgtatgcttaaccagggcctgcaggccgtggcattcggtcaggtcaaaggggtgcgcctgaatgtgaatatccgcgaaagccacgcgatactgctggatgtgctgtccgaagagcatgagcagcatcaggacctgttcgccagccagcgtctgaccttctctgaagcgatggcgaaactctatcagcgtctgaacccgcaggtggatatggggcagcgtctgccgcagaccatcggtgaggaactgctggattaccgtaactatctcgagctggaagtggaagtcaaccgtggttctgacggttggctgaaagccgagagcggcgcgttatccaccggtgaggcgattggtaccgggatgtccattctggtgatggtggtgcagagctgggaagaagagtcccgccgtctgcgcagcaaagatatttcgccgtgtcgtctgctgttcctggatgaagctgcgcgtctggatgcgaagtctatcgccactctgtttgagctgtgcgatcgcttacagatgcagctgattatcgcggcaccggaaaatatcagtccggagaaaggcacaacgtacaaactggtacgtaaagtcttcaataatcaggaacatgtgcatgtggtgggactgcgcggcttcggccagccggaaccgactccggtaccggaagcattgcctgagccggtgacggaagaggaggatgacggggaagaagagcaggattaa

SEQ ID NO: 275660 - DNA, 738 bp, Morganella morganii
atgtcatcgacacatattgaacaatttatgtcagcaaagctggctcaggcacttgccaacaacctttttccggaacttgacagccagttgcgcgcaggccgccatatcggtgtggatgatctggataatcatgcctttctgatggatttccaggatgaactggaaggcttttacgcccgttataacgtagaactggtccgtgcaccggaggggttcttctatctgcgcccgcgttccaccacgctgatcccgcgctcggtgttatccgaactggaaatgctggtcggcaaagtactgtgttatctgtatctcagcccggagcgcctcgccaaccagggtattttctccacggcagagctctatgaagaactgctgtcactggcggatgaagccaagttactgaaagtggtgaataaccgctccaccggctctgacctggacaaacagaaattactggaaaaaacccgtggtgcgctgaaccgcctgcgccgcctgggcatgatcacgtttgtttctgcggataacagccagttcgtgattgccgaatccgttttccgattcggggcagatgtccgcagcggcgatgacccgcgtgaggcgcaactgcgtcttatccgtgacggtgaggcccaatccctgacggaagatgaaaaacacccgcgccctgaggatcaggacgatgataatgaagaatctgataatgacaacgcgacggatgaagcggaggatgaagaatga

SEQ ID NO: 275661 - DNA, 1326 bp, Morganella morganii
atgagtgagtttacccaaacagtcccggaactcgtggcatgggcgcgaaagaatgatttctccatcgcgctgccgccggaacggctggcttttttactgtctgttgcggtactcaacagtgagcgcatcgacggtgaaatgagcgagggggaactggtggatgccttccgcgaagtctgcaaaggctttgaacagacaacggaatctgttgcggtccgtgcgaacaatgccatcaatgatatggtgcgccagaaaatatttaaccgctttaccagtgatatctttgagggtaatgcgatttaccggctgaccccgctcgggatcggcatcagtgattattacatccgtcagcgtgaattttcctcactgcgtttatccatgcagctttcgattgtggccggtgaactgagccgcgcagcagatgccgccgaagagggcggtgatgaatttcactggcaccgtaatgtgtttgctccgctgaaatattccgtggcggagattttcgacagcattgatatgtcgcagcgcgttatggatgagcagcaaaacggcgtgaaagatgacatcgccaaactgctgaatcaggactggcaggccgcgattgccaactgtgagcaactgctgtcagaaacctccctcacactgcgggaactgcaggatacgctcgaagccgccggtgataaattacaggcgaacctgctgcgtattcaggatgccaatatgagtgccgccaccggctccgaactggtggataagctgatttttgatctgcaggccaagctcgaccgcattatcagctggggccagcaatctattgatttatggattggttatgaccgccatgtccataaatttatccgtaccgctatcgatatggataaaaaccgtattttctcgcagcgtctgcgccattctgttcagcactattttgactcaccgtgggcccttaatgtggctaatgcggagcgtctgctggatatgcgtgacgaagagatggcactgcgtgatgacgaagtgaccggggaattaccgccggatctggaatatgaagagttcagcgaggtcaacgaagagcttgccgccatgatggaaactgcgctggctgtgtataaagcacaggcgaagccgctggatctgggcgcggttctgcgtgattacctcgcgaaatatccgcgcagccgccagttcgatgtggcacggattatcgtggatcaggctgtccgcctcggggtggctgatgctgatttctcaggcatcccggcggaatggtcagtaattaatgaatacggagcgaaggtgcaggcacatgtcatcgacacatattga

SEQ ID NO: 275662 - DNA, 789 bp, Morganella morganii
atggttgatcgtaattttgacgatatcgcggagaaattcacccgcaatatctatggcacaacaaaagggcaaatccgcgaagcggtggtctggcaggatctggacgccttactgacccggctgaaaccgggcccgctgcgcattctggatgcgggcggcggtgacggttttttctcccgccgtctggctgcgctggggcatcaggtggtattgtgcgacctgtcagaagagatgattgcccgcgcacaacaggccgcgctggatgacggcgtggcagaaaatatgtcctttattcattgtgcggcacaggatatcgcacttcacactgaaggggcgtttgacctggtattatttcatgccgttttggagtggatcacagatcaaaaaggtgcaattgaagcactgaccgctataatagcgggcggtggtgcattatcgttaatgttttacaatgcgaacggacttgtgatgcgaaatgcaatattaggcaattttcatctggcaaccccggaaattcagcgccgccgcaagcgttcgttatcgccgcagaatccccttatgccggaacaggtttatcagtggctggatgattgccgtctgacgattgaggcaaaaaccggcgtgcgggttttccatgattatctgcagagccgccagttacaaaaccgtgattttccggcgctgctggcactggagcaacgctattgccgtcaggagccttatatcagcttaggccgctatattcacgttatggcacgaaaaccgatcagaaggatggacaatgagtga

SEQ ID NO: 275663 - DNA, 798 bp, Morganella morganii
atgctgtttgccctgaaaaaatacctcggcggttttctgatgccgctgccgtttatgctcctgctgatcctggccggattactgctgctgtggttttcccgatggcagaaaaccggtaaaacgctgatcaccgtgagctggctcgggctggtgctgctcagcctgcaaccggtggcggatgccctgctgctgacaacagaaaaaccgtatgaaaaacgttatgagctcatcaccccggctgaggttcagcaacaggatctgcgctatatcgtggtgctcggcggcggctttacctataacccggaatggtcaccgtccgccaacctgatcagtaacagtctgccgcgcgtcaccgaaggtgtgcgtcttgcgctgcgttacccgcaggcaacgctgattttcaccggcgggccgggcgcaaacagtatcagcagcgcagaggccgcagcgcaagttgcgcaatcgctggggatccccgctgaacgcacattgccgctggtattgccgaaagataccgaagaagaagctgccgaagtgaaaaaagtggtgggcgatgcaccgttcctgctggtgacctccgctaaccatatgacccgcgccaaagccttctttgatgcgcgcggcctgcatccgatcccggcaccggccaatcagctggccgtcaccacgccgctgcacagctgggaaaaaaccattccttccgcgtactatttatcacacagtgagcgggtctggtatgaaggactggggcggctctggcagtcagtgaaaacgtcagataatgaaggacaggaatag

SEQ ID NO: 275664 - DNA, 750 bp, Morganella morganii
atgtttacagttatcattcccgcgcgttatgcctccacgcgtctgcccggtaaaccactggcggatatctgcggcaagccgatgattgtccgtgtgatggagcaggcaaaacgttccggtgccgcgagagtcattgtcgccactgacacacaggcggtatttgatgccgtgatcgcagagggcggcgaagcctgtatgacgcgcgaagatcatcagtccgggaccgagcgcctggcggaagtgattgatcactaccggtttgctgatgatgagattatcgtgaatgttcagggggatgagccgttaatccctgacagtattattgcgcaggttgctgaaaatctggcagccagcgaagccggtatggctaccctggcggtaaaaatcacttcagcggaagaagcctttaacccgaatgcggtgaaggtggtgatgaataaacagggctatgcgctctatttctcccgggccaccattccgtgggatcgcgagcgtttcatgcacagccgtgacagcgccggtgataatttcctgcgtcatatcgggatttacgcctaccgtgccgggtttatccgccgctatattcagtgggaaaccagcccgctggagaaaatcgaaatgctcgagcagctgcgtgtactctggtacggtgaaaaaattcatgtcgcggaggcatctgaagcaccgggcaccggtgttgataccccggaagatcttgaaaccgtgcgcagattgtttgctgcccgctga

SEQ ID NO: 275665 - DNA, 177 bp, Morganella morganii
atggatcaccgtttactcgaaatcgtggcctgccctgtttgccacggcaaactcagctacgacaagcaaaatctcgaactcatctgcaaaggctgccgtctggcctatcccgtccgcgacgatatccctgtcttattagagaatgaagcccgcgaattgccggtctcagaaggataa

SEQ ID NO: 275666 - DNA, 216 bp, Morganella morganii
atgtctaaacaattacaacttggccgcgttaaatggtatgacgcgaaagaaggttacggtttcatctccccggttaacggcggcgacgatatccgggtaacccgtaacgggatcgccaattcccgtaacaaattactgtgcgaagggcaggaagtggaattctcactgacccgcggcagttatggtattgcagcgaacgatgtgatcgcgctgtaa

SEQ ID NO: 275667 - DNA, 984 bp, Morganella morganii
atgatcgataagatttggtccggccgctcaaagctttattggctgcttttaccgctctcgtttttgtacggggcggtgagcggtctgcggcgtctgctgttccgctgcggactgaaaaaatcccgccgtatgccggtaccggtggtggtggtcggtaatctgaccgccggcggtaacggcaaaacaccggtggttatctggctgacagagcaactgctggcccggggctaccatcccggggtggtttcccggggttacggcggtaaatcggatcattatccgctgcttatcacgaaagacacgacgacagcacaggccggtgatgagccggtactgattgcccgccgtaccggtgtgccggttgcggtcgcccccgatcgcgccgctgccgcagatgctattttgcagcatgcacccgtggatgtgatcatcaccgatgatggtttacagcattacgcgctgcagcgcgatatggaaatcgtggtgattgacggcgaacgccgtttcggtaacggctggtggctgcctgccgggccgatgcgggaacgggcagggcgtctgaaacaggtggatgcggtgatcgtcaacggcggtaccgcacaacccggggaaaccgctatgcagctggtgccgggagaggctgttaatctgtctgacggtacccgtaaaccggcagcggatattggtgagtgtgtggcgatggccggtatcgggcatccgccgcgctttttcgccacgctgaactccctcggcgtgacaccggcacagtgtgttgcgtttccggatcatcagtcttacagccctgaacagctttccgcgctgataaaacccggccagtcactcctgatgaccgagaaagatgcagtgaaatgttttgccttttctgcaactgactggtggtatttaccggtcagtgctgctattcccgcaaaatccgccgatttaattctggataaagtcatatctcacataaaaaatgcataa

SEQ ID NO: 275668 - DNA, 1746 bp, Morganella morganii
atgaaagatattgatatttcaacccggcaaacattccgccggttatggccgacaatcgcaccgtttaaaacaggtatcatcgtggcggctattgcgttagtcatcaatgcgggcggcgatgcatttatgctgtcgctgctgaaaccgctgcttgatgaaggtttcggcactgccgacaatgattttctccgtatcatgccgctgattatcctggggctgatgctgttacgcggtatctccagttttgtgtcaggctactgcctctcctgggtgtccggcaaagtggttatgactatgcgccgtaacctgttccgccatatgatgggcatgccggtttccttctttgatcagcaatccaccgggacactgctttcccgtatcacctatgattccgaacaggtggcttcgtcttcgtccggcgcactggttacggtcgtccgtgaaggcgcttatattattgcgctgttcgggctgatgttttacaacagctggcagctgtcgctgattctgattgttattgccccgatcgtggcctttgttatccgcaaagtctctgtccgcttccgcgaaatcagtaaaaacatgcagagcggcatgggacaggtcagcgccagtgctgaacagatgctgaaagggcataaagaagtactgattttcggcggtcagaaagtggaaaatgatcgctttgataaagtcagcaaccatatgcgccgccagggcatgaaactggttaccgcatcatctattgccgacccgattattcagatcattgcctcctttgcgctggcatttgtgctgtttgccgccagtttccctgaaataaaagaagcgctgagtgccggttccattacagttgtcttctcttccatgattgccctgatgcgcccgctgaaatccctgaccaacgtgaacgcccagttccagcgcgggatggcggcctgtcagacactgtttgttctgcttgatatggaacaggaaaaagacaccggcaccaaagtgctgaaagatgccaaaggtgatgtggcgtttgagaatgtgactttccgttatcaggggaaagagaacccggcgctgaaaaatgtgtcgttcactattccgtcaggcaaaacggtggcactggtcgggcgctccggctctgggaaatccaccattgccaatctgatcacccgtttttatgaaattgaaagcggacatattacgatcgacggcaacgatatccgcgattacacactggcatcactgcgcagtcaggtggcgctggtgtcgcagaatgttcacctcttcaatgatacggtcgcgaataatatcgcttatgccacagaaggtaagtacacccgcgagcagattgaaaaagccgctgaaatggcttatgccatggactttatcaataagatggagaaggggctggatacagaaatcggtgagaacggtgttctgctttccggtggtcagcgccagcgtattgcaattgcccgtgcattgctgcgtgacgcaccgatcctgatcctcgacgaagcaacctcggcactggatactgaatctgagcgtgcgattcaggcagcgctcgatgagttacagaaaaaccgtacctgtctggtgatcgctcaccgcttatccaccattgagaaagcggatgaaatcctcgtggtgcaggacggcgaagtgcaggaacgcggtacgcatgatgaactggtgaaacagccgggtatctatgcgcagctttataacatgcagtttggtcactaa

SEQ ID NO: 275669 - DNA, 2292 bp, Morganella morganii
atggctgtgatgaaatatctgtttccccgtccgttgccgctctggcttgctgcggctgccgttgtggccgggcatatgccgctgttgctgattccgcggttgttgttaccggcagaaagtctgctgctattcactggtatttgcttgctttttcttatccgcaccagactgagtttttttatccgcattattgccggtacttttctggcagtaaatattcatatcagtaatacattatcactcttttccgctgaactacccgataatatcgatattatgatccatgatgtcatgattaactcatctgactattattccgtcaaagggcggattattaatataaataataaaatgtatgatgatactgtttttattaatacaaaaataaaaggttcatttaaaccggcatgttccggtgaagtctggcgtatattccgccctgtactgaggccggtacacggtctgttaaatgaaggacagtcaaaccggcagcaatatttactgtcagagcgggttttgttttctctgacgccgggacgcagtgaaaaattatcttcagactgcagtcagcgtcagaagatgattgcggcataccttcctgcgatggataacctgccgtataacggactgatggcggcgctgttatttggtgaacggcgcggcatcaccgcagagcagcgcagactggtgcaggaaaccggagtggcacatgtggtggctatttccgggttgcatatcgggctggcggcgttatggggatggtgggccgggcggttattgttgctgttgttaccgctgcgtatggtgacacctgttattccgtctgtgctgtcagtctgtgccgctgttgcttatgtctggctggccgggtttgcggttccggcctgccgggcattgtctgcgctgctgttgtggcatctgctgcgctggcggcattaccatctgccagcgtatcagtttgttatgatcagtgccgcactgttactgctggcggatccgctgacaattctatccgccggattctggttgtcttatactgccgttaccgcactgttgttctggcatcacaccggtgttttctcccgcagtaatatatttatcccgctgacaccttttgcccgcctgtggcgcaatatccgttcgcttctctcttaccagtgcggattatttctgttactgctgccggttcagggatttttcttcggtggcgtgaatatgctgtcgtttctgagcaatctgtgggtggtaccggtgatctcctttctgacggtgccgctgctgtttgccggattattgatcgggcctgcactgctgctggcggatttctctctggcgctggcattatggccgctgccgtttctggcacagggctggatggttaccggacatatcgctctgatatggataccactgatgtgggcggctgtttatatcatccggctggatatgtggcgccagcacccgctgctgctgccgggaatggtgctcagttgctgtctgtatctgcggaaaactccgctgcctgagtggtcagttaccatactggatatcgggcacggattggcggcagtggtgataaaagatggcagggcggtggtgtatgataccggcaaccgcttcgggtcacgggatgacgggttgcgcacagtattgccttatctgcgttatcaccgcctgactccggactggattatgatcagccatgatcaccgtgaccacaccggggggctgggctctctgcgccatgcttatcctgctgcggtggtcaaaggtaatattccgcaggccgatacaccctgccgccggggggaacgctggctgtggcagtcattgtattttgaggtgttatggccggacgaaaaatatcagctgagcaaaaatgacggctcctgtgttatccgcatcagtgacgggaaatatcaggttttgctgaccggggatatcgaaaaacaggcagaaaaacagctgattaggtataaagatgagctctctgctactgtactgcaagttccgcaccatggcagcaaaacctcatcatcagaattttttattcgtgcggtaaatcccgctttcgcactggtttctgttgcgcgctatagcccgtggcgtctgccttctgataaagtacgccgtcgctatcataatctcggcgtgcagtggcatgatactgcgcacagcggccagatttctgtgtccttttttgctgatgaggtatccgtcgcgacttaccgtacccatctctccgcccgctggttcagcgcatggtttggagatcagccggtaaacgggtaa

SEQ ID NO: 275670 - DNA, 285 bp, Morganella morganii
atgaccaaatctgaactgattgagaagctggcaggccaacaatctcatcttccggctaaagttgttgaagaagcagtaaaagagatccttgagcatatggcaaatacgcttgctgacggtgaacgtattgaaatccgtggattcggcagtttttctctgcactaccgtgcaccgcgggtaggtcgtaacccgaaaaccggcgaacaggtggaactggaaggtaaacacgttcctcacttcaaaccgggcaaagagttacgcgaccgcgcaaatatctatgcttga

SEQ ID NO: 275671 - DNA, 1674 bp, Morganella morganii
atgactgaatcttttgctcaactctttgaagaatccctgcaggctatcgaaacccgtccgggcgctatcgtccgtggtactgttgtcgctatcgataaagacgtagttctggttgacgcaggtctgaaatcagaatctgctatcccggtagaacagttcaaaaatgctcagggcgagctggaaatccaggttggcgacgaagttgatgttgctctggacgcagtagaagacggtttcggtgaaactgttctgtcccgcgagaaagcaaaacgccacgaagcatggctgatgctggaaaaagcatacgaagaagctgagactgttaccggtgttatcaacggtaaagttaaaggcggtttcactgtcgaactgaacggcatccgtgcgttcctgccgggttcactggttgacgtgcgtcctgttcgtgacaccacgcatctggaaggcaaagagcttgagttcaaagtaatcaagctggatcagaaacgcaacaacgtggttgtttcccgtcgtgcagttatcgagtcagaaaacagcgcagagcgcgatcaactgctggaaaacctgcaggaaggcatggaagttaaaggtatcgttaagaacctcactgactacggtgcattcgttgatctgggcggcgttgatggtctgctgcatatcactgatatggcgtggaaacgtgttaaacacccaagcgaaatcgtgaatgtcggcgacgaaatcactgttaaagtgctgaaattcgaccgtgaacgtacccgcgtatctctgggcctgaaacagctgggcgaagatccttgggtcgcaatcgctaagcgttaccctgagaacacccgtctgaccggtcgcgtgaccaacctgactgactacggctgcttcgttgaaatcgaagaaggcgttgaaggtctggtacacgtttctgaaatggactggaccaacaaaaacatccacccatctaaagttgttaacgtgggcgacgttgttgaagttatggttctggacatcgacgaagaacgtcgtcgtatctccctgggcctgaagcagtgcaaatctaacccatggcagcagttcgcggaaactcacaacaaaggtgaccgcgttgaaggtaaaatcaagtcaatcactgacttcggtatcttcattggtttagatggcggcatcgacggtctggttcacctgtctgacatctcctggaacgttgcaggcgaagaagcagtacgtgaatacaaaaaaggcgacgaaatcgcagctgttgttctgcaggttgatgcagagcgcgagcgtatctctctgggcgttaagcagttagctgaagatccgttcaacaactacaccgctgttaccaagaaaggtgctatcgtcaccggtaaagtaactgcagtagacgctaaaggcgcaactgttgagctgatggatggcgttgaaggttacctgcgtgcatcagaagcttcacgcgatcgcgttgaagatgctactctggttctgagcgttggtgatgaagttgaagctaaatacactggtgttgatcgtaaaaaccgtgtaatcaacctgtctgtacgtgcaaaagacgaagcggatgaaaaagacgctatcgctactgtgaacaagcaggaagaagctggcttctctaacaacgcaatggcagaagctttcaaagcagctaaaggcgagtaa

SEQ ID NO: 275672 - DNA, 690 bp, Morganella morganii
atggcagtatatgttccggtcattaccattgacggcccgagcggcgcgggcaaaggtaccctttgtcacgcactggcaaacgaaatgggatggcatttactggactccggcgcaatttaccgcgttctggcactggcggcactgcatcatcatgtggatatcacctcggaagatgcactggttccgctggcggcgaatctggatgtgaaattcctggcaaaagacacgggccctgagacaattctggaaggtgaggatgtcagccgggctatccgtcaggaagaagtgggtatgacggcctcgcaaatcgcggcgttcccgcgtgtccgtgaagctctgctgcgccgtcagcgcgcattccgtgtggcaccgggcctgattgccgacggccgtgacatgggcacggtggtgttcccggatgccccggtgaaaattttcctcgacgcgagtgcgcaggagcgcgcccaccgccggatgaagcagttgcaggacaaaggctttagtgttaattttgaccgccttcttgctgagatagaagagcgtgatttccgcgaccgcaaccgtgcggttgccccgctggtggctgccggcgacgcgctgattctggactcaacaaccatgtcaattgacgacgttattgccgaagcccttcgttatacgaaggaaaaactggcagaaacggcggaatga

SEQ ID NO: 275673 - DNA, 1278 bp, Morganella morganii
atggattccctgacgttacaacccatcgcccgcattaacgggacgattaacctgcccggctccaagagtgtctccaaccgggcactgctgctggcggcacaggctgcgggcacaacacgccttatcaacctgctcgacagcgatgatatccgccatatgctcagcgcactgcgggaactggggatccgttatcagctttctgacgacaaaaccgaatgtattgtggaaggtcagggcaaaccgatcagcggatttaaaggtattgatctgttcctcggtaatgccggaacggcgatgcgcccgctgactgcggcactgtgtctcggggataatgacattaccctgaccggcgaaccgcgtatgaaagagcgcccgattggccatctgaccgatgcactgcgccagggcggcgcacagattgatttcccggaaaatgacggttatccgccgctgcggatccgcggtggctttaccggcgggcgtatcagtgtggatggttccgtatccagccagtttctgaccgcgctgctgatggcagcaccaccggcggagaatgacacagaaatcactatcagcggtgaactggtgtccaaaccgtatattgatatcacgctggcgatgatgtcctcttttggcattacggtggtgaatgaagattaccggcgtttcctgatcaaaggaaaacagcagtatcagtccccgggagaatacctggtggaaggggatgcttcatctgcctcctatttcctcgcggcggcagccattaaaggcggcaccgtgcgggttaccggcatcgggcgtaacagtctgcagggcgacacacaatttgccgctgtgctggaaaaaatgggtgcgaaagtgacgtttgcggacacgtatattgaatgcacccgcgataccctgcacggcatcgatatggacatgaacgccatcccggatgcggcgatgacgattgccaccaccgcgctgttcgccgaagggacaaccactatccgcaatatctataactggcgggtgaaagagacggatcgtctcagcgcaatggcagctgaactgcgtaaagtcggcgcactggtggaagaggggcatgattacattcaggtcaccccgccggcaaaactgcagcatgcggaaattgaaacctataacgatcaccgtatcgccatgtgtttctcgctggtggcactgtcagataccccggtcacgatcctcgatccgggctgtacggcaaaaaccttccccggctacttcagtgagctggcggcactgtcagaataa

SEQ ID NO: 275674 - DNA, 1086 bp, Morganella morganii
atgagtcaggtatataactttagtgccggtccggctatgctgccggtagaagtgctgcgccgtgctgagcaggaactgtgcaactggcgcgggctcggcacctcagtcatggaaatcagtcaccgcagcaaagagtttatgtcggtggcaaaggaagcggaaaataatctgcgccagatcctcgcggtaccggataactataaagtactgttttgccacggcggcgcacgcggacattttgccgcactgccgatgaacctgctgggtgataaaaccaaagcggattatgtggtgggcggatactgggcggaatgtgcggcagaagaagcaaaaaaatactgcacaccgaacattattaatgtcagaactgaatcggaagacggtatcggcgtgaaaccgatgagcgaatggcagctcagtgatgatgcagcctatgttcactactgcccgaatgaaaccattgatggtattgccattcatgaagagccggatttcggcgataaaatcgtgattgcagattactcgtctgccatcctgtccaaaccactggatgtcagccgtttcggggtgatttatgcgggtgcgcagaaaaatatcggcccggccgggctgaccctggtgattatccgtgaggatctgctgggcaaagcgcgcagagaaaccccgtccatcctcgactataccgtactgagtgaatgtgactctatgttcaacaccccgccgacctttgcctggtatctctccggtatggtctttaagtggctgattgaacagggtggtttacaggaaatcgcccggatcaactatgataaagcacaactgctttactctgcggtggatcacagtgatttctatattaaccgtgtggcggcggccaaccgttccctgatgaacgtgccgttccagatgtctgatccgtcactggacagcaaattcctcgccgaagcacaggcacagggactggtttccctgaaagggcacaaagttgccggcgggatgcgcgcctccatttataatgcgatgccgtatgaaggcgtgcgcgcactggccgaatttatggcggagtttgaaagccgccacagctga

SEQ ID NO: 275675 - DNA, 1815 bp, Morganella morganii
gtgcagcgggccgttacagcaattgtggatcccatgacgcaaacacatacttttattcccggcaaagatgccgctctcgaagattccatcagccgttttcagcagaaactgcagcaactgggtttcaatatagaagaagcctcgtggctcaacccggtgccgaacgtctggtccgtgcatatccgtgatactgactgcccgctctgctttaccaacggcaaaggggccactaaaaaagccgcgcttgcctccgccctgggcgagtattttgagcgtctgtccaccaactacttttttgctgatttctggctgggcgaaaccattgccaacggggagtttgttcactatccggatgagaaatggttcccgctgacagaggatgactcgctgccggacggtattctcgatcagtatctgcgcgattattatgatccggaaaatgatttgcagggcagccagctgattgacctgcaatcctccaatgaggagcgcggtatctgcgccctgccgtttacccgccagtctgacggcaaaacggtgtatattccgatgaatatcgtcgccaacctgtatgtgtccaacggcatgtccgccgggaacacccgcaatgaagcccgcgtgcagggattatcggaagtctttgaacgttatgtgaaaaaccgcattattgctgagcgcatcagcttaccggcgatcccggaagaggtgctggcgcgttatccgcaggtcactgagtcaatccgcaccctggaaagcgaaggtttcccgatcttctgttttgatgcctctctcggcggtcagtatccggtcatctgtgtggtgctgtttaacccggccaacggtacctgttttgcctctttcggcgctcatcctgatttcggtgttgcactggagcggactgtcactgagctgttacagggacgcagcctgaaagacctcgatgttttcaccgcaccgacctttgatgacgaggaagtggcggatcagaccaacctggaaactcactttattgattcaagcggcctgatcagctgggatctgtttaaacaggatgcggattatgatttcgctgactggcagttccgcggcaccaccgaagaagaattcaccacactgatggcacagttcgcggcatccggccacgaagtgtatattgccgattatgagcatctcggtgtgtatgcctgccgtatcctggtgccgggcatgtcagatatctatccggtggaagatttgcatatggccaataacgccatgggtattcatctgcgtgaaactattctcgcgctgccggaaagccgttaccgtcaggaagattatctctctctgctggcgcagctggatgaagaaggccatgacgatttcacccgtgtccgtgaattgctgggcattgccgccggtaaagataacggctggtccaccctgcgcatcggtgagctgaaatccatgctggcactggccggtggtgataccgatcaggcgctggcctgggtggagtggacacaggacttcaacgccagtgttctcagtgccgcacgggcaaactattaccgctgtctgcataccctgctgctgttaacacaggagccggagcgcgacacagaacagtacctgccggcgtttgcccgtatgtatggtcaggaaaccctgaatgcggcgctggatgccctgaacggcaaaaactgtttcttcgggttatgtgcatcagataataatttaacggcatttcctgcgcatcaggcattactggctgcttatgaaaaactgcaaaaagcaaaagcgcatttttggctaaacgataaaaatgcgatttaa

SEQ ID NO: 275676 - DNA, 861 bp, Morganella morganii
atgaaaactgacgcactttttaatttattatctcctgccgatatggcacatgttgcagacgatgtgggtgtctataaagcaacgaaagcccctcacatcacatacttatctgcattcatggcaggaattttcatctcagtaggttttgtcttttatattacagccaccaccggtaccgcaggcatagtgccttttggtatcgctaaacttatcggtggtttatgtttctcgctcggtctgatgctggttgtggtttgcggggctgacttattcacctccaccgtattaaccagcgtggcaaaagccaccgggcgtatcacctggggacagatgtttgcaaactggacccgcgtgtatttcggtaacctggtcggcgccctcttctttgtcgccctcatctggtacgccggacagtatatggcagccgacgggctgtggggattaaatatcctgcaaacagcggatcataagcttcatcacacctttattgaagccgtctgtctcgggattctggcaaacttaatggtttgtctggcggtatggatgagctacgcaggccgtagtctgaccgataaacttttagctttagtcttacctatcggtatgtttgttgccagcggatttgagcacagtatcgccaatatgtttatgatcccgatggggattgcgattaaaaattttgcaccttctgaattctggactatggttggttcgtcgcctgaacagtttccgtccctgacagtttctgatttcgtgattaacaacctgattccggtcaccatcggcaacattattggtggtgcagttttagtaggtctgacttattggctgattcatttacgcggtgaccagaagcattaa

SEQ ID NO: 275677 - DNA, 2283 bp, Morganella morganii
atgtcagaattaaatgaaaaattcgcttcagcatggcaaggctttaatctgggtgactggtcacaggaagttaacgtccgtgactttatccagaaaaactacaccccatatgaaggcgatgagtctttcttagcgggcgctacagaggcaacaactgctctgtgggcgaaagttatggaaggcatcaaaatcgaaaacagtacccacgctcctatcgattttgacactgatctgccgtctactatcacttctcacgatgccggttacatcgaccagtctttagaaaaagtcgttggtctgcagactgaaaaacctctgaaacgtgcaatgctgccgttcggtggtatccgtatgatcgaaggttcatgcaaagcctacggccgcgaaatgaacccggaaatcgaaaaaatcttcaccgagtaccgtaaaacgcacaaccagggtgtgttcgacgtttatactccggacatcatccgctgccgtaaatccggtgttctgaccggtctgcctgacgcatacggccgtggtcgtatcatcggtgactaccgtcgtgttgcactgtacggtatcgacttcctgatgaaagacaaattcgcacagttcacttctctgcaggctaaattagaaagcggcgaagatctgcgtgaaactatccagctgcgtgaagaaatcgcagaacagcaccgtgcattaggccagatgaaagaaatggctgccaaatacggtctggatatctcccgtcctgctgctaacgctcaggaagctgcacagtggacttacttcggctacctggctgctgttaagtctcagaacggtgctgcaatgtccttcggccgtgtttccacattcctggacgtttacatccagcgtgacctggaacaaggcaaaattaccgaagttgaagctcaggaaatcgttgaccacctgatcatgaaactgcgtatggtccgcttcctgcgtacccctgagtatgatgaactgttctccggtgacccaatctgggcaacagaatcactggcaggtatgggtaccgacggccgtactctggtaaccaaaaacagcttccgtttcctgaacaccctgtacaccatgggtccttcaccggaaccaaacatgaccatcctgtggtctgaaaaactgcctctgaacttcaaacgttatgcagctaaagtgtctatcgatacctcttctgtacagtatgagaacgatgacctgatgcgtcctgactttgataacgatgactacgcaatcgcatgctgcgtgagcccgatggttgtcggtaaacaaatgcagttcttcggtgcccgtgcaaacatggctaaaactctgctgtatgcaatcaacggcggtgttgacgaaaaactgaaaatccaggttggtcctaaacacgaaccaattcacacagatgttctggattatgatgttgttatggctcgtctggatgaattcatggactggctggcaactaactatgtgactgcactgaactgcattcactatatgcacgacaagtacagctacgaagcagctctgatggctctgcatgaccgtgatgtatatcgtactatggcatgtggtatcgcaggtctgtctgttgcagctgactccctgtctgctatcaaatatgcgaaagtaagcccgattattgatgaaagcggcctggctgttgacttcaaaatcgaaggtgaatatccgcagttcggtaacaacgactcccgtgttgatgacatcgcatgtgacatcgttgaacgtttcatgaagaaaattcagaaacaccacatgtaccgtaacgcggttcctacacagtcaattctgaccatcacttctaacgttgtgtatggtaagaaaaccggtaacactccagacggccgtcgcgcaggcgctccgttcggaccaggtgctaaccctatgcacggccgtgaccagaaaggtgctgttgcctctctgacttccgttgctaaactgccgtttgcttacgcgaaagatggtatttcctacaccttctctatcgtaccaaacgcattaggtaaagatgacgatgttcgtcgtactaacctggctggcctgatggatggttacttccaccacgaatcaagcatcgaaggtggtcagcacctgaacgtgaacgtaatgaaccgtgaaatgctgttagaagcaatggaaaatcctgagaaatatcctcagctgactatccgtgtttcaggctacgcagttcgtttcaactcactgactaaagaacagcagaaagacgttattacccgtacattcacaaaatccatgtaa

SEQ ID NO: 275678 - DNA, 741 bp, Morganella morganii
atgtcagtattaggtcgtattcactcatttgaatcctgcgggaccgttgatggcccgggcattcgttttatcgtctttttccagggctgtctgatgcgttgcctgtattgtcataaccgcgatacatgggatctgcatgacggtcaggaagtcactgtggacgagttaatgaaagaagcggtcacataccgccactttatgaatgcatccggcggcggtgtgacagcatccggtggtgaagcgatactgcaggctgagttcgtgcgtgactggttccgtgagtgtaagaaagaaggtattcacacctgcctggataccaatggttttgtccgccgttatgacccggtcattgacgagctgatggaagtaaccgatttggttatgctggatttaaaacaactcgatgacagcatccaccagaatttagtcggcgtatccaatcaccgcacattacagttcgcccgttatctcgctgaacgcaatcagaaaacctgggtacgctatgtcgtcgtgccgggctggtctgatgatgagcattccgcccaccttctcggtgatttcaccaaagatatgaagaatatcgagaagattgaactgctgccttaccacgagttaggtaagcataaatggacggcaatgaatgaagaatacaaacttgatggtgttaagccgccgtcaaaagagaccatggaaaaagtgaaatccatcctggaaagctatggtcataaagtgatgtattaa

SEQ ID NO: 275679 - DNA, 1167 bp, Morganella morganii
atgtacaagatctccggctcaccttctttacccgattctgtcagtcccccggaaatatcatcgcccccgctttcttctgataccacaacagtattccccgggctgataacagaccgtcaggccgttatctctcagaccggtatcgccgcagagcaccttgccccgcttcaggcattagctgaaaagcagcaactggtgatcagcttccgtccggttgaggcgaccgcaaccggccttatcagtgccggttacccgaccaaaaattttactatcaaagggaaaagtgccaactgggggccgatggccggatttattccggttgatcagttttacagtaaactgtgcggacagaaacataagactgaactgatgaacaggaaagtcgcagaatgtctccgggacggccatgccacagcagataatctgcaaataaccggttcgcgtataaacgagctggttgatatgggattacttacccgtcatcagccggataaaaacggctttatcacactcgaaagcaagtcgcctcatggtcatctgcatttattcaccgcgaaaccggctgaaaatgatttatatgctatctatgtgcagaaaaatgataccccggtgcagattctctgttccccgcaactgaataagccactgaccgctgactatgacctgatgattgtggctccccgtacaaaagatttcggcagtcaggatatcccgcataacccggatgtcagcgcagaagcgtttgcggaaaaacggccttatctgctgcgccgcggatcaacaaaagagattatccgccgggaattactggagagggaagatcctcgttttggtaataacaccccgagagtcgctgccctgatcccacagattaatgcagccctgctttgcggggaaggcagagaagtcgtacatcacagtatggatgccactaaccctttttctgaaatgagtgccaatttccctgtcacctttttcctgccggaatcaccggacggattaccgccaatgctgctggcaaacgatattgaggagttgcggatggtgatacatacgctggaatgtcatggctttatggtaccgcataacccgctgtggagtgatgagatcccgtcactgcgccgggagagttttgaaatgacccggaaactgtttaataccctgtga

SEQ ID NO: 275680 - DNA, 1293 bp, Morganella morganii
atgctcgatccaaatttactgcgtaatgagctggacgcggttgccgaaaaactggctcgcaggggttttaccctggatgtggacacgctgcgcactctcgaagagcgccgcaaggttttacaagttgaaactgaaactctgcaggctgaacgcaactcccgatcgaagtccattggtgaagcgaaagcccgcggtgaagacattgaagcagtgcgccgtgaagtgaacctgttaggggataaactggatgctgccaaatctgcactggatgaagtgcaggctgagttacgcaccattgctctgaatattcctaaccttccggcagacgaagtgccgtttggtaaagatgacagcgataaccctgaagtcagccgctggggcacacctaagcagtatgatttcgaagtgcgcgatcacgtttcactgggtgaaatgactgatggcctggatttcccggctgctgttaaactgaccggtgcgcgtttcgttgtgatgaaaggccagattgcccgcctgcatcgcgctatcgcacagttcatgctggatctgcacacagaacagcacggctatcaggaaatctatgtaccgtatctggttaaccacgatacgctgtacggtaccggtcagttaccgaaatttgccggtgacctgttccataccaaaccactggaagaagaagcggaaaccagcagctatgcgctgatcccgacagctgaagtgcctgtcaccaacctggtccgtgacgaaattctggatgaagcagatctgccgctgcgtatgaccgctcatacaccgtgcttccgttccgaagcgggttcgtatggccgtgatacccgtggtctgatccgtatgcaccagtttgacaaagttgagctggttcagattgtgcatccggaaaaatccatggaagctctggaagaactgaccggccacgctgagaaagtattacagctgctgaacctgccataccgtaaagtgctgctgtgcaccggcgatatgggcttcggttcccgtaaaacctatgaccttgaagtctgggttccggcgcagaacacctaccgtgaaatctcatcctgctctaactgctgggatttccaggcgcgccgtatgcaggctcgcttccgtggtaaagatgataaaaaaccacagctggttcataccctgaacggctccggtctggctgtcggccgtacccttgtggctatcatggaaaactatcagcaggctgatggtcgtatcgaaattccggaagtattacgtccgtatatgaaaggtctgacacatatcggctga

SEQ ID NO: 275681 - DNA, 1344 bp, Morganella morganii
gtgactaacttttctctcgatttttcgcaaaacgattaccagcctctggccgccagaatgcggccggggacactggaacagtacatcggacagactcacctgctggcagagggcaaaccgctgccgcgggctatccgcgccggacagctccactccatgattctgtggggaccgccgggcaccgggaaaaccaccctggcggaagtgatcggccactatgcggatgcggatatagagcgtctgtccgccgtgacctccggggtaaaagagatccgcgaagctatcgagcgggcgcgtcagaaccgtaatctggggcgccgcaccattctgtttgtggatgaggtacaccgcttcaataaaagccagcaggatgcatttctgccgcatattgaggatggtacagtcacctttatcggtgccaccaccgaaaacccgtcatttgaactcaactccgcactgttatcccgcgcccgtgtttatctgctcaaatccctgtcaccggaagatatcgaagcggttctgattcaggcgctgaatgattctgagcgcggactgggcggacaaaatatcgtcctgccggatgagacccgcaaactgctggccgagctggtcgccggtgatgcccgccgttcgctgaatgtgctggaaatgatggcggatatggccgaaaccggtgctgacggcaaacgtgttctgaccacagaactgctgaaggaagtcagcggggaacgcagcgcccgctttgataacaaaggcgatcgctactacgacctgatttccgcactgcacaagtcagtgcgcggctcggcaccggatgccgcactctactggtatgcccggattatcactgcaggcggggatccgctctatgtggcgcgtcgtctgctggcgattgcatcagaagatgtcggtaatgcggatccgcgcgccatgcaggtcgccatttcagcgtgggactgctttacccgtgtgggaccggcggaaggtgagcgggcgattgcccaggcgattgtttatctcgcctgtgcaccgaaaagtaacgccgtttacaccgccttcaaagccgcgatgcgtgatgcaaaagaagggcgggattatgacgtgccggagcatctgcgcaacgcgccgaccaaactgatgaaagaaatggggctcggcaaagagtaccgttacgcccatgacgaaacgaatgcgtatgccgccggagaagtctattttccgcctgaaatgcgtgatacccgctactattttccggcaaaccggggcatggaaggaaaaatcggcgagaaactcgcctggcttgctgagcaggatcaaaatagcccgataaaacgctaccgttaa

SEQ ID NO: 275682 - DNA, 612 bp, Morganella morganii
atgaaaaaggtgtttatcacagcctgcctgctggcaggtgccgcagtcagtgcagcacacgcagatacccgcagtgatcttcagtcacgtctgggaaaagtgaacagtttccatgcgaatttcgcacagaccgtcactgatgctgacggcgcactggttcaggaaggaacaggggatttatgggtgaagcgcccgaacctgttcaactggcagatgagcgcgccggatgaaagtgtgctggtctctgacggcaaaactctgtggttctataacccgtttgttgaacaggtcaccgccacctggctgaaagatgccacgcaaaatacaccgtttatgctgatcacccgtaacgacccggctgactggcagcaatacatggtgagccagcgcggtgacagctttgagctgaaaccgaaaaccagcgacggcaacctgaaattatttactatcactgtaactccggacggtattattcagcagtttgccgccgttgagcaggatggccagaaaagcagctatcagctcaaagggcagcagagtactgatgtgaatatgagcaaattcacctttacaccgccgaagggggttacgctggacgatcagcggcaatga

SEQ ID NO: 275683 - DNA, 3570 bp, Morganella morganii
atgagccaggaatatacagaagacaaacacatcaaattcagaaaaatcagcagcggccgccggttgctggaagccgtccttattgtgatcgggttgtgcgccgtctttctgctggttgctctcttatcgtttaatccgtcagacccgagctggtcccagaccacctggcatgagccggtgaagaatctggccggcagtatcggggcctggtttgcggatattctcttttccgcctttggcatactggcttacaccgtacccccgctgatgatcctggggtgctggtcggccttccgcagtaatgaaaataaagattacgtggactttttctcactctcgatgcgtatcatcggggggctgacacttatcctttcatcctgtgccctggcatccctgaatgtggatgatatgcagaacttcgcggcaggcggggtgatcggcagtttattcagctctgcgctgatgccgtggtttaatgccctcggcgcgacactcgcgctgctcagtctgtgggcgataggtctgatgttgctgaccggctggtcgtggatcaccatcgccgaaaaaaccggtgcagcggtcctttcccctattaccttcatcaccaatcactcccgtgaccgttatgacgaacagtattacgacgatcgtgaatatgacgacgaggacgagtattacgacgatgaggaaacggatgagcaggcagagcacaacaacataccgcagacagcaactgccgcagctctgaccgccgttgcgcctgacagtgaggcacagactcagaccgcacagtaccgtgaatacgatgatgcggatgatgtgctgttttccgctccaaatgcggcggaactggcccatcaggcacattatgaggacccggcggataacagcgacccgctgctgaccccggtgcagaatctctcagcatatccggaaaccgccgctgaacctgtggtgtctgttgtgcatgcacaggaaccggctgcacaggaacacagcgcaccggctgccgatgaacctgaacactaccgttttgatgtcccggatgcttaccggacaactgttgacctgaatgccccgatcaatgtgccggatattcagccggaaccggagcctgaaccggcagcaccgcaatgggaaaacccgtttgcgggaagcggccgtacagaaccggtctttacgttcgatctgcctgatgtgccggataccggtgataacggcagcgcgcatcttagctctgcggcggcagcaactgcagcggcggcctttagtgcggtacaggtcaaacagggtctcggccctgaactgccgcgtccgaatccggtgcgcctcccgacacggcgcgagctttacggcatccgcattccgtctcagcgtgacgcggaacttgagcgtctgcgccgtgagcaggatgaatttgcacaactgcatcagccggaacatcaggccgcacagactgagccggatgaagatgatgtattacaggcgcgcctgcgtgatgaatttatgacgcagcagcgtaaccgctacggcgatgatgagacagatatgtctccggcagcagagccggtgcaggcagtaactgaaccggaaattaccaccggtacgtcctccgcctttatcccggctgcatctgcctatcaggcaccggtcagccatcactcctttgcgtctgcaccgccggtggcggatgttcacccggcggcagaagaagacgatgaagatgagcaggaagctcagcgtcttcaggcgcagtttatgcagatgcagcaacagcgctacagcgggcaggctgacgctattttatctgatctggccgaactgaaagccttctctccggtggaggatctggtcgatccggaaccggcagagccgctgtttatcccgacaccggtcaccgcccctgcggcagaaccggcaccggtttatgccgcaccggagaccgctgctcagcgctttgaacctgttgccgcaccacagcagaatgcggcaccggtaacgtcacaggaagcacagttacaaaaacagatggaagagagcctgttccatccgttcctggtccgcaatgaccagccgctgccgaaatcaaccaccccgatgccgtctctggatctgctggcttcaccgccgggtaccattgagccggtggatgaatttgcgatggagcagacagcccgtctgattgaggcgcggctcaatgacttccgcatcaaagcccgtgtggtcggttatgaaccgggtccggtgatcacccgctttgagctggatctggcaccgggtgtgaaagcctcgcgtatttccaacctgtcccgcgacctggcgcgttcactctccacggttgcggtgcgtgtggtggaagttatcccgggcaagccgtatgtggggctggaactgccgaatgaaaaacgtcagaccgtctatctgcgcgaagtgctggactgcgacgaattccgcgatacgccatcaccgctctctgtggtgctggggaaagatatctccggtcagccggtggtggcagatctgggcaaaatgccgcacctgctggtggcaggtacaacgggctccggtaaatcagtcggcgtaaacgccatgattatcagcatcctgtataaagcgaaaccggaagatgtccgctttatcatgatcgacccgaaaatgctggaactctctgtttatgaaggtattccgcacctgctgacccaggtggtgactgacatgaaagacgccgccaatgccctcggctggtgtgtggcggaaatggaacggcgctataaactgatgtctgctctcggggtgcgtaaccttgcggggtataacgaaaaaatcctgatggcggaatccatgggacggccgattccggatccgttctggaaaccgacagacagcatggaaatgacgcatccggttctgaaaaaagagccgtatatcgtggtcatggtggatgaatttgctgacctgatgatgaccgccggtaaaaaagtggaagaacacatcgcccgtctggcacagaaagcccgtgcagcggggatccacctcgtactggcgacacagcgtccgtcagtggatgttatcaccggtctgattaaagccaacatcccgacccgtatcgcctttaccgtctccagtaagattgactcacgaaccatcctcgaccagggcggcgcggaatctctgctgggtaacggggacatgctctatctgccgcagggtgccaatgcgccgctgcgtgttcacggcgcgtttgtccgtgaccaggaagtgcatgatgtggtgaatgactggaaagcccgtggtcgtccggaatatatcgataacatcacccgtggcggtgaggacggcgaaggcggcagttctgtcagcggagaagatctggatccgctgttcgatcaggcggtacaattcgtcacagaaaaacagcgggtttccatttccggtgttcagcgtcagttccgcatcggttataaccgggcggcgcggatcgtggaagaaatggaagaacagggcattgtcagtgaaccgggccataacggtaaccgcgaagtactggcaccgtcctcaaataacttttaa

SEQ ID NO: 275684 - DNA, 495 bp, Morganella morganii
atgattgataacaaaaagcgtccgggtaaagatcttgacagaatcgacaggaatattcttaacgaattgcagaaagatggccgtatctctaacgtcgaactctccaaacgtgtgggtctgtctccgactccgtgtctggaacgtgtgcgccgtttagagcgtcagggctttatcaccgggtataccgcgctgctgaatccgcactatctggatgcctccctgctggtattcgtggaaattacccttaaccgcggggcaccggatgtgtttgaacagttcaacaccgccgtgcagaagctggaagagattcaggaatgtcacctggtttccggtgattttgactacctgttgaaaactcgtgtgccggacatgtcggcttaccgcaaactgctgggtgaaactcttctgcgtctgccgggcgtgaacgacacccgtacttacgtggtgatggaagaggtcaaacaaagtaaccgtctggtcatcaagacccgttaa

SEQ ID NO: 275685 - DNA, 960 bp, Morganella morganii
atgaacgcaacccgacacagtaaattaattattctgggttccggccctgccggatataccgctgcggtttatgcggcacgggcgaatttaaatccggtgctgattaccggggtggaagtcggtggtcagttaaccaccaccaccgaagtggaaaactggccgggtgacccggaaggtctgaccgggccgggcctgatggagcgtatgcaggctcacgccgaaaaatttgagactgaaatcatcaatgattacatcaccggcgtagatttcagcaaacgcccgtttaccctgaccggtgaaaatacctatacctgtgacgcgctgattatcgccaccggcgcatccgcccgttatatcggcctgccgtcagaagaggctttcaaaggccgtggtgtgtccgcctgtgccacctgtgacggctttttctaccgtaaccagaaagtcgcggtcgtcggcggcggtaacaccgctgtggaagaagcactgtatctctccaatatcgcatcagaagtgcatctgatccaccgccgtgacagcttccgtgctgaaaaaatccttatcagccgtctgatggataaggttcagaacggcaatatcgttctgcacactgaccgcacactggatgaagtaatcggtgatcagatgggtgtgaccgctgttcgtctgcgtgacgccaaaagtgacgcaaccgaagagctgccggtgatgggctgctttatcgccatcggccacagcccgaataccggtatttttgagggacatctggatctggaaaacggctatatccgtgttcagtccggcacgcacggtaatgcaacacagacatcagttccgggtgtgtttgccgccggtgatgtgatggatcatatctaccgtcaggcgattacctctgcgggaaccggatgcatggccgcactggatgccgagcgctatctcgacagcctcgcagacaacaaataa

SEQ ID NO: 275686 - DNA, 1770 bp, Morganella morganii
atggataaatcaagacagtcagaactcgtccgctggttaaaacttcaggcggcaccggcccggcgatggttacgcctctcgatgttgctgggtgtgctcagcggtttactgattatcggccaggcctggtgcctcgctgtcctccttcagtccctcattatggagcacatgccccgcgaacagctcctcactctgttcactgtactggtcatactgtttattgcccgcgccgttgttgccgcgatccgcgaacgggtcgggtttatctgcggacaggtggtgaggcgtgatatccgccggacagtactggataaactggaacagctcggcccggtacgggtaaaaggcaaaccggcaggcagctgggcgacgattattctcgaacagattgatgatatgcaggattactattcccgctatctgccgcagatgaccctgtccgccaccataccaatgatgattctgatcacgctgttcccgatcaactgggcggcagcgctgattctgctggtgacagcgccgctgatccccgtttttatggcactggtgggcctgggtgccgccgatgccaaccgccgtaacttcctggccctgagccgcctgagcggcgatttcctcgaccgtctgcgcgggctggaaaccatccgcttcttccaccgcggtcgtgaggaagtgaaacagattgatgatgccaccgaggatttccgctcacgcactatggaagtgctgcgtatggcattcctctcctccgccgtgctggagtttttcgcggcgatctcaattgccgtcgtcgcggtttattttggtttttcctatctcggtgaactgaatttcggcagttacggcatgggtgtcacgctgtttgccgggtttattgccctgatcctcgcgccggagtttttccagccgctgcgtgatctcggtacctattaccacgcaaaagcacaggcggtgggcgcggcggaatccctgtttaccctgttatccgcagagaacagtgatgacgaattgctgggcacagaaccgctggcaccggcagagcagattgctgttaccgcaaccgacctggtgatttttgcctcgtcaggggaaaaactggccgggccgctgaatttcaccctgaacgccgggcagcgtatcgcgcttgtcggccagagcggtgcagggaaaagttcgctgctcaatctgctgctgggttttctgccgtatgaaggcagtatccggatcaatcagcaggagctgcgtgatatcagcccggaaagctggcggacacagctgagctgggtgggacaaaatccgcacctgccggaacagaccattctggacaatatccgcctgagccgcccggatgcctcttctgaggaaatcacggcggtgatggaaaaagcctatgtgaccgattttattgattcgctgcctgacggggtcaataccgtggtcggggataatgccgcgcggctctctgtcggccaggcgcagcggattgcggtggcacgcgccctgctcaatccgtgccatctgctgctgctggatgagccgtccgccagcctggatgctcacagtgaggagcgcgtgatgcatgccctgaatgaggcggcacatcagcaaaccactctgctggtgacacacctgctggaagaaacccgtgactatgatgaagtctgggtgatggataaaggtcttattattgaacagggcagctatgctgctctgcaacagcaacagggtgcgtttgcacagttgctgtcacaccggacgggggatctgtaa

SEQ ID NO: 275687 - DNA, 1746 bp, Morganella morganii
atgcgtgttttactgccgtttttagccctctaccgccgccactggtttttactgacgctagggatcctgctggcgattgccacgctgctcgccagtatcgggctgctgacgctgtccggctggttcctcgccggtaccgctattgccggtgtgccggggattgccttttttaactatatgctgcctgccgccggagtgcgcggtgccgctatctcccgcactgccggacgctatgcggaacggctggtcagccacagcgcgaccttccgtgtgctgaaacatctgcgggtatttgcctttgaaaaaatcctgccgctgacaccgggcggtattgcccgcttccgtcagggggaactgctcaaccggctggtcggggatgtggaaacgctggatcacctctatctgcgggtgatttcgccgattgttgccgcgctggtggtgattgcggtcctgacattcgggctgggttttctcgatctgactatcgcttatgcactgggcgggtttatgaccttcctgctgtttgccctgccggtggtgttctattacgccggtaagccaatcggtgtgcagctgaccacactgcgtgcacagtaccgcaccctgctgaccagcgcattacagggacaggcagaactgaccattttcggtgcacagtcccgcttccgctctcagttggcagagaccgaacaacgctggctggtacaacagcagcgccaggccggtctgaccggactttcccaggcgattatcattctggcgaccgggtttgccgttgcgctgatgctgtggatggcttccggggtcagctggccgtaccgcgaaagcggtgccattatcgctctgtttgtcttctgtgcgctggctgcatttgaggcattaggcccggtggcggtggctttccagcatctcggccaggtgatgacctccgcagagcgtgtatcgcagatagtggacaccaaaccggaagtgactttcccggccagtggtccggcagcctccgcacaggtcagcgtcagcctcagtggtgtcgggtttacctatccgggacagccgctgccggtgctgaaagatatctccctgacactgcgtgccggtgagcacctcgccctgctgggaaaaaccggctgcggaaaatccaccttattgcagctgctgacccgggcatgggatgtcagtgaaggtgaaatccgcctgaatgaccagccgattgccgcttatgatgaaaacaccctccggtcactgatggcagtggttccgcaacgtattcatgtgttcaataacacactgcgcggtaatctgcggatcgggaataacgaagcaaccgatgcgcagctgaatgccgtgctggcacaggtcgggctggaaaacctgctggataacgaccagggcctgaatgcctggatcggcgaaggcggccgtctgctttccggcggcgaacagcgccgtctcggcatcgcccgcgccctgctgcacaatgcgccgttcctgctgctcgatgagccgacagaaggactggatgcagataccgagcagcatattctcgccctgctgcgggatatcggccgtgaccggaccatgcttatcatcacccaccgtttacagggcctggaacacatggacacgctgtgtgtgatggacggagggcagatagccgaacaaggctctcacgacgcgctgctggcgcgcagaggccgttattatcagtttgtgaaccgtattccggtcatgaccggggggatctga

SEQ ID NO: 275688 - DNA, 720 bp, Morganella morganii
atgccgttttatcagctggatgaggaattgctctttccgcctgttgaacacgcgctgaccgacccggacggattgctggccaccggcggggatctctccccttcccggttgctgctcgcctaccgggaagggattttcccgtggtattcccccggtgaacccattctgtggtggtcgccggatccgcgtgcggtattgtatccggcggagctgcatgtcagccgttcgctgcacaagattctgaaaaaacacccgtaccgggtgacgcttaatcatgcctttgagcgggtcatccgggcctgcacagagcgggatgaaggcacctggataggggacgatattgtggccgcctatatccggctgcatcaggcaggacgtgctcattcggtcgaagtgtgggatgatgacgcgctggtcggcgggctgtatggcctgaacaccgggttactgttctgcggggagtcaatgttcagccgtgtcagtaacgggtcaaaaatcgcctttatgaccttttttgcccactttaccggccacggcggcaggatgtttgattgccagatactgaatcattacaccgaatcattcggtgcgcgggagatcccgcgacaggcgtttatccgtcagctttatcagctgcgtgataatcatttaccgcagtcatgctggcagccgcagacattagcacgtccggtgccgtcacaactgccgccttttttataa

SEQ ID NO: 275689 - DNA, 219 bp, Morganella morganii
atggccaaagaagacaatattgaaatgcaaggcactgtgttagatacactgccgaacacgatgttccgtgtggaactggaaaacggacacgttgtgactgcacatatctccggtaaaatgcgtaaaaactatatccgcatcctgacaggcgacaaggttacagtagaactgaccccatatgacctgagcaaaggccgtatcgtcttccgtagccgctga

SEQ ID NO: 275690 - DNA, 2286 bp, Morganella morganii
atgctcaatcaagaattagagctcagtctgaatatcgcctttgccaaagcaagggacaaccggcatgaatttatgaccgtagagcacctgctgctggcgttattaggtaacaaatcagcccgtgaggcgcttgaagcctgccgcgttaacctggccatcctgcgccaggaacttgagcattttattgaacagaccacaccgttgctgccggaaggggatgatcgcgaaacccagccgacactgagtttccagcgcgtgttacagcgtgccgtcttccatgtccagtcatccggccgtaatgaagtcaacggcgcgaatgtgctggtggccattttcagtgagcaggagtcccagggggcttatctgctgcgcaagcatgatgtcagccgtctggatattgtgaatttcatctctcacggcaccaccaaaggtgaagatgaaaatgagagcggcccgtcctttgatgagccgtcacagtctgccgccgaagagagtaccggcggcgaggacagcctggataacttcaccaccaatcttaatgacctggcacgtaaaggccagattgacccgctgatcggccgtcaggcggagctggagcgcaccattcaggtgctgtgccgccgccgtaagaataacccgctgtttgtcggggaatccggggtcggtaaaaccgcgattgcggaagggctcgcctggcgtatcgagcaggatgatgtaccggaagtgatcaaaggctataccattttttctctggatatcggttcactgctggccggtaccaaataccgcggcgatttcgagaagcgctttaaggcgctgctgaaagtgctggagaaaaacgaaaaaagcattctgtttattgatgagatccacaccatcattggtgccggtgcggcatccggtggtcaggtggatgcggcaaacctgattaaaccgttattatccaacgggaaaatccgggtaataggttccacgacctatcaggaattcagtaatatctttgataaagataaagcgctgacccgccgtttccagaaaattgatatcaatgaaccgactgccgatgaaaccgtgcgcatcattaacggcctgaaagcccgatatgaggcacaccacgatgtgcgttacaccgcgaaagccattcaggctgcagtggatctgtcggtgaaatacatcactgaccgccatctgccggataaagcaattgatgtcattgatgaagccggggcgagaacccgtctgatgccgctgagccgccgtaagaaaaccattggcgtcggtgaaattgaggcgattgtggcgcggatcgcgcgtatcccggaaaaaaccgtttcgagcagtgataaagatctgctgcgtaacctcgacagccgcctgaaaatgctggtcttcggtcaggatccggcgattgatgccctgacggaatccatcaaaatgagccgtgcgggtctggggaacgagcaaaaaccgattggtgccttcctgctggcagggccgaccggggtcgggaaaaccgaagtcactgtgcagttatccaaagcaatgggtatcaagctgctgcgctttgatatgtccgagtatatggagcgtcacaccgtcagtcgtctgattggtgcgcctccgggctatgtcgggtttgatcagggcggattgctgactgatgcggttatcaagcatccgtattcggtggttctgctggatgaaatcgaaaaagcgcatccggatgtctttaatctgttattacaggtaatggataacgggacgctgacggacaacaacgggcgcaaagcggatttccgcaatgtgatcctggtgatgaccaccaacgccggtgtgcgtgaaacccagcgtaaatccatcgggtttaccgagcaggacaacagcactgacgcgatggcggaaatcaaacgggtgttcacaccggagttccgtaaccgtctggacggcattgtctggtttaatgcgctgtcgcagccgattatcgcccaggtggtcgacaagtttattgttgaactccaggcgcagctggatgcgaaaggtgtttccattgaagtgtctgcccgtgcccgtacatggctggcagaaaaagggtatgacccggcgatgggcgcacgtccgatggcccgtgtgattcaggataaactgaaaaaaccgctggcgaacgaattactgttcggtgagctggtgaacggcggttcggtgattatcgatcttgataagaagaaagatgaactgacttaccgcttcagtgccctgaaagagaaatccggcgacccggtagcctga

SEQ ID NO: 275691 - DNA, 321 bp, Morganella morganii
atgagtcactatcaatctgaatcacaaacggatgtcacgctcagggaaaaagcgctgcagaagatacagccaccgtcaatgtacaaggtggttttaaacaatgacgactatacccctatggactttgtggttgaagttttacaaaagttcttttcttataatgttgatcgtgcgacgcagattatgctcgacatccattatcagggaaaagggatctgcggggtatttaccgctgaaatcgctgaaatgaaaacaacactggtcaatacgtacgcgaaagacaacgatcatccgttgctgtgtacactcgagaaggtataa

SEQ ID NO: 275692 - DNA, 231 bp, Morganella morganii
atggaaacaggtactgttaagtggttcaacaacgccaagggtttcgggtttatctgcccgtcggatggtggtgacgatatttttgtacactattcgacgattcagatggacggctaccgcacgctgaaggcgggtcagaaagtgaattatgacaccattcagggaccaaaagggcatcacgtcagtgtgattattccggttactgaagatgacgacaccacagcgccgtaa

SEQ ID NO: 275693 - DNA, 1947 bp, Morganella morganii
atgagcgcattattagaactgcggaatatttaccgccgttatccttccggagacagcagtgtcacggtgctggatgatgtctcactgactatcagtgccggtgaaatggtggcgattatcggccagtccggctccggtaaatccacgctgatgaatatcctcggctgcctggacacgccgagtgacgggcactattttgttgccgggaaaaacacggcagaactgagcggtgatgaactggcggcgctgcgccgtgaacatttcggctttattttccagcgttaccatctgttatcccacctcagtgctgagcaaaatgtggaaatgccggctatctatgccggactgagcgcccgtgagcgccgtgaacgggccgcagcgctgttgcagcgcctggggctgggtgagcggctgatttaccggccgggacagctctccggcggacagcagcagcgtgtcagtatcgcccgtgccctgatgaatggcggggaagtgatcctcgcggatgaaccgaccggcgcactcgacagtcagtcaggtaaagaggtgatggctattctgcgccagctctgtgacgccgggcatacggtgattatcgtcacccatgatccgtccattgccgcacaggctgcacggatcattgaaatcaaagacgggcatatcctcagcgacagcgggtcggtaataaacccgcaggcgaaagcactggccgcgaaaccaccgctgaaaagcagcgcgttcagccgtttcctcggccgctttaatgaagcgctgctgatggcatggcgcgccatggtggtcaacaagatgcggactctgctcaccatgctgggcattattatcgggattgcctccgtggtaaccatattggtgatcggggatgccgccaaagcgctggtgttgtcggatatcaaatccatcggcaccaacaccatttttgtctatcccggcaaagacttcggcagtgatccgggacaggatcagcaatccctgaaacccggcgatgtggatgttatccgccagcagccgtatgtttatgcggcgtcggcggaaattgagaacggtgcgcgtctgcgccggggcaatcttgattccgcagcgcgtgttaccggcatcgggccggactttttcactgtgtatgacatgcgtttcggcgaagggcgggcgttctctccggagatgtacgagcgccgctcccaggttgtcatcatcgatatgaataccaaacgcaaactcttcccgcatcagaataatgtgatcggggaaatgctgctggtgggaaacatgcctgcaacggtggtcggtgtgattgcggatcgcaaatccatgttcggtaactcgaaaaccttgcaggtctggatgccgtacaccaccctgaccgggcggctgatgaagcgcaactatctggatatgatctccgtgcgtatccgcgacggttacaacaccaaaaatgcggaagagcaactggtgcggctgatgacgctgcgccacggcaaaaaagacaccttcacctataacctcgacagcattgtgaaaaccgtggataaaaccacgaccaccatgcagcttttcctgaccctggtagccgtgatttcactggtggtggggggaattggtgtgatgaacatcatgctggtcagtgtaacggagcgcacccgtgaaatcggcatccgtatggcggtcggtgcacgggcgggggatgtgatgcagcagttcctgattgaggcggtgctggtgtgtctgatgggcggggctatcggcctcgggctttcttattccattgcctttgccgccaaaatggcactgccggactgggagtttgtcttccgccctgcggcgattgtcagcgcggtgctctgttcgaccgctatcgggatcatcttcggctttctgccggccagaaatgcggctaaacttgatcctattgatgcactggcgcgggaatag

SEQ ID NO: 275694 - DNA, 1110 bp, Morganella morganii
atgaaagcagtttcaaagaaaaaaatagtgaccgccggcattctgattattctgatcgccggcggtttctggttctttacccgcgaagatgcgccggtcagctatatgacagcggatgtgcagcgcggcacactcgaaaagaaagtgatggccaccggcaagctggatgcactgcagaaagtggatgtcggtgcgcaggtcaacgggcagttgcagaccctgaatgtcaaagagggggattttgttaagaaaggggatctgttggctgtcatcgacccggtcaaagcacagaacgtggtgattgaggccgagcagacggtcagtgaaatcaaagcacgtctcaagcaggcggaggcggagtatgcctttgcacaggcgacctatcagcggcggctggcactggcaaaaactcaggttatctcaaagcaggatgtggacgaggcgcggcgcaatatggatgtgcagcgcgcggcgattgacacctacaaggcccaggtggcacgcaatcaggccacactcgataccgcccgcaatgatttgcagtacaccaatatccgcgcgccgatggacggcgtggtgacggagctgaaaacattacaggggcagacggtgattgccatgcagcaggcgccgaccatcctctccctggcggatctcgataccatgctggtaaatgcggaagtttccgaggcagatgtggtgtatctgaaacccggccagaaagccacgttcagtgtgctgggtgcgccggataaaaccttcagcggcgtgatcaccgatatcctgccgaaaccgcagaaaatcaatgacgctattttctattatgcccgttttgaagtgccgaacccgcagcatgtgctgaagctggacatgactgcccaggtcactatcgcgctggaaaaccgtgaaaacgtgctgaaaatcccgctggcggcactcggtaaagagatctctccgaccgaatacgaagtgcaggtgctggtgaatggtcagccggaaacccgtcaggtgacactcggtacccgtaatgatgtggaagctgaggtgacaaaaggtctggcggagcatgagaaagtggtgaccggtattgatgacggcacagcaggataa

SEQ ID NO: 275695 - DNA, 1683 bp, Morganella morganii
atgattctggaaagagtggaaattctgggttttcgcggtattaaccgcctgtcattaccactgaccggcaatacggtactgatcggtgagaacgcctggggtaaatccagcctgctggatgctctgacgctgacactgtcaccgcaggcactgaatgcgaaatttgtcctgagtgatttttatcacgctgctgacagtgaagccgggcctgtccgtcacttacagatcgtcctgacattccgtgaaacccggcccggacgttcccgctcccgccgtttccgtgaactggcaccgctgtggcgcactaacggggatgaatatctgcggatcaactaccgtgtcagcgcggatctggcggatgataacaccattaccagtcagcgcacttttctggatgaggcgggcgagccgctgctgccggcggaaaccgataagtttatcagcgagattatccggctctatccggtactgcgtctgcgcgatgcccgttttatgcgcggcctgagaaaaaatgtgcctgattgtgaggatgaggaatacgatctccgcactcagaccgagaccttcaataacaggatggcggatctgacccgcgccctggtaagcaacccgcagacactctccaatgatgatttgcaggatggccttgaggccatgaaacagctgctcagccactattttgccgagcagggggagtatctgcttgatcgccgtaaagccaaacggctgaatatcgaaccgcgccagcgggcgtggcaggcgctggaagggatcaaccgcgtggtggcaggtcccaatcagcgcaatgtgcggctgattatcctcggtatgtttgccgcgctgctccagtccaacagcggtctgaaactcgacccctatgcccgtccgatcattatcgttgaagacccggaaacccgcctgcatccgattatgttgtctgtggcgtgggggctgctcaatctgttttccttacagcgcattaccaccaccaactccggtgagctgctttcactggtaccgattcatgatatctgccgcctggtgcgggaatccacccgcgttgccgcctaccggctgggggaaaaccatctgtcaccggaagagctgcggcgtatctcattccatatccgctttaaccgcccgtcggcactgtttgcccgctgctggctgctggtggagggtgaaacggaaatctggctgatgaacgacctggcaaaacagtgtaattattactttgagactgaagggatcaaggtgattgagtttgcccagtgcggtcttaaacctttgttaaagtttgccaacaaaatgggtatagaatggcatactctggttgacggcgacgaagccggtaagaaatacgcggccactgccgcacacttctcatcggggctcaatgatgtcgagcaggacagactgacccgtctgcccgcgccggatatggagcactttttatatcgggaggggttcagccgcctgtatcaccaggtcgcggatattccggaaaatatgaaaatgccggcccgccgggtcataaccaaagcgattcaccgcacctcaaaaccggatctggcgatcgcgattgccaacaatgcggccagccggggtgtggattctatcccgctgttgctgcgccggatgttctcccgcgtggcatggctcgccagagggcgcgctaactga

SEQ ID NO: 275696 - DNA, 900 bp, Morganella morganii
atgtattcagggttattaattattctcgccccgctcattgcgggttatctcatcccggtcagcagcacggcactgaaaaaaatcatcggtcgcggtctgagcgcgatggtgtatgtgatcctgtttctgatggggataagcctggcgctggtggaaaacctcggggcaaatctgctggtgattgtgcagtacaccctgaccttttctgtggtggtgctgggctgtaatctcgccggactgtttttatacggcaaaaaatacccgtggcaggttcctgctcacaaacagcaaaaaccgccttcccgcctgcatatggtgctggaatccctgcaactgtgtggtgtgctgctgattggttttgccaccgggttattcggctggtcgtttctcgcctttgccggtgccgccagtgaatatgctctgattttcctgctgttcctcgtcgggatccagctgcgcaacagcggcatgacgctgcgccagatcctgatcaaccgccgcggtatgctggtctcgctgatagtggtcattacctcgctgctcggcggcgcactcgcggcactgatagcagggctgccggtcaaaaccgggatggcgctctcctccggcttcggctggtattcgctgtccggtattctgctgaccgacgctttcggcccggtgctcggcagtgtcggcttctttaacgacctggcgcgggaaattgccgcgattatgctgatcccgctgctgatcaaccgccaccgcgccgcagcactcggcctcggcggtgccaccacgatggactttaccctgccggtattgcagcgcagcggcggtgtgtcgattgtcccggccgcgattgtgcacggctttgtcctcagtctgtttgccccggtgctgatagccctgtttacctga

SEQ ID NO: 275697 - DNA, 1449 bp, Morganella morganii
atgccacaacaacggattttagtgctgggtgccagcggttatgtcggacagaatcttatcccgcagctgatcgctgccggtcatcaggtcactgccgccgcccgccgggtggagtggatgcaggcgcagggctgggaaaacacccgctgctgctatgcggatctgtatgataaatccaccctggaaaccctgtttcaggacattgatgtggtgtattacctcgtccacagtatgacggatgaggatgacttactggcgcgggaacgcctggcggcggaaaacgtgcaggagatgctgaataaatctgctgtgcgggaagtcatttacctgagcgccatgcagcataaagacagcgactccccgcacctcgccgcccgcaggctgaccggcgaaatcctcgcggacagccgcgtgccggtcaccgagatccgcgctgccattattgtcggccccggctcagcggcattcgagatcatgcgcgacatggtatacaacctgccgatcctgaccccgccgcgctgggcccgctcaaaatcctcaccggtggccctggaaaacctgctgaattacctgaccggcctgctttctcaccctgcaaccggaaaccgccgctttgatgccatggggccggattacctcagctatctggagatgttccgccattttataaccatcagcggcaaaaagcggctgatgatcccgctgccgatcccgctgcggctgatttcagttcactttttacggcttatcaccacggtaccggaaggtattgccaaagagctgattatggggctgaaatatgatctgcccggcgacggaaagccgcttcaggcgctgatcccgcagacactgctcagttttgatgatgctgtacgcaagactcttaaggatgaagcggatgccgtggataatgaagactgggggtatgacccggaggtccgcgcccgctggcggccgggcttcggtttctatcccaaacaggccggttttaccctgaatacctctgcctccgccgacgccctgtggcacgttgtgcagcagattggcggtaaagacggctatttttatgccaatattctgtggtcagtccgcgcccggctggatgacctgtgcggtaataaagtcacttacggccgcccggatcgcgataccctcgaacccggggataaaatcgacggctggaaagtgatcaccgtgaaaccccggcagcagctctccctgctgttcggtatgaaagcccccgggctgggacggctgacctttaccatccgcgaccacggtcaccagcggacactggatgtccgtgcctggtggcatcccgccggattcagcgggctgctctactggttcgccatgatgcctgctcatttattcatctttaaaggaatggcgaaaaccatcgtcaaacgagcggcagcatacgtcatcccggtatctgataagacataa

SEQ ID NO: 275698 - DNA, 744 bp, Morganella morganii
atgcagaattacagcatgagtattcaattaaaaaacatcaattgcttttacggacagcatcaggcgctgtttgacatcaacctggaatgtggtgcaggcgaaaccatggtgctgctcgggccgagcggcgccggtaagagttcgctgctgcgggcactgaacctgcttgaaatgccgcgctccggtgaactgactattgcggatcaccattttgattttaccaccacgccgtctgccaaagagatccgttccctgcgtcagaacgtcggcatggtgttccagcaatataacctgtggccgcatctgactgtcatggataacctgacagaagcgccgatccgggtgctgggtctgaccagagaagcggctcaggcaaaagcggaaaagctgctgacacgtctgcgtctgactgattttgcaaaccggttcccgctgcatttatccggcggccagcagcagcgtgtggcaattgcccgtgccctgatgatggagccgcaggtactgttattcgatgagccgacagcggcactggacccggaaattacctctcaggtcgtcgatattattaaagagctgtcacagaccgggattacccaggtgattgtgactcacgaagtggatatcgcccgtaaaaccgccagcaaggtggtgtatatggaaaacggccgcatcgtggaacagggcggcgcccaatgctttatcacgccgcagacagaggcatttgccggttatctgtcacactga

SEQ ID NO: 275699 - DNA, 735 bp, Morganella morganii
atgaaaaaactggttattgccgcattaatcggcgcgtttgctttctccgcagcggcggcagaaaaagaaaaaatccgtttcgcgacagaagcgagttatgccccgtttgaaaccgtgaatgagaaaaacgaaatcgtcggttttgatgtggatctggctcaggcgatgtgtgccaaaatcaatgcggaatgtacctttaccaaccaggcgtttgacagcctgatcccgagcctgaaatacaagcgttttgacgcgctgatggccggaattgacgtcacacctgagcgtcagaaacaggttgatttcaccaatacctattatgataactctgctgttttcgttgcagttgcgggcaaatttgatagcattgacagcctcaaagggaaacagattggtatccagaacggcaccacgcatcagaaatacctgatggagcagtttaaggacatgaaaattgtgccttatgaaagctaccagaacgcggtactggatctgaaaggcggacgtattgacgccgtattcggtgacacagctgttatcaatgaatggctgaagagcaacgacaatctgaaaaccgtgggtgagcgtgtcaccgatccggaatatttcggcaccggcctggctattgcggtccgcaagggcaacagcgagctgaaagacaaactcaacaaggcgcttggtgaggtcaaagcggacggtacttacgataccctctataagaaatggtttgagtaa

SEQ ID NO: 275700 - DNA, 705 bp, Morganella morganii
atgaacgattttctctctttagcaagcgccgccggggtaaccgtcggccttgctgtttctgcactcctgatcggtctggtgctcgcgatgctgtttaccctctgggaaactgtgcgctggaaacctgtcgcttttgccggaacctgtcttgttacgcttatccgtggtttacctgagctgctggtggttctgtttgtctattacggcacgcaggaagtgattattcagctgagcgacggtatcaatctgggcttcttcaccctgacgcttgagatcgacaacggcccctatgtgccgatcttcagtggtatcaccgccctgtctctgctctatgcggcctatgcgtcacaaaccctgcgcggcgccctgaaagcggtgccggacggacagcgggaagcaggccaggcgcttggtctgagccgcgccaccattttcctccgctttgtcatgccgcagatgtggcggcatgccctgccggggctgggtaaccagtggctggttctgctgaaagataccgcgctggtctatctgattggtattaacgaactgatgctgcagacacaaagcattgcccgccgtactgaagaacctttcacctggtacagcatcgtggcacttatttacctcgccatcacgctggtcagtcagtacatcctcaaacgtattgaattgcgcaccacacgttttgaacggagcggccaatga

SEQ ID NO: 275701 - DNA, 675 bp, Morganella morganii
atgagcatatttgattatattcttgccgtcttaccgggcctgccggtcagtctgtcactgacttttaccgcactgatcacagcatttctgctgtcagtgctgtttacactggtactctctctcaaaccccggattctgacgccgctggtcaaagggtatatcaccctgtttaccggtacgccgctgctggtccagtttttcctgatttatttcgggcctgcacagtttgaagggctgaaaaactatccgctgctgtgggaactgatgtcctccccgtggctctgtgccatggtgacactggcgctcaacagtgcggcctattcaacactgctgttctacggtgcggtgaaagcaattccgaaaggccagtggcaatcctgccaggcgctgggaatgtcacagaagcagaccatgcggatcatcctgccgtatgcctttaaacgtgcactgtcgtcctattccaacgaagtggtgctgatcttcaaaagtacctcactggccacgacgatctcgctgcttgaagtgatgggctacagccgccgcctgtttggtcaggattacgatctgaacgtctttattgctgcggggattatttatctggccgtcaacagcctgctgacgctcgcgatgcgtctgattgaacgccgcgcgctggcattcgaacaccgtaactga

SEQ ID NO: 275702 - DNA, 1125 bp, Morganella morganii
atgcattgccctcagtattcagccggccgctgccgttcctgtcagtggcttgaaaaaccctatattcagcagattgatgataaagagcagggtctccgcacgctgctctcgtcgtttgccgttaacaactggctgccgccggtcctcagtgcggaaaccgcgttcagaaataaagccaagatggtggtcagcggcagcgtggagcgcccggtgttcgggatcgtgacggataacgaaccggtggatttatcggactgcccgctgtatccggcgcattttgcagaggtgtttgccgcactgaagccttttatcgcccgtgccggactcacgccgtacaatgtggaacgccgccgtggcgagctgaaattcctgcttctgaccgaaagccgtaccagcggtaaaatgatgctgcgctttgtgctgcgctcagagaaaaaagtggcacaattacaggcggcactgccgtttctgcaggcgcaactgccgcagctctctgtgatttccgccaatatccagccggttgcgatggcgattctggaaggggagcaggaaattatctttaccccggatgaggtactggaagaaaccttcaacggcattccgctctatatccgtccgcacagctttttccagaccaatccggctgttgccgcgcagttgtatcataccgccggacagtgggtgcgggagctggggatcacccgtttatgggatctgttttgcggcgcggggggattcggcctgcactgtgcggataaatccacacaactgaccgggattgaaatcagcccggaagcgatagcctgcgccacccgctcagcggaaaaaatggggctggagaatgtcacctttcaggcgctggattccgcgcagtttgctctcggtaaatcagccgtaccggaactggtgctggtgaacccgccgcgccgggggatcggtaaagcgctgtgtgattatctcaataccatgtcaccggagacgattatctattccagctgcaatgcacagagcctggcacaggatctggcgcatctcacacagtatctgccgcagcgcgtgcagctgtttgatatgttcccgcataccgcacattatgaagtgctggtgctgctgacccggaaataa

SEQ ID NO: 275703 - DNA, 489 bp, Morganella morganii
atgatcattcccgatctcacgatattacgcacatggctggatcagatgaaactctcctgttttgagtgtgattcctgccaggcactgcatctgccgcatatgcaaaatgtggacggtgtgtttgatgccaaaattgatatccttgacgatatgctggtgttctcggcgctggcggaagtccgcccgaccgcgattgtcccgctgattgccaacctgagccagatcaacgccagctcgctgctggtcaaaacctttatggatattcaggattccgccatgccgaagctggtggtctgttactcgctgccgctcagtgccgggctgacatttgagcagttctctctctccctgcaactgatggaagagcaggttggtgcagtgatttttgagctgttcagtaacaatatgctgtttgatccgaatgatgcggaaccggaagatgaagaaagcttccgcgctgattccgttccttctccggtgatccactga

SEQ ID NO: 275704 - DNA, 312 bp, Morganella morganii
atgaccagaaaacagccgcgacaaatgcgttcattaggggatatgccgcgcccggtaattatctgtgaggtcatcggtgtgatattactggtgctggtctatctggcggtgaatgattttatttcgctgcccggatttatgagcagcaaaaatgccctgatggtgatggcgtttgccggcctgggatgtctggtaccggcagcaatcaatattgtctggcgggccatcagcgccatgccgtccgtgggtattgacagcaaaagcggggcagacaaaaagacccggcagaataaaaatgaaaaaaagcaataa

SEQ ID NO: 275705 - DNA, 264 bp, Morganella morganii
atgtataccgttatttttggccgtccgggttgtccttattgtgttcgtgcgaaagaactcgcagaaaaactgaaaaatgagcgtgatgacttcgattatcgctatattgatattcacgctgaaggcatcagcaaagaagatttatctgtcactgtcggcaaaccggttgaaacggttcctcagatttttatcgatgaaaagcacatcggcggctgcactgatttcgaagcttacgcgaaagccaatctcggtctgttcagctaa

SEQ ID NO: 275706 - DNA, 609 bp, Morganella morganii
gtgctggaaaatctgaatcattcgctttttctcctgataaatgccacgccggaaacgtctcatgccatgattattgccgccactttcgcggctaaatatctggttctgctgtttccggttgtcgccgcagggtactggctgcggggaacgccggagaatatggcccgccagcgccgcgctgtctgcaaaagtgccattgcgctgctgattggtttcgcggcctcctggattatcggcacactctggccgcatgcccgtccgtttgccgaaccgttcggccacagtttccttgatcatgcaccgacggcctcattcccgagcaatcacggcattattgtgtttaccttcgcgctgggctgcctgttctggtgcaatgtccgtgcaggattgctgctgatgatcccggcactgattgtcgcctggtcgagggttttcctcggcgttcactggccggtggatatgctgggtgcctttatcactgtgctgattgcctgtgcactgacagagctgctctggagcctgttcggcccggcactgcaaaaccggctgcaggtgctctaccggcactgttttgccatgcctatccgtaaaggctgggtgcagggataa

SEQ ID NO: 275707 - DNA, 1320 bp, Morganella morganii
atggaaacaacacatccgcaggctgtggtcagcaagactgacaccggcaatgattaccgcaaatggcgtaaatccgataccgtctggatgctcggactgtacggcacagccattggggccggtatcctgtttctgccgattaacgccggtatcggcgggctgctcccgcttatcatcatggcggtactggccttcccgatgacctttttcgcgcaccgtggtatgtgccgctttatcttatccggtaaaaatccgggtgaagacattaccgaggtggttgaagagcatttcggcgccaaagcagggaaccttatcaccctgctctatttctttgctatctacccgatcctgctggtctacagtgtggctattaccaacaccgtggaaagctttatcgttaaccagatgcatatgacggcgccgccgcgcattattctgtcactggtactgattgtcgggattatgtgcattatccgcttcggtgaagccgcgattgtcaaagcgatgagtgtgctggtgttcccgttcgtggccgttctgatggtgctggcgctgtatctgatcccgcactggaataccgcgatatttgatacgctctctttcagcagtcactctgccggtgataccggacgcggtctgatggtcaccctgtggctggcgattccggtgatggtattctcgttcaaccattctccgattatttcagcattcagtgtcgcaaaacgtcaggaatatggtgataacgcagagaaaaaatgctcccgcattctggcatgcgcccacatcatgatggtgctgactgtgatgttctttgtgttcagctgcgtgctgagcctctccccgcagaatctgcaggaagcaaaagatcagaacatctccattctgtcttacctggcgaactacttccataatccgatgattgcctatatcgcgccgttagtcgcctttattgctatcaccaacgcattcctgggtcactacctgggtgcccgtgaaggttttaacggtctggttaacaaagcattacgcgccaaaggtaaaagcattgcgccgtctaagctgaataaactgactgcactgtttatgctggtgacctcctggattgttgccacactggacccgagcattctgggcatgattgaaaccctgggcggcccgatcatcgccatgctgctgtttatcatgccgatgtacgctatccgcaaagtccctgcgatgcgtaaatatgccggtcacctgagtaacctgtttgtggttgtgatcggtctcattgccatttcagcggtgttctacaatctgtatcagctgtttttcggctga

SEQ ID NO: 275708 - DNA, 1320 bp, Morganella morganii
atggatacaacacaaccgcaggttgtggtcagcaagactgacaccagcaatgattatcgtaaatggcgcaaatccgataccgtctggatgctcggactgtacggtaccgctatcggtgcaggcgtactgtttctgccgattaacgccggtatcggcgggctgatcccgcttatcatcatggccgtgctggccttcccgatgacctttttcgcacaccgcggcatgtgccgcttcgtgctgtccggtaaaaatccgggcgaagatattactgaagtggtggaagagcatttcggcgccagagccggcggccttatcaccctgctctatttctttgctatctacccgatcctgctggtctacagtgtggctatcaccaacaccgtggaaagctttatcgttaaccagatgcatatgacggcgccgccgcgcattattctgtccctggtactgattatcgggattatgtgtattgtccgcttcggtgaagccgcgattgtcaaggcaatgagcgtgctggtattcccgtttgtggcggttctgatggtactggcgctgtatctgatcccgcactggagcacagcggtattcgatacgctctcttttaacagcaatacagtcagtgtcaccggtcatggtctgctgataacgctgtggctggcgattccggtaatggtgttctcctttaaccattccccgattatctctgcctttgctgtcgccaagcgtgaagagtacggcgaaaatgcggagaaaaaatgctcccgcattctggcatacgctcacattatgatggtactgaccgtgatgttctttgtgttcagctgcgtgctgagcctctccccgcagaacctgcaggaagcaaaagatcagaacatctctattctgtcttacctggcgaaccacttccagaacccgatgattgcctatatcgcaccattcatcgcgtttattgctatcaccaaatcattcctgggtcactacctgggtgcccgtgaaggctttaacggtctggttaacaaagcattacgcgccaaaggtaaaagcattgcaccgtctaaactgaataaactgacggcactgtttatgctggtaaccacctggattgttgccacattagacccgagcattctgggtatgattgaaaccctgggcggcccgatcatcgctatgctgctgtttatcatgccgatgtacgctatccgcaaagtccctgcgatgcgtaaatatgccggtcatctgagtaatctgtttgtggttgtgatgggtctcattgcaatttcagcggtgttttacaatctgtatcagctgttttttggttaa

SEQ ID NO: 275709 - DNA, 1368 bp, Morganella morganii
atggtcagtgtatttgacatcttcaaaattggtattggtccgtcgagttctcacacggtcggtccgatgaaagcaggtaaacagttcgctgatgatcttatcgcggccggactgctggaaaaaaccacccgcattcaggttgatgtgtacggctctctgtctctgacagggaaaggtcacgcgacagatatcgcaatcattatgggtcttgcgggtaacctgccggattctgttgatattgacgcgataccgggctttatcagggatgttgaagaacgtgaacgccttttgctggcaaaccaacgccatgaagtggatttcccgcgcgataacgggatgaacttccataaagaaaacctgccgctgcatgaaaacggcatgtccatcagcgcattcgccggtgatgaattactgtacaagaaaacctattactccgtcggcggtggttttatcgtcgatgaagagcattttggccaggctgcggacagcgaaaccaaagtgccttatccgtaccagtatgcagctgatctgcagaaacactgcaacgaaaccggcctgtctttatcagcgctggttatgcagaacgaactggcgctgcacagcaaggaagagctttctgctcacctggcggcagtctgggacgtgatgaaagccggtatcgagcgcggtgtgaacaccgaaggtctgctaccggggccgctgcgtgtaccacgccgtgccgctgcactgcgccgtcagctggtcaccagtgataacacctccactgacccgatgcaggttgttgactggatcaacatgtttgccctcgccgttaacgaagaaaacgccgccggtggccgtgttgttaccgcaccaaccaacggtgcctgcgggatcatcccggcagtgctgtcgtattacgataaattcatccgtccggtgaatgaaaacgcctatacccgctatttcctggtgtccagcgtgatcggttcactgtacaaaatgaacgcctctatttccggtgcggaagtgggttgtcagggtgaagtcggtgttgcctgttccatggctgcggccggcctgaccgaactgctgggcggcagcccgatgcaggtctttatcgcggcggaaatcgcgatggaacacaacctcggcctgacctgtgacccggtcgccgggcaggtacaggtaccgtgcatcgaacgtaacgccattgccgctgttcagtctgtcaacgccgcccgtatggcgctgcgccgtgtcagcgaaccgcgcgtttgtctcgataaagttatcgaaaccatgtatgaaaccggtaaagatatgaacgccaaataccgcgaaacctcacagggcggcctggcaatcaaagtgatcccgtgtgactga

SEQ ID NO: 275710 - DNA, 522 bp, Morganella morganii
atggggacaattgtgtttatcgcgctggttattgccgtggccggaattgtatggatccggcgggtatatctccggataaaccaccttcaggcaccactcaccgaagcttatgcggcgattgacggcatgctgcatcagcgggcggagaggatcggccaactggtggatatgacggaaaaagccggtatccgggatgcaacgctgttttattcctggcaggatgcgtatccgcgctatacagaggcggcgacactggatgagagtgtcagtgccgcaaatgatatcagcagtgctttttatcatattatgacgctgacagagacattcccggtgctgattgcggatccgcagtttgtccgtattcagctggggatctgtgatgttgaggatgcactgaatcccggcatccgcgcctttaatgaggcggtacttcagtacaatattgcggttcagcactatcctgacaccctggtggccgggctgttcggtttcggccccaaaacactgctgctgatgtcctga

SEQ ID NO: 275711 - DNA, 1203 bp, Morganella morganii
atgcagacagtaatcagttcacgggtaaccggtttaatcggcgggcttgctttcggatttttaagcatcggccacgcgtttgcggaggaaacaccggttgcaccgcaggtggatgcaaaagcgtatgtgctgatggactataacagcgggaaaatcctggcatccgcgaatgcggatgagcgccttgacccggcgtcactgacaaaaatcatgagcagttatgtggtcggacaggcgattaaagccgggaaagtgacaccggatgatatcgtcaccgtcggtattaatgcctgggcaaccggtaacccggtgctgaaaggctcttccctgatgttcctcaagcccgatgaccgcgtaaaattaatcgatctgaacaaagggatggtcattcagtccggtaatgatgccagtattgcgctggcggaatatgtcgcgggcagtcaggaaacctttgtttcgcagatgaacagttacgccaaacagattggcctgacaaatacccattttaaaacggttcacggactggattccgaagggcagtacagtaccgccaaagatatggcgctgctgacccaggcgctgatcaccgatgtgccggatgaatatgttatccataaagagaaagaatttaccttcaataagatccgtcagccgaaccgcaaccgcctactgtggagcaccaatctcaatgtggacggtgtgaaaaccggccacaccagcggcgcggggcataacctggtggcttccgcgacagacggtccgatgcgtctgatctccgtggtactgggcgcaccgagtgaccgtgtccgctttgccgaaagcgaaaaaatcctctcctggggcttccgtttctttgaaaccgtggcaccggtgaaagctgatacgccgctgaccactgagcgtgtctggttcggggatatttcagaagtgccgctgggcgcggaaaaagacatttatgtcactattccgaaaggtaaactcaaagatctgaaagcgacatttgaactggacagcaccacgctggaagcgccgctggcgaaaaaccaggtggtcgggaaaatcaactttatccttgatgacaaagtcgttgaacagcgtccgctggtggttcagcagcaggttgaggaagccggtttcttcggccgcatctgggattatattgtccgcttctttgccggactgtggcattccgtcttcggttaa

SEQ ID NO: 275712 - DNA, 621 bp, Morganella morganii
atgataaccgtctggggcagaaaaaactcgtctaacgtcaagaaagtcttatggtgtctgactgaactggggctgacttatcagcagaaagatgcgggcgggccgttcggcggtctcgataccccggaatacctcgccatgaacccgaataaaactattccgacctatcaggacggtgaatttattctctgggaatccaatgccattctcagctatctggcggataaatatgatgacggcacactgctgccgcacgatgcggaataccgtgcccgggcggcacaatggatgtactggtcagacggcagtctgttcccgtatatcaaagcgatgatgggactgctggtcagaaccccggcagagcagcgcgatccggcccgggtggaggaattgaaacaatctctgaaccgcctgattgccatgctcaatgacgactttgcacagcgtgattatatcgccggtgataccttcagtatcgcggatatggcaatggcgccgctactctatccgtggcgggaagtgtgtcatgaccgaccggacttcccgcatatagagcgctggtttgcacggattgaaacccgcccggcgtaccgcgatatcgtggcactgccggtcagttaa

SEQ ID NO: 275713 - DNA, 828 bp, Morganella morganii
atgaaaacagtttccatcgcggggctgggctggctgggaatgccgctggcactgcatcttgcggatatcggtatccgtgtcaaaggcaccaaaaccacgccggacggcacagaggcggcgaggatgtgcggtattgagtgttatatgctgaatctgacaccagagccggaatgtaacgctgatgatctggatgcttttttgcagacagatattctggtgatcaccctgcctgcatcaagaacggcgggcggtggttacctgtatgtgaaggcggtgcagaatctggtggatctggcggcggcgcgcggtgtgtcgcgggtgatttttaccggttcaacagcggtttacggtaatcagaccggtaagctgacagaaaactcgccggtcgatccggtgacagaatccgccaaagcgattgttgagattgaacactggctgaatgagctgccgggtgtttcagcggatattctgcgtctggccgggctggtgggggaatcccgtcatgcagggcgtttcctggcgggtaaaacggcggtgaaaggggcgaatcagccggtcaatctggtgcatcaggatgatgtgattgccgcgatccgtttgctgatccagcgtccgcacggcggccatctgtataacctgtgtgcgccgcagcacccgtcacgggctgaattttatccggatatgtcccgtcagattaatttgctgccgccggtgttcagagaagaagatatcactgaagggaaagagattgacggcagccgcatttgccgggaactgggctttgaatatcagtaccctgatcccggccggatgccgatgacggagtaa

SEQ ID NO: 275714 - DNA, 900 bp, Morganella morganii
atgttagataaaacgcgcttacggatagccattcagaaatcaggtcgtttaagtgaagactcccgcgagttgctcgcgcgctgcggcataaaaatcaacttacaacagcagcgcctgattgcttacgcagagaatatgccgattgatatcctgcgggtccgtgatgacgatattcccggcctggtgatggacggcgtggttgacctcggtatcatcggcgaaaacgtactggaagaagagttattaagccgtcaggcacagggacaaaacccgcgctacttcacgctgcgccgcctggatttcggcacctgccgcctctcgctggccgccccggtggatttcagctacaacggcgcggagtgtcttcaggacagccgtatcgcgacttcctatccgttcctgctcaaacgttatctggatcagaaaggtatccgctttaaatcctgtctgctcaacggctcggtggaagtggcaccgcgcgccggtctggccgatgctatctgtgatctcgtatccaccggtgccacgctggaagccaacggtctgcgcgaagtggaagtgatttaccgctccaaagcctgcctgattcagcgcgacggtgaaatgccgccgcccaaacagcagcttatcgacagaatgatgacccgtatccagggcgtgatccaggcgcgggaatccaaatacatcatgatgcacgccccgtcagaacgcctggacgaagtgatcgccctgctgccgggcgcagagcgtccgaccctcctgccgctggccggtgagccggatctggtggcaatgcacatggtcagcagcgaaaccctgttctgggaaaccatggagaaactgaaagccctcggttgcagctccattctggttctgccgattgaaaagatgatggagtga

SEQ ID NO: 275715 - DNA, 1323 bp, Morganella morganii
atgaccgcaatgacctttaataccttgatccgctgggaaaaccttgatgcacaacagcaggcggatgccctgatgcgcccggcgatggcggcatccggtgatatcagccgcgtggtcagtgacatcatccgcgatgtgcgggaaaacggcgatgatgccctgcgcacgctgagtgcccgctttgacaaaacacaggtgacagaactgcaaatcagtgctgcggagattgccgccgccgctgaccgactgccggattcgctgaaatccgccatggcaaccgcgaaagctaatatcacccgctttcacgaggcgcagatcccggatgtgattgatgtcgaaacccagcccggcgtcagctgccagctggtgacccgtccggtggacagtgtcgggctgtatatcccgggcggcagtgcgccgctgatttccactgtcctgatgctggctgttccggcaaaaatcgccggttgccgccggatcattctctgctcgccgccaccggtcgccgatgaaattttatacgccgcgcaactttgcggtgtggagactatctatcaggcgggcggtgcccaggcgattgccgcgatggcattcggcacagaaaccattcccgccaccgacaaaattttcgggccgggtaacgcctatgtgaccgaagccaaacgtcaggtcagccagactatcggcggtgcagccattgatatgcctgccgggccttctgaagtactggtgatcgccgacagcggtgccaacccggcctttgtcgctgccgacctgctctcccaggccgaacacggccctgattctcaggtggtgctggtcaccccggatgaagcaatggcacagcgcgtggtggcagaaaccaattcacagctggaattattatcacgcaaagagattgcccgtcaggcactgtccgccagccgcattattattgcccgtgacctggacacctgtgtggcgatcagcaatcagtacggtccggagcacttaattatccagacccgcgaccctgatgccctgctgcctgctatcaacagtgccggttccgtgttcctcggtgactggtcgccggaatcggcgggtgattatgcctccggcaccaaccacgttctgccgacttacggttatacctcgacctattccagcctcggactggcggattttatgaaacggatgaccgtgcagaagctgaccccggccgggttatccggtctggcagacgcgattgaaaccctggcggctgcggaactgctcaccgcgcacaaaaatgccgtgacactgcggatgaatgccctgaaagcggaggagaacaaccgatga

SEQ ID NO: 275716 - DNA, 1077 bp, Morganella morganii
atgaacaaaccattcagcgcgatggcactggcccgcgaaaatgtgcagttactgacgccgtatcagtcggcacgacgcctcggcggtaacggggatgtctggctgaacgccaacgaatatccgcaggcaccggatttcacctttacggatcgcaacctgaaccgctatccggagtgtcagcctgcgaacgtgatcaaccgctatgcggcttacgccggtgtcagtccggagcaggttatcgcggggcgcggcgcggatgaaagcatcgaattactgatccgcgccttctgtgagccggggaaagatgcggtgctgttctgcccgccgacctacggcatgtacagtgtcagtgcggaaacttttggtatcgcacagaaagtggtgccatcactggatggctggcagttggatctggacagcattgccgccagtctcagcggcgtgaaagtgatttatgtctgccacccgaacaacccgaccggtaacccgatcagcgagcaggatctgcgttatctgtttgatatcgtggataaccgcgcactgattgtggtcgatgaggcgtatatcgagttctgcccggagttcagcgtggcatcgtggctgaaagaatacccgaacctggtgatcctgcgcacgctctccaaagcctttgcgctcgccgggctgcgctgcggcttcacactggcttctgcggatattattaacgtactgatgaaagtgatcgcgccctatccgctgtcatccccggtagcagccattgctgccgaagccctgctgccggaaggcattgccgtaatgcaggagcgcgttaccgaaatctgccgcaaccggcagatgctgtgtgatgagctgcaaaagctgccgctgacggaaaccgttttcccgagcaaaaccaactacattctggtgcgtttccgtgatgcggaacgggttttccgcagcctgtgggatgagggaattattttacgtgaccagcgcaaacaacgcgggctggaaaactgtctgcgcattactgtcggcacccgggcggaatgcctgcgggtgatcgccgctatcgccgcgcttgaaatgccataa

SEQ ID NO: 275717 - DNA, 1068 bp, Morganella morganii
atgacacagaacgttttatttattgaccgcgacggcactctgatcaccgaaccaccggtagatttccaggtggacagattagacaaactggcctttgagccggatgtgatccccgcgcttctgaagctgaaagaggccggataccgctttgtgatggtcaccaaccaggatgggctgggcacagacagtttcccgcaggcggatttcgaggcaccgcaccagctgatgatgcagattttcacctctcagggcattacctttgatgaggtcctgatttgtccgcacaaaccggcggataactgcaactgccgcaaaccgaaaatcacgctggtggaaaaatacctgctgccgggtgtcatcaacatgcaaaacagctatgtgatcggcgatcgtgaaaccgatattcagctcgcggaaaacatggggattaccgggctgcgttacggccagccgggcactgactggaacagtatcgcagagcagctgacccgccgtgaccgttacagccgcgtggagcgcaaaaccaaagagaccgatattctcaccgaagtgtggctcgaccgtgaaggcggcagcactatccgtaccggagtcggctttttcgaccacatgctggatcagattgccacccacggcggtttccgcctcaatattcaggtcagcggcgacctggtgattgatgatcaccacaccgtggaagataccggactggcgctgggcgaagccctgaaactggcactcggcgataagcgcggcatcacccgtttcggttttaccctgccgatggatgagtgtcttgcccgctgtgccctggatatctcaggccgtccgcacctggaatacaaagccgattttaaatatcagcgtgtcggcgacctgagcacggagatgattgagcacttcttccgctcgctctcctacaccatgggctgcacgttacacctgaaaaccaaagggaagaacgaccaccacagagccgaaagcctgtttaaagtgttcggacggacactgcgccaggccatccgcgtggaaggtaatgttctgccgagttcaaaaggggtgctgtga

SEQ ID NO: 275718 - DNA, 597 bp, Morganella morganii
atgcgcatagtgatcaccgataccggctgtgccaatatcgcctccgtccgctacgcggtggagcgtcttggttatcagccgctggtcactgccgaccctgaccttatccgtcaggcagataaagtctttctgccgggagtcgggacggcgggcgcggcaatggaaaatctgacagcgcgcgggctggtgagcaccatccgttccctgacacaaccggtgctggggatttgcctcggcatgcagttgctcggcaccaccagcgaagaaggaaatattgatctgctcggcctgatcgataccccggtacaaaaaatgacgccggacgggctgccggtgccgcacatgggctggaataccgtggaatttaccgctgatctgccgctgttccgtgatattgcgccgcagagctatttttattttgttcacagttacgtctgcccggtcagcgacgctacggctgccaccaccacatacggtgaggcattcagcagtgttcttttccgcgataatttttacggcgtgcagttccacccggagcgttcaggcaaaaccggtatcacactgattaaaaattttctggagatgaaagcgtcatga

SEQ ID NO: 275719 - DNA, 738 bp, Morganella morganii
atgatcattcccgcactggatttaattgacggacaggtagtgcgccttcaccagggcgattatgcgaaacagcgcgattacggcgcggatccgctcagccgtttgcaggcttatgagcgcgaaggggcacaactgctgcaccttgtggatttaaccggtgccaaagacccggcgaaacgccagatcccgttgctgaaaacactgctggcgggtgtgagcgtgccggtacagatcggcggcgggatccgcactgaggaagatgttgccgccctgcttgatgccggtgccgcccgcgtggtggtcggctccacggcgatcaaatccccggaagaagtaaaacgctggtttgcccgttggggggcagaacgcatcgtgctggcgctggatgtgcgcatcggcgcagacggtaaaaaacgggttgcggtcagcggctggcaggaagattcagagcagaccatcgaagacgtaatccgcgatttcgcctctgccgggctgcgccacgtattatgtaccgatatctcgaaagacggtacgctggcgggatccaatgtggcgctttatcaggaaatcagtgccgcgttcccggagattgcctttcaggcatccggtggtatcggcgggctgagtgatatcgccccgctgcctgctaccggtgtggcgggcgtgatcgtcggccgggcactgctcgacggcaaaatgacattaccggaggctatcgcatgctggcaaaacgtataa

SEQ ID NO: 275720 - DNA, 780 bp, Morganella morganii
atgctggcaaaacgtataattccctgcctggacgtccgtgacggacaggtggttaaaggggttcagttccgtaatcacgaaatcatcggcgacatcgttcccctcgcccgccgctatgccgaagaaggtgcggatgagctggtattctatgatatcaccgcctcctctgatggccgtgtggtggataaaagctgggttgccaaagtagcggaagtgattgatattccgttctgtgtggcaggcgggatccgcagtaccgaagacgctgccgcgatcctcagtttcggggcggataaaatctccgtaaactccccggcgctgagtgatccgtcacttatctcccggctggctgaccgcttcggcgtgcagtgcattgtcgtcgggatcgatacctggcacgatgcggaaagcggaaactatcaggtctatcagtttaccggtgatgaaaaacgcaccatcgccacctcccgtaataccctcgattgggtgcaggaagtgcagcagcgcggtgccggggagatagtcctgaatatgatgaaccaggacggtgtgcgcaacggctacgacctggagcagttgaaaaaagtgcgtgaggtgtgtcaggtgccgctgattgcctcaggcggtgccggtcatccggatcacttccgcgatgcatttttacaggccggtgtggacggtgcgcttgccgcctctgtcttccacaaacaaattattaatatcggcgacctgaaacgcggacttgcccgcgacgggatcgttgtcagaatacaggagtaa

SEQ ID NO: 275721 - DNA, 612 bp, Morganella morganii
atgctcacggaacaggaaatcgcacaactggactggcagaaaaccggcggtctgctgccggttattgtacagcacgccgtctccggtgatgtgctgatgctgggctacatgaaccgcgacgcactggacaaaacgatcagcgaaaaacgcgtgacgttttattcccgcacaaaacagcggttgtggaccaaaggggaatcgtccgggcatttccttaatctggaagacctgtttaaagattgcgacaacgacacgctgctcgcgctggtcaccccgatcggcccgacctgtcatcagggtaccaacagctgttttgctccggcacagacggcccagggtttcctgtatgaactggaatctgtcataaaatcccgcaaaacggcggatcctgacagctcttacacggccaaactttatgccgccgggaccaaacggattgcgcagaaagtgggcgaagaaggtgtggaaaccgcactggccgccactgtccgcgataaagcggagctgacgtcagaatccgcagatctgctctatcacctgctggtactgctccaggatgcggatctggatctggccgctgttattgaaaaactgcgctcccgtcaccgttaa

SEQ ID NO: 275722 - DNA, 489 bp, Morganella morganii
atgaacccgatatttgagaaactgaccgcccggctggatgaacataatgcccgctaccgcgtggtgcatcatgcctccgcagggaaaacggaagaggtcgccagagtgcgcggcacacaccacggtcagggcgccaaagcactggtttgtcatatcaagggaaacggtatccgtcagtatgtccttgcggttctgccttctgatcagcaggcggatttacaggcactggcaaaaaaaaccggcggcacccgtgcctctctcgccagtccggcagagacagccgaactgacacagtgtgttttcggtgctatccccccgtttagtttccatcctgatctccgtcttgttgctgacccgatgttatttgagcgtttcagtgaactggcctttaatgccggcagcctggaatgctcaattattctgaacacaaaggactatcagcggattgccgatcctgaaacagtatcgtttgtccgccgtgaactctga

SEQ ID NO: 275723 - DNA, 669 bp, Morganella morganii
atgcaggacgaacttttagactctctttattatctgctgttactcagcctgctgctgtatctgtcgcgccaccgctggcgccgctggttcaaaacacagaaatcccgcaggcgttttgtctcctcgccggaggaagatgagcaatccctgcggcagcagttgagtgcgccgtatctcaacggcagccagtttcataaaaccgaccacttttttgcggtcagcgccctgcttcgcgaagtcctgatgcattatgaggaaaagcagatccggctgaatgacagtctgtttacccgggaagacagttatgagtttacctgtctcggtactccgctgcctgcacctgaaaccgccaccctggcagagcggatggcactgcgggatgattttcagtataccgccgctgagcggctcaaccgctactgcattacctctccggccggaaaaccactgaatcagcaaatcggtctgtggattgatatgctccagtccctgctggataccgagctggtgctgttgctggaagagaacaaccagaaggaccgggattgcccgtcactgcagttatccgctgagcaggttcaccactggctcgatgaaatcaacgataccatgacacaaaccgcctcacgggttctgcaggcacatacccgcagcagtgttgtgatgtaa

SEQ ID NO: 275724 - DNA, 1638 bp, Morganella morganii
atgtctgttgtgacactgatccttgtttttctgctggccgtgattgccagtgtgtttatctcccgtctgctgggggacaaaattccgctgccttttattcagattgccattggtgcggggctatcactcttcggttttgatgtggcgtttgagccgcatctgttcctgttcctctttattccgccgttgctgtttctggatggctggcggatcccgaaagaagcgctgttcagtgatatcaaaccgattttctcgctggccatcggcctggtgtttttcaccgtcgtcggcatggggttgtttatccactggctgatcccggcggtttctctggcggttgcttttgcactggcggcgattttgtcaccgacagacccggtgtctgtggcggcaatgaccgtcaatgcgccgctgccgtcccgtatggcccatattctggaaggggaatctctctttaatgatgccagcggcctggtgtgcttcagttttgcggtaggtgcggcactgaccgggacgttttctctgccgtcggctgccgggaagtttatggtggtggcgctgggcgggattatggttggcctgctgattgccatgttcatcgggaaggtaaaccagttcctggtgcagcgcaccggagaggacccggcgattcagattatgatcagcctgctgatcccgtttgtctcttatctggcggcagagcacctgggtgtgtccgggatcctggccgcagtggcggccggtatcgccatgcactatgagcgtattgtcggccgtatgcagtctgccacccgcatgcagagcaaggcggtctgggacaccgtgcaggtcgcgctgaacgggatgatctttattctgctgggtgaacagttaccgggtatgtggcgctcagtgccgcaggtggcggcagatgccggggcttccgcaccgtgggtgctgctgctgtacgtagtgattatcacctttggcctggcggtgctgcgttttgcctgggtatggattgccatgacactgacggttttccgtcagcgccgcaaaggtaagcagtctgatatgccgcatctgcgtctgatggcgattatggcaaccgccggtgtgcgcggggcgattaccctcgccggtatcctgacactgccgatgctgatgaatgatggctcaccgttcccgcaccgggatctggctatctttctcgccatgggggtgattctgttttcactggtgattgcggcggttgcactgccggtgctgaccagagggctgaatacggacttaccgcatgataatgaagagctgaatgcccgtttcaccctgaatgaagccgcaatgagtaatctgcgggtgcagatggcggagccgctggaagatattgatgaaatgacactgcgcacagaagtggggactcacttgctggagatctacggccgtcatcttgacagtaacagtgatgaccagaccgccgggtttgactggcacaatgtaatccgcatggaacgacggatgtcactgacagcgcttcaggcggagcgtgatgccctcaaacagctgcgcaagagtaagaatatcagtgagcacacttacacgcggctggtgcaggagctggatctgaaagaagaggcgctgaaactggcgctgcactga

SEQ ID NO: 275725 - DNA, 432 bp, Morganella morganii
atgaaaaaaatactactggccggtatgattgccgtctgctctgcctctgcctatgctgttcctgatacctggtcaatgggggctgctcagggatttactgaatacagtatcagtaacggagccggcaatgccgtcattatcgcctgtaacgaaggtgcgggggaaggctacgacaacagcgtgtctgtttacagtaatgaccagagccttgacggtgacatctctttcctgattgatgatgaagcctattatattcctgaaaacacgacgacccgcagtggtgctaatgcctgggtcagtttcacctcagccattacccgggcatctgaatttgaagtgtatgtgaataacaaaccggccgggaagtttaaaccccgcgccaaaaacagccagaaaatctttagtgattttgaatgtgccccggttgaataa

SEQ ID NO: 275726 - DNA, 1572 bp, Morganella morganii
atggaatggatcgctgatccgtcgatttgggccggcctggctacattaatcgtactcgaaattgttcttggtattgataaccttgttttcattgccattcttgccgataaacttcctcctgcactgcgtgacaaagcccgtataaccggcctgctgtgtgcgctggtcatgcgtattattctgttgttcagcctctcctggcttatcacgctgaccaaaccgatgtttacgatgttcggccatccgttcagtgcgcgtgacttaattatgctgatcgggggtctgttcctgctgtttaaagccacaatggagctgaacgagcggctggaaggcggtgagcataacgacgggcagcagcggaaaacctcaaaattctgggcggtggtggcgcagattattgtgctggacgccgtcttctcgctggactcggtgatcacggcagtcgggatggtggatcacatcggtgtgatggtcacagcggtgattattgccatgctgctgatgatctggggcagccgtccgctgacccgctttgtcaatgagcacccgaccattgttatcctgtgtctcagcttcctgctgatgatcggtttcagcctggtggcggaagggttcggctatcacattccgaaaggttacctctacgcggcgatcggtttctccatcatgattgagatgctcaatcaggtggcaatgtttaaccgccgtaaattcctgcgcggtaaaaactctctgcgccagcgtacggcggaagcggtactgcgtattctgagcggcaagcgcgaatcttcagagctggataaccgcacggcggatctgatttcggataatcaggaaatttttgacccggaagagcggcagatgattgtccgcgtgctgggactgtcgcagcgtaacgtcaacagcattatgacttcgcgtcatgatgtggagatgctgcggattgatgccaccagtgatgaaatcgcggcgctgctgattaaaaatccgcacacccgtgtggtaatcaaaggctcggcggatgatgatgaactgctgggtgtggtgcatgtgatcgacctgctgcaccagcgtttacaacaggacacgctggatctgcatgcactgatcaaacagccgctggtcttccctgaacagctgtcattactgaaagcgctggagcagttccgccaggcgcagacacactttgcctttgtggccgatgagttcggctatgttgaaggggtggtgacactgacagatgtgatggaaaccatcgccggtaatctgccggtcagtggtgttgagaatgatgcccgccatgacattcagtttacggatgataacagctggatcaccaacggctttatgccgctggaggatttaatcaactatattccgctgacactcgatgaaaaacgcgagtatgaaacggtggcaggtctgctgatggagcatttgcagcgtctgccgaaagtcggtgagcagattaacattgatggctgcctgtttgagccgctggaaattcagaatcaccgtattaaccgtgtaaaaatcactctgccggagaatccggaagacagtgacgattaa

SEQ ID NO: 275727 - DNA, 1413 bp, Morganella morganii
atgtccaaacaacaaattggtgttgtcggtatggccgttatgggccgtaacctcgcactgaatatcgaaagccgcggttattctgtttctgtttttaaccgctcttcagataaaaccgatgaagtgattgctgaaaacccgggaaaaaaactggttcccagctacagcattgaagagtttgttgactccctggaaaaaccccgccgtattctgctgatggtcaaagctggtgaagccaccgataaaaccatcgcatccctcaccccgcatctcgataaaggcgacattctgatcgacggcggtaacaccttctttcaggacaccatccgccgtaacaaagagctgtccgcacagggttttaactttatcggcaccggcgtttccggtggtgaggaaggcgcactgaaagggccgtccattatgccgggcggacaaaaagaagcttacgaactggttgctccgatcctgaaacagatcgcggcacaggccgaaggcgagccgtgtgtgacctatatcggtgctgacggtgccggtcattatgtcaaaatggtgcacaacggtatcgaatacggcgatatgcagctgattgcggaagcttactccgttatgaaaaatgccctcggcatcagcaatgatgaactggcttcagttttcagcgagtggaacaacggcgaactgagcagctacctgattgacatcacaaaagatatcttccgcaagaaagatgaagacggcaactatctggtggatgtgatccttgatgaagccgccaacaaaggtaccggtaaatggaccagccagagcgcactcgacctcggcgtgccgctgacactgatcaccgaatccgtatttgcccgttatatctcattcctgaaagaccagcgcgttgcggcctccaaagtactgaaaggaccgaaagcagctgcattcagcggtgataaagcagagtttattgaaaaagtccgccgtgctctgtatctgggtaaaattgtctcttatgcacagggcttctcacagctgcgcgttgcctctgatgagtacaactgggatctgaactacggggaaatcgcgaaaattttccgcgccggttgtattatccgtgcccagttcctgcagaaaatcactgacgcatatgcggaaaacccggcactggctaacctgctgctggctccttacttcacacagattgccgatgaatatcagcaggcgctgcgtgatgtggtctgctacggcgttcagcacggtatcccgacaccgaccttctctgccgctatcgcctattatgacagctaccgcagcgcggtactgccggcgaacctgatccaggcacagcgtgactatttcggtgcacatacttataaacgtactgataaagacggcgtgttccacaccgaatggctggaaaataattaa

SEQ ID NO: 275728 - DNA, 879 bp, Morganella morganii
atgaataacataaatccctggggtgatgtggttctgccttcacggccggagtaccggctctcagctatgctgctcacctttttcctcgccctgctcaataccggcgtttatatctggcaggtgaattatgcttcgccgctggcagaccaggtctacaatatgctgctggcaggcggcagtgtgtatcagttctcactgaccggtgactggtggcgctatgcaaccagtaccctgcttcattccgacccgctgcatctgggcatcaacgtcattgccctcctggtgttcggcattaactgtgaagcactgaccggaaaagtacggatgctgtttatctatctgttcaccggtatcgctgcgtcctttaccagcgcactctggcaggctgctcagaacgatatgtttccgctgtccggtatttctgtgattgtcggtgtcggggcatccggcgccattatggggcttgccggtgccaccgtgatgtatcttatccgggcccggaaagatccgtccgtgtctgtggcagacagcctgcgttataaaaacctgctgatcaccatgattgtcctgattgtgctgtcggtactcagtgcggtgccggatgatgaggagccggtgacggataatgtggcccatttcagcgggctgatttgcggtgctgttctgggatggctgtattccgcggtctccggtgtccgtaaccgcaaaatggatcgccgttcatggctgatttccgccgccgcaaccggtctgcttatcctgctgctgttcacctgctcttcaagccgtgaacaacaattgctctttgagcggaaaaggattctggaagatatcgcggttcagactgatgcactaccatccggacagaaaaacaattaa

SEQ ID NO: 275729 - DNA, 228 bp, Morganella morganii
atggtgattaaacgattaatgacagaagcaggtgatgatatggattattggtttgtatcgtacaaagtgcgtgcccgtaacggagacactttacagggacatcagatcacagaaaccgaagccggtgtgtcaccccgggatgcattagaacaagctactcagaaaattgccgacgagtctcaggctgacctgcgttcagtccgtattcttgcctttaaccgtgtgtaa

SEQ ID NO: 275730 - DNA, 279 bp, Morganella morganii
ttggataagatttttaccggtgtggtgcagggcacggcgctgattttaaaaattgaagaaaacaatgatcatctgattcatattgtgcagtttccggaggaattattaacggggctggcgattggtgattccgtgtcgtataacggctgctgcctgactgtcgcagcgattgataacagccatgtcgggttttatcttttcaccgataccctgctgaaaaccgcgctcgggcggctggctgcgggtgataaggtcaatatcgaaagagtggcggtctga

SEQ ID NO: 275731 - DNA, 1389 bp, Morganella morganii
atgttagatcttcttattggtgctgtcgtcgccgtcggcgtcgggcgctatattattaaagggtattcagccacaggggtgctgatggtcgggggcttactgcttctgatcatcagtgtcatcatggggaaaaacatcctgccgtccgccgccacctccaccggctggggaccgacaaacattattgagtatgtgaagtacctgctgatgaaccgcggcggcgacctcggtatgatgatcatggtactgtgcggctttgcggcttatatgactcacatcggtgccaatgacgtggtcatcaaaatggtctccaaaccgttacaggtcgtgaactccccgtacctgctgatgattgtggcctactttattgcctgtctgatgtctctggcggtttcctccgccaccggtctcggtgtgttactgatggcaaccctgttcccggtgatggtgaacgtggggatcagccgtggtgcggcggcagctatctgcgcctctccggcggcaattatcctggcaccgacctccggtgacgtggtgattgcggctgaagcctctatgatcccgctgaaagagtttgcgttcagcctgactctgccgatttctatcgtggcgattgtctctatggcgattgctcactatttctggcagcgtttccttgatcgtaaagaagatatcaaatctgagatcctggacgtcaaagaaatcaccaccaatgcgccaaaattctatgccattctgccgtttatgccgatcatcggcgtactgctgtttgatggtaagccgttcagcatcggtttcctgagccatatcgtgctgcctgaattacacatcatcacgattattgtcggctgtattattttgtctgccatcattgaattcgtccgtggttttgacggcaaaaaagtctatgccgggctggatgtctgctaccgtggtatggcggatgcctttgcaaccgtggttatgctgctggttgcggccggtgtgtttgctcagggtctgagcactgtcggctttatctccggtctgatcagcctggcgcagtctttcggttccggtgctatcatcatgatgattgctctggtgattattaccatgctggcggcgatgaccaccggttccggtaatgcgccgttctatgcgtttgtggagctgatcccgcgcctggcacagcagatgggtatcaacccggcgtacctggtgatcccgatgttacaggcatccaacctcggccgtaccatgtcaccggtttccggtgtggtggtggcggttgccggtatggcgaaaatttcaccgtttgaagtggtgaaacggacatccgttccggtgcttgtcggcctgctggtggtgattgtcgccactgagttcctggtgccggtaacactgtaa

SEQ ID NO: 275732 - DNA, 1863 bp, Morganella morganii
atgaaacgatttttcaccacgctgattattctgcttgtcgtgatagcggcgggcctcgcggccttaatcctgctggtgaacccgaatgatttccgcgactatatcgttaacaaggtgaaggaagacaccggttacgagctggtgatgaaagatgatatgcgctggcatgtctggccgaaactgagcatcatcaccggtaaaatgtccctgactgcccccgatgccgccgaaccggtggtaactgccgaaaatatgcgcctcgacgttgaactctggccgctgctgtcccatcagttatcggtccgtgaagtgatgcttgacggcgcactgctgaaaatcctgcctgaaaccgaatcaaaagagaagaaaagcgcccctgttgcccccggtaatcagaaagcccgtccggtgcctgtcgaacaggaaaacaaatggtcgtttgatgtcgatcgcatccgtatcgccaacagcctgctgatctggcagacagaagacggttcgcagatcaacatgcgcgatattaatttctctcttgagcgtaatacccctgaacgctatgtgatagcgctgaacagtaatattctgcgcaatcagcaggagctctctttcagcctgagttctgatattgatctttctcagtacccggtgcaggtcagcggcaatattaaccgtctgaattaccgcctgtccggtgccggtctgtatgccaacggcatcaacggtaacggcacgaccacctatacctggcacgaagcggtcggtcaggcaccgcagtccctgatcctggaaaatctgaaactgagcgctaacgaaagtcagctaagcggcacagtggaagcggcactcggtgaaactccgcgttatgatattcagctgacctcctcaaaactgaatctggataacctgctcggttatgagcgtgccgtacatgcagaaaacggggaaaaaaccccggttgccaccaaaccggcagtggtcaccaccggcagtgatgcggataaatatgatctgacctttatgaaccacttcaatgccacgctggcgctgaatgtggattccctgatttaccagggaatggaaatcggccagctgacggtaaaagcagagaaccggggcagcatcacggaaatctccaaaatgaccggcaacgtattcggcggccgtttctctctgccgatgacgatttattccgaaaaagttccggcgcaacttcgtattaaaccgctgttacagaatattgatgttaaaccgttgctggcggcgtttaaaatgccggaaaaattcaccggacgcctgagttttgacggcgatctgcgtggtaccggttatgaccaggacgcggtattaaacaactggcgtggtgatgtggcactgaccatcaccgatgttaagctgctcggcctgaatattccgtatcttatccagcagtcgctctcccaggcgacagataaagtggcacagccggaatcgatggatactatgaccgaagcgaaaaaactggaagctatcggtaccctgaataacggtgaagtgaaaatcagtaaaattctggcggtatccgatgcctttaatatcaccggcagcggccggacaaatctggtgaaacagaatctggatgtgaacctgggggttcagatcctgaaaggctggggaaaaaccaatgatctggtgacctggctgcagtctgtccgtattccggtggtgctgttcggtaactgggataatattcagtataagttcgaagtggaaaccctgttgcgtaatcagatacagcagcgggtaaaacaggcggccggagagctgctgaacgaaaaaaccgggggggatctcaaagctgtggaatccttgcttaaccggttataa

SEQ ID NO: 275733 - DNA, 582 bp, Morganella morganii
atgcgactttgtgaccgtgacattattcagtggctcgatgacggcagactgaccatctccccgcgtccgccggttgagcggatcaacggggcgactgcggatgtccgcctcgggcatcagttccgggttttccggggccataccgccgcgtatattgatctcagcggcccgaaagaagaagtgaatgcggcgctggaaaatgtcatgagtgatgaaatcaccctgactgaagatgaagtgttctacctgcatccgggtgaactggcactggcagtgacactggaatctgtcacactgccggataacctggtcggctggctggacgggcgttcatcactggcacgcctcgggctgatggtccacgtgaccgcacaccggatcgatccgggctggcacgggcaaatcgtactggaattctacaactcaggtaagttacccttggcactgcggccgggaatggtgatcggtgccctgagttttgagccgttatccggctccgctgaccggccgtataaccgccgcagcgatgcaaaatacaaaaatcagcagggagctgtaggcagccgtatcagcgaagattaa

SEQ ID NO: 275734 - DNA, 645 bp, Morganella morganii
atggctgacacagcacagcagcagtgcactatcatcggcatcaccggcgcatccgcgtcaggaaaaagtctgattgccaacacgctttatcacgagttacgtgctcaggtgggcgatcacaatatcggtgtgattccggaagactgctactacaaagatcagagcgatgtgccgatggaagagcgcatcaaggtcaactatgaccatccgggctctatggatcacgaactgctgttacagcacctgaaaacactgaaatccggtaaggcgattcagttaccgcaatatgattacaccgggcatacccgcaaaccggaatcggttctgttcagcccgaaacgggtgattattcttgagggcatcctgctgctgacagacaaacgtctgcgcgagcagatggacttctccattttcgtcgacaccccgctggatatctgcctgatgcgccgcatccgccgtgatgtgaatgagcgcggacgcacactggattcggtgattgcacagtacaataaaaccgtccgtccgatgtacctgcaatttattgaaccaacaaaacaatatgctgatatcatagtgccgcggggcggtaaaaaccgcgtggcgattgatattctgaaagccaaaatcagtcagttctgcgattaa

SEQ ID NO: 275735 - DNA, 1113 bp, Morganella morganii
atgaatgcgaaatcccccggggagatgaaccctgaattgctgaacgaccaggtcgcacaggtactggcgacatttgaacatccgacactcaaacgcaacctgattgccatcaaagcgctgaatcactgcgcgatgctggatgatgtgctgcatgttgagctggtgatgccgtttgtctggaagcgcccgtttgaagcactgattgaagcaaaaaccaaagaattacgcaaagtgaccggtgcggcggcggtggactggaaactgcgtcatgatatcgcaacactgcgccgggccaatgatctgccgggcattaacggtgtccgcaatattctggcggtcagctccggcaaaggcggtgtgggtaaatccagcactgcggttaaccttgcgctggcgctggcggcggaaggggcgaaagtcggtatcctcgatgcggatatttacggcccgtccatcccgaacatgctgggcaccaccaaagagcgcccgacctcaccggacggccagcatatggccccgattatggcttacggcctggcctccaactctatcggttatctggtgacagatgataacgccatggtctggcgcggcccgatggccagtaaagccctgatgcagatgttacaggataccctgtggccggatctggactatctggttatcgatatgccgccgggtaccggtgatatccagctgaccctctcacagaacatcccggttaccggggcggtggtggtaaccactccgcaggatatcgcgctggtggatgccatgaaaggtatcgtcatgttcaagaaagtgaacgtgccggttctggggattgtggagaacatgagtgcgcacatctgcagtaactgcggccatgtcgagccgattttcggcaccggcggggcggagaaactggcggaacgttatcacaccaaactgctgggacaggtgccgctgcatatttcgctgcgtgaagacctcgatcgcggccagccgacggtgatgcgtgacccggacggcgaatttgcggatatctaccgtgagatcgccgtcaatgtgacggcagaaatgttctgggaaggggataaaatcccgacagagatcgctttccgcgctgtataa

SEQ ID NO: 275736 - DNA, 2034 bp, Morganella morganii
atgtctcagatcgctaataaaattttggtaacctgtgcgttaccatatgcaaacggttcaatccatctcggtcatatgctggaacatatccaggctgatatttgggtccgttttcagcgaatgcgcggcaaagaggttcacttcatctgcgccgacgatgctcacggcacccctattatgctcaaggcacaacagcaggggatctctcctgaagagatgatcgccaacatgagcgtcgagcatcagaaagactttgctgatttcgccatcagctttgataactaccactccacgcacagcgaggagaaccgggtgttatccgagaacatctatctggcactgaaaaagaacggccatattgaaacccggaccatttcccagctgtatgatccggaaaaaggcatgttcctgccggaccgctttgtgaaaggtacctgcccgaaatgtaaagcggaagaccagtacggcgacaactgcgaagtgtgcagcgcgacctacagcccgaccgagctgattaacccgcgctccgtggtttccggtgccacaccggtgctgcgtgaaagtgagcattacttctttgatctgcctgcatttgctgacatgttacaggcatggacccgcagcggcgcgctccaggagcaggttgccaacaaaatgcaggagtggtttgattccggcctgcagcagtgggatatcagccgtgatgcaccgtatttcggctttgagatcccggacgcaccgggcaaatacttctatgtctggctggatgcgccaatcggctacatggggtcattcaaaaacctgtgtgataaacgcggtaatctcgattttaacgagttctggaagaaagattctgacgcggatctgtaccactttatcggtaaagatattgtgtacttccacagcctgttctggcctgccatgctggaaggcagcggttaccgcaagccgaccaacctgtttgtccacggctatgtgacggtcaacggtgcgaagatgtccaaatcacgcggcacctttatccaggcccgcacctatctgaatcacctgaatgcggacagcctgcgctattactacgcggcgaaactctcttcacgtattgatgatattgacctcaacctggaagatttcgttcagcgtgttaacagtgacatcgttaacaaagtggtcaacctggcatcccgtaccgccggatttatcaaaaaacgctttaacggccgcctgagtgcaaccctggctgaacctgagttatatcagcagtttgttgatgctgaaaaaaccatcagcgaagagtacaccagccgtgaattcggcaaagctatccgcgaaatcatggcgctggctgatgtcgccaaccgttatattgatgagaaagcaccgtgggtggtggcgaaacaggaaggtaaagatgatgagctgcacgccatctgcaccatgggtatcaacctgttccgcgcactgatgacctatctgaaaccggtgatgccggaactggcggcccgcagtgaagcattccttaatcaggaactgacactggacggcattgccaaaccgctgctggatcaccagatcgcagacttcaaagccctgttcagccgtattgaaatggcgaaagtggaagagatgattgaagcctccaaagaggatatcaaagccatgtccgccaaaccggtcagcggcccgctggcagatgatccgattgcggacaccatcagctttgatgattttgccaaagtcgatatgcgtattgcacagatcatgtctgccgatttcgtggacggctctgacaaactgctgaaactggtactggatctcggcggcgaaacccgtcaggtcttctccggcatccgacaggcgtatccggacccgaaagcgctggaaggccgcctgacagtgatggtcgccaacctcgcaccacgcaaaatgcgtttcgggatctctgaaggtatggtcatggccgcaggcccgggcggaaacgagattttcctgctcagcccggattccggtgcgcagccgggtcagcaggtgaagtaa

SEQ ID NO: 275737 - DNA, 453 bp, Morganella morganii
atgaaaccaaaacagatagcggaaaccggctggcgctatctccgggcatttctgatcctatatctgtgcctgtttgccggcaatattatcgcggtattactgccgttttccgtcccgggtagcatcgtaggcatgctgctgctttttgtgctgctcgcactgcagattgttccggcgcactgggttcagcccggctgcaccttattaatgaaaaacatgacgatgttatttctgccgatcggtatcggtgtgatgaactattacgataccctcagcgcccagctgctgccgatcctcgtcgcctgtgtcgtcagtacctttatcgccatgtgtgctgtggcgctgagttctgaatttattcaccgccgccatgttccggttcctgaacaacaggaagccgatgccgttgccgccgcagaacacactgaacaacaagagaaacgcaaatgttaa

SEQ ID NO: 275738 - DNA, 696 bp, Morganella morganii
atgttaacgcatatctggtggtcgctcccgcttaccatcggcgtctattttctcgccagagctatctatatcaaatttaagctgccggtattaaacccgctgctgatatccatcgtaattatcattccgctgctgatattcaccggaacttcatacaaccactattttgagggcagccgcatcctcaacgatctgctgcaacccgccgtggtggcgctggcgttcccgctgtatgagcagttgcatcagatccgcgcacagtggaaatccatcatcaccatctgctttgccgggagtgtgattgccatggtcaccggtaccgctattgcctttatgatgggcgcgacaccggaaattgccgcctctatcctgccgaagtcagtcaccaccccgatagcgatcgcggtgtccaattctatcggcggtgtggcagcaatcagcgctgtgtgtgtgattttcgtcgggatcctcggtgcgattttcggccataccctgttcagacgcctgcgggttacgaccaaagcctcacgcggcctggcaatgggtacagcctctcacgccctcggtaccgcccgctgcgcggaagaggattatgtggaaggcgcttacagctcactggcattaatgacctgcgggattattacttctctgatggcgccgtttatcttcccggtgctgctggcattattcggttga

SEQ ID NO: 275739 - DNA, 885 bp, Morganella morganii
atgcaaaaccgctttcatgcagctctgaacacgctcccttccccgttacagacccagctgacggacattgtttgtgctgatactttcccgggatacttatctgccaaacaggtcactgcactctgcaacgccgcaggtactgatgaggatgcactcgcgctggctatgctgccgctggccgcagcctgtgccgtgacgccggtgtcccggtttaatgtcggcgcagttgcacacggactgagcggtaacctctatttcggtgccaatatggaattctgccatgtgccgttacaacagacagtgcatgcagaacagagcgcgatcacccacgcctggctgcgcggcgaggaaggtttgcgcaaagtcaccgtcaattacacaccgtgcggccactgccgtcagtttatgaatgaactgaacagtggcacagacctgctgattcagttaccggaactggctgccatgccgctgaaaaccctgctgccgcatgctttcgggccggtggatctgggcattaaaacccggttatttgaccaggtgcatcacggttatcatttcctcgccaccaatgcggtggtcggaaaagcgctcgaggcagccaaccgcagccatgcgccgtattctcattcccacagcggtgtggctcttcaggacagccgcggacgcatctacagcggtgcgtatattgaaaatgccgcctttaacccgggactgccgccgctgcaggctgcgctgatctttatgaatatggccggcggcgacctgcacgacatccaccgtgccgtgctggtggaaggcagtaacgccatgctgtcacagtgggaaagtacctctgccacactgagcgctctggggtgtcaggatatcgccctgttcagctattaa

SEQ ID NO: 275740 - DNA, 1698 bp, Morganella morganii
atggaactggaatacgaaagcaaacgtgcattatatatcccgtatgcgggccctatcctgttagaatttccgctgctgaataagggaagcgccttcaccgaagaagagcgcagtaatttcaacctccacggcctgctgcctgaagcagtggagaccatcgaagagcagactgaacgcgcctatcgtcagtattctgattttaaaaatgatactgacaaacatatctacctgcgtaacattcaggatacgaatgaaacgttgttctaccgtctgctcaatgctcacctcaaagaaatgatgcctatcatttacaccccgaccgtcggggcggcctgtgagcatttctcggacagctatcgtcgtgcgcgcgggctgtttatctcttatccgaaccgcgcttacattgatgacatgctgcagaatgccaccaagcagaatgtaaaagtcatcgtggtaaccgacggagagcggatcctcggtctgggtgaccaggggatcggcgggatggggatcccgattggtaaactctctctgtataccgcctgcggcggcatcagcccggcgtataccctgcctatcgtgctggatgtcggtaccaataaccagcagcgcctgaatgacccgctctatatgggctggcgtcacccgcgtatcaccggcgaagagtatgatgaatttgttgatgaatttatcaatgcggttaagcgccgctggccggatgtgctgttacagtttgaagatttcgcccagaaaaacgcgatgccgctgctggaacgctaccgcgatcagctctgctgcttcaatgatgatattcagggtaccgcgtcagtcactctcggcagcctgattgccgccagccgtgccgcaggcggacagctgaaagaccagactgttgccttcctgggtgccggttcagccggatgtggtatcgccgagcagattatcgcgcagatgaagtctgaaggcctgagtgaagaacaggcgcgtgcccgtatctttatggtggacagattcggcctgctgacggacaaactgccgaacctgctgaatttccagagcaaactgatcaccaaaagtgacattattgcagactgggatgtgcagaatgatgcaatttcactggaagatgtggtccgtaacgcgaagccgactgtgcttatcggggtttccggtcagccggggctgtttacggaagagattatccgtgaaatgcacaaaaactgtgcgcgtccggtcgtcatgccgctgtccaacccgacctcccgtgtggaagcccgtccggaagatattatcgcctggacagacggtcatgcactggttgcgaccggcagcccgtttaatccggtgatttataaagataaaacctatcctatctcccagtgcaacaactcctttattttcccggggattgggctgggtgtgctggccgccggtgccagacgtgtgactgacggcatgatgatggcagcaagccgcgcactggcggaatgctcaccgatggttgttaacggcgaaggctcactgctgccggatatcgaggacatcaaaaaagtctcccgtatcatcgccaaacaggttgccaaagaagcacagatccagggtgttgcgactgtgacctctgacggtgctctcgatgaagctatcgaacgcaacttctggcatccggaatatcgtgtttaccgccggacatctttctga

SEQ ID NO: 275741 - DNA, 774 bp, Morganella morganii
atgggaaaagcccggatatggaaacggatcattctgtggatgctggcaggtattattctggcagcagcagcggctattgcggcagatcgctggattagctggaaaaccgcgccttatatctatgaaaatatcaatgacctgccgccgagtgaagtcggcatggtactcggtacggctaagtactataaaaacgggacaattaaccaatattaccggtatcgtattcagggtgccgtgaatgcgtataacagcggcaaggtgaagtatctgctgctgagcggcgataatgcccagcacagttacaatgagcccagcacgatgcgcaaggatctggtgaatgccgggatcccggccagtaaaattgtgctcgattttgccgggttccgtacactggattccgtggtgcggacccgtaaagtttttgataccaatggctttacgattatcacccagcgcttccattgtgaacgggcgctgtatatcgcgatggaaaaaggcattgaggcgcgctgttacgcggtttcctccccgaagaatatgtttactgtccgggcgcgggaagtggttgcccggctgggcgcactggctgatttatatattctcaaccgcgagccgcgtttcctcggcccgcaggaatcgattccggcaccacaaacgttaccggagaatgtgccgtcatatccggcagtgacaccggaagagctgaatgtgctttatcctgtgacaccggaaaaaccggcggataccacacaaccggcacccgccgcgcaataa

SEQ ID NO: 275742 - DNA, 1152 bp, Morganella morganii
atgaatacctcagtcacatctgcctctgcccgtattgatgtcctcgatatggtgcgggggctggccatcctcggtatttttattctgaacatcggcggatttgcgctgccgtctgcggcatacctgaacccgctgtacaccccggcggcgtctgcaacagatatcgccacctgggcggtactgagtgtactggttcaggggaaattcctcggcatgtttgcactgctgttcggtgccactctgatgatgctcagccgttacagccagccctggaatatggcgcggttactggtgcttggggtgatcgggctgctgcataccactctgctctggaacggggatattctgctgatgtacagcctgaccggcgttgccgcctgccggatcatccataatgtttcctcccgctggtggctgaagttggtgccggtgctgatcctgaccggattgtttttactgtttttcctgttatcggaaggcggtgagctgaaactgctgtactggcagccgtcgcaggaaatgctggattatgaagtactgatcgccaacactggtggtattgccggcatgctggacagaatcagtaccatcagcggcatgctgatgatgatggtggttcagtatggctggcagttactggcaatgatgctgctgggcgcaacactgatgaaaaacggctggctgaaaggggcatatcctctgtctcattaccggcggctggcggtgtggctgcttcttccgtcactgctgctgcaggcggttgtaatgtggctggaatacctgaacgactggagtgtcttctggatgggcactgtcggttatccgctggcggatattttacagccggtgcagaccaccgggcttatcgcactgttctatggtttgcagccgcagctgaaacccgttgccgcctgtctgcaacgggtcgggcgtaccgcactgagcagttatctgctgcaatcggtgtgcggggtgatactgtttgagtacttcggttatttctgtcagtttgatcgcctgacactgctggcatttgtgccgctgatgtggctgatcaacatcatgttctcaaccctgtggctgcgttatttttctcaggggccggtggagtggttatggcggcaggccgccaataagctggctgcccgctga

SEQ ID NO: 275743 - DNA, 660 bp, Morganella morganii
atgtcatcattaagccgggaagcagaacttgtccacgccgcgctcatcgcacgcgggctggagacaccattgcgggagcagacactgccgccggaaacccgcaaggttcagattgaggcgcatatgacagaaattatgaagctgctcaatcttgacctgagcgacgacagtctggcagataccccgaaacgtattgcgaagatgtatgtggatgaaattttttcaggactggattatcacaatttcccgaaaatcaccctgattgaaaataaaatgaaagtggatgaaatggtgacggtccgtgatatcacgctgaccagcacctgtgaacaccatttcgtcactatcgacggtaaagccaccgtcgcctatatcccgaaagacaccgttatcgggctgtcgaaaattaaccgcattgtgcagttctttgcccagcgcccgcaggtacaggaacgactgacacagcaaattctgctggcactgcaaacactgctcggcaccaccaatgtggcggtatccattgatgcggtgcattattgtgtcaaagcgcgcggtatccgtgatgcaaccagtaccaccaccaccacttcactgggcgggttatttaaatccagccagaatacccgccaggaattcctgcgcgcggcccgtcatatttaa

SEQ ID NO: 275744 - DNA, 189 bp, Morganella morganii
atgaaagaactaaatcaggaacaattattatctgtttcaggtgccgggattatcgctgccggaaccgtttttgccggtattgcatttgatattactgcggtgattatgtctgatattaccggtggccgcgaagagattatttttgctgaccatcgggatgcctcccgtacccgttatgaggttatataa

SEQ ID NO: 275745 - DNA, 222 bp, Morganella morganii
atgagaaagaacaattttcttcagaaggcaatcaatgatctgaaagatatacgattgtggtccatgagtatcagcatgatactgacatctctggcagtaacgcactcgtcattgcgcattgtcagaccggacaatgtgatgactgatgtttttctcatccctgttatttatgtgggattctatgtcctgataaaaaagatactgtactttatatttgaataa

SEQ ID NO: 275746 - DNA, 1170 bp, Morganella morganii
atgacgacatctcactccgcccgtcagacaacggcgcttcatattgcagtcagtggttttcttgcgctggtggtggccatgggaatagggcgctttgcttttaccccgcaggtgccgctgatgattgacgagcaccagcttgacctgacaaccgccggtattgtggctgcctggaactacctcggctatctggccggatcctttgatgccatgcgggcaaaacgcggtattgagctgcggctgtggaccggtttatggggcgcggtgattatcacactgctgtcagcggtgatttccggggcggtgctgcacagtatcgcgcgcttttttatcggctgggcgagcggctggacactggtgttagcggccgcctggaccaatgacgcactggcaaaactcaaccgtccggcactgagtgtcgcggtttacggcggcaccggcaccggaattctgctgtgcggactggcggctatcggcattcagggtttatcactgaccgcctcgcagggctggtggatctatggtgctgcggcactggtattcagtctgtatgtcagccgctatctgccgcgtccgggggagctgagcagcagcaattccccgcacagtaaaccgctgatgacaccaaaaatccgccgtttattgtggagctatgcgctggccggattcggctatattctgcctgccacgtttttatcacagatggcggcggcgcgtttccccggcagtctgtttgctcagtttgtctggccggtattcgggatcgccgccgtggccggtatcgttgctgcgattgccgcgcggcgttttttcacgccgcagctgcgactggcaatcactctctgggcacaggcagcgggtattctggcggcggaagtcatgcccgggatcagtggcctggcggtcagtgcatttctggtcggcggcggcctgatggctgcggtacagctggcattccagtgcggacgcgaactggctccggagcacggccgctatatggccggattgctgactacctggtatgccgtcgggcagcttggcggcccgctggtatcctctgtctccgcgtattttaccggtaaactggaaccggcgctgtgggtggcctttgcagcactgattatcggtggtttgctggttttccgtgatcgcagcgatataaaagaataa

SEQ ID NO: 275747 - DNA, 123 bp, Morganella morganii
atgctgtttcactcccggcgcctgctgggcgcagataaaacggataataaagagaagggcattatggcagacttacagcacaagttgaatgatgtggcacaaaagcgtgagcaacagatctga

SEQ ID NO: 275748 - DNA, 1251 bp, Morganella morganii
atggctaatccgacagaaagttacacctcttcgttaatctctttacaggaagcactggataagctgctcgcgaccccggccgcgatcaccggtactgaaacgatcgcgctgacggatgccgccgggcggatcactgcctcccctgttatttcgcctatcaatgtaccgccatttgataattccgcaatggatggttacggcctgcgcctgtccggttgggacggaaaaaccccgctgccggttgccggtcgcgcactggcgggtgtgccgtttaaaggtgaattaccggccggacaatgtgtccgtattatgaccggcgcactgataccagcgggtgtggataccgtggtaatgcaggaagaagcggaagtgtcggatgccgggattacctttaccgccggaattaccgccgggcagaatatccgccgtgttggtgaggatattgcgcagcacagtgaagttttaccggcaggcaccaaactggccgccgcccagctgccgctgattgcctccctcggtctggcagagctgtccgtggtgcgcaaactgaaagtcgcggtgttctccaccggtgatgaattgcaggctgtcggccagccgctgggtgacggacagatttatgataccaaccgctttgcggttcgtctgatgctggaaaaactcggctgtgatgtgattgatctcggcgtgatcccggataatccggacattctgcgcgctacctttgagaaagcagatgcactggctgatctggtgatcagcagcggcggcgtgtctgtcggcgaagcggattacaccaaacagattcttgatgagatcggcaaaattaatttctggaaactggcgattaaaccgggcaagccgtttgctttcggtaaactgaataacgcctggttctgcggtctgccgggtaacccggtctccaccaccgttaccttttatgagctggtgcagccgctgatcgcccgcctgtccggtttcagccagtggcagccgccaatgcggtttaaagccgtcaccaccacgccactgaaaaaatccgccggtcgtctggatttccagcgcggtattgccggggtgaatgaatccggtcagatggtggtaaaaaccaccggcgaccagggctcgcatattttcagttcattcagcctcgccaactgctttattgtgctggagcgtgagcgcggtgcggttgccgccggtgaaaccgttgaaatcgagttttttaaccatttactgaagaatgactga

SEQ ID NO: 275749 - DNA, 774 bp, Morganella morganii
atggcgactgaacccggacatattgagctcagtgatgaggaagcactgcgttataaccggcagatcgtactgcgcggctttgattttgatggtcaggaagcgctgaaagccgggcgtgtgctgatcaccggcctcggcggactcgggtgtgcggcagcgcagtatctggcggcagcgggcgtggggcatctcacgctgctggattttgatacggtgtcgctctccaatcttcagcgtcagatcctgcataccgatgcccgcatcgggatggcaaaaactgaatccgccgcgatagcactgaaaaccgttaatccgcattgccggactgaaactgtcaccaaacaactgaatgatgatgagcttaccgctctgattcagtctcatcatgtggtgctggactgcaccgataatgtcgcagtccgcgaacagctgaaccgggcgtgtcatcagatgaagatcccgctggtgtccggtgccgctatccgtatggaaggacagatttctgtctttacctggcaggagggggaaccctgttaccgctgcctgagccggttattcggggagaacagtctgacctgtgtggaagcgggtgtgatggcaccgctggtcggcaccatcggcaccctggaggcgatggagtgcatcaaactgctcaccggctacgggcaggtgagcagcggaaaagtggtgctgtttgatgcgatgcgcatgcagttccgcaccattaaccttaagcctgatcctcagtgcgaggtgtgtggctgtaacggatag

SEQ ID NO: 275750 - DNA, 1305 bp, Morganella morganii
gtgcttaatcaaaccgtaaaacatatttttaatgcccgtctgccggatcgtgctggcctgtggcgtatcgacatcgataatcagcgcattaccgcgattgtaccgcagccggagggtgaagtactgccggagagcctggacgccgaaggcggcctggtcaccgcgccgttcgtcgagccgcatattcacctcgataccacccagactgccggggaaccggcgtggaaccagtccggtaccttatttgaagggattgaacgctgggcggaacgcaaagcgctgctgacgcacgatgatgtgaaaacccgtgcctggcagaccctgaaatggcagattgccaacggcatccagcatgtccgcacccacgttgatgtctccgatgccaccctgaccgcactgaaagcgatgctggaagtgaaacaggaagtcgcgccgtgggtggatttacagattgttgcgtttccacaggaagggatcatgtcctatccggacggtgaagcattgctggaggaagcactgcgcctgggcgcggatgtggcgggggctatcccgcactttgagtttacccgcgaatacggcgtggaatccctgcacaaaacctttgcgctggcacagaaatatgaccgcctgatcgacgtgcattgtgatgaaatcgatgatgaacagtctcgtttcgtggaaaccgttgccgcgctggcacaccgcgagggaatgggcgcgcgtgttaccgccagccacaccacagcgatgcactcttataacggggcttatacctcccgcctgttccgtctgctgaaaatgtccggtattaactttgtggcgaacccgctggtgaatattcacttacaggggcgttttgatacttatccgaagcgccgcggtatcacccgtgtcaaagagatgctggcggcggatattaatgtctgcttcggtcatgatgacgtgtttgacccgtggtatccgctgggcaccgccaatatgctccaggtgctgcatatggggctgcatgtctgtcagctgatgggatatggtcagattaatgacgggctgaaactgattacggaatacagtgcgcgtaccctgaacttacaggattacggcgtggcggaaggcaaacgcgccagcctgctgatcctgccggcggaaaacgggtttgatgctgtccgccgtcaggtgccggtgcgttactctgtccgtgacggccgtgtgatagcagaaacacagcctgccgtcacacagatccatctggataaaccggagactatccgttacagccacacacctcgcactgaggatcaggcttaa

SEQ ID NO: 275751 - DNA, 1248 bp, Morganella morganii
gtgtccggggataaaaattacagtcatgggcctgtgcccatatccgcgcggaaaggcgggctggcattaacctttgtaatgctgggtttgaccttcttttccgccagtatgtggaccggaggtgctctcggtaccggtctcagttttaatgatttcttcctcgcagttcttatcggtaatcttcttcttggtgtctacaccgcttttcttggtttcattggttccaaaaccggcttaacaacccatcttctcgcgcgttactccttcggtattaaaggctcctggctcccttcattcttactcggcggcacacaggtcggctggttcggtgtcggtgtggccatgtttgcgattccggtcggcaaagcaacgggctgggatatcaactggctgatcggtatctccggggtgctgatgaccattaccgttttcttcggtatctctgcgctgaccgtactgtccgtgattgcggttccggcgattgccattctcggcagttactcggtttacctcgcggtaaccggtatgggcggcatgagtgcattgcgcgatgtgatcccggcacagccgattgattttaatctggcgctcgccatggtggtcggttcgtttgtcagtgccggtacgctgacggccgattttgtccgcttcggccgcaaaccgaaaattgcggtgctggtggcgattatcgccttcttcctcggtaactcactgatgtttatcttcggtgccgccggagccgcatcgctgggtatggcggatatctctgatgtgatgattgctcaggggctgttattaccggcgattatcgttctcggtctgaatatctggaccaccaatgataacgcgctttatgcatccggtctggggtttgccaatatcaccgggctttccagcaaaaccttatctatcgtcaacgggcttatcggcacactgtgcgccctgtggctctacaataattttgtcggctggctgaccttcttatctgccgctatcccgccaatcgggggcattattattgccgattacctgatgtaccgtcaccgttatgaaacgtttgaccgcagcaaaatgcgcgatgtgaatgtcagcgcgctgctggccgtggcggcaggtgtgattgccgggcactggctgccggggattgtgccggtgaacgcagttctcggcggggcgttaagctatgctgtcctcaatccgttacttaaccgtcgtcgtaccaccaacccggagatgacccgtgcttaa

SEQ ID NO: 275752 - DNA, 1353 bp, Morganella morganii
atgcaacagaatactgtgcagatgaaacgcgtcttaaatacccccgcgttggttttcttcgggctcgcctatatggtgccccttggtatcttcacaacttacggacaggttaccgtcctcagtgaaggtcatttaccggttgcttatattattactctgacagccgtcctgtttaccgcactcagctattgtaaaatgaccagcacactgccgctggccggctctgcgtattcctatgtccagaaaatcttcggcgggaataccggatttctggtcggctgggcgcaattgctggattatctgtttctgccgattatcaactatatcgccatcggtatttttgtgcatgaagccctgccgtcggtgccgatggagctgataatcgtctccactattgtgattgtctctgtgctgaatattctcgggatcaaactggtcacctcgatgaatatgctgatcattgtgatgcagctgatatttatcgcgctgttcctgtatctcagcttcagttctgcgttcacactggataaagaggcgctgctcgccccgctgacggtgatgtctgatcaggtgtccgggctgtttgccggtgcggcggttctgtgtctcgcgttcctcgggtttgatgccatctccaccatggcggaagagaccaaagacgccaaacgggcgctgccgaaagcaatcctctataccgtgtttattgccgggacattatttatcattatctcttacgctgcacacctgagctatccggcgtggcgtgatttcctgccgaacaccgatatcgccagtattcaggtgatggaaaaagtcggcggcgcactgatggcatcctcctttattactgcctatgtgatcggcgtgtttgcctccgcgatgacatcccaggccagtattgtgcggattttttatgccatgggccgtgaaggagtgctgccgcgctctgtgtttgcccgtctgcatgccagattcaacactccggtactgtcgatcctgtttgtcgccctcgcctcactgatggcgctggtgctctccctgagcctggtggcgtccatgataagcttcggcgcactgattgcgtttacctttgtaaatctgtgtgttatcaaacactttattattgaccggaaagaaccgctgacggctgccgtgatcctgcgctgtctggtggtaccggcgatcggggtgctgctgaccctgtggctgtggaccagcctggatgcgcaggcactgactgtcggtctgatctggctggggatcggtgtggtatacctcggtgtgatcacccgcttctttacccgccgtccgccgtcaatcacggaagaagaaactcacttaattatcaattaa

SEQ ID NO: 275753 - DNA, 1722 bp, Morganella morganii
atgaaaatgactgccgctgatattatttatcacaacggttatatctatactgcggatgcggaaaaccgcgtcgccggggccatcgccattgctgacggccgtattcttgcctgtggtgataatgatgacatggcagcattccgtggtgagcatacacagtttatcgatctcgacggcaaaatgatgatgccggggattattgatggtcatatgcacccgttctggggcggtattcagctgttcggctgccatctgaattatgaatccctgaccattgatgagatcctcgcccgtgtacaggcgcatctggataatgatccgcgcaccggcgaaaacgactggctgaaagtgaccgcctggctgcgtcagggcatgttaccggccggtattgatatgtaccgcgaagatatggacaagctcaatacccgccgccctgtcgtgctgttctccaatgactgccataccctgcttgccaacagccgtgcgctggagctgttcggcatcaccagagaaaccccggcaccgagtgacggtaaaatcggcaaacacgccaatggtgaactgaacggaattcttgaggatgccccggcgatgcgtgcggcagacagtattccctccattcaggctgactgcgcggtggatgtcgcccgtctggtgcagaaagtcctcaatgaacagggcgtcaccatggtcatggatgcacgtgtggcagaattacaactggatgcgttccgtgcattacaggaacagagtgaactgacactgcgtgtgcaggctgcccgtgaaatcacgccggatgatgcgccggatgtggcatccgtgccgcaggccgtgcaaaacgccgttgcctttgcggagcgctatcatcagcctgaatggggcccggaaccgggcatcgcggtaaaaaacattaaaatgtttgttgatggtgtgcttcagttcccgaccatgaccgcctccctgctgaaaccgtaccgcatcaatcacggcaccccggcacaaccggactggcgtgagacagaaaattacggtgatctctatttcacttcagaggtgatcgatgccctgctcgaacgtatcgcagctgccgggtacgatccgcatctgcatactgtcggtgaaggtgcggttgatatggtgctcaacggcatcgaaaaaatgcgggctgcacatccgggcaaagatatccgtccgggactggctcacaatgagctggtggatgccaaagattacgcacgtttcgccagactcggcaccattgcctgcctctccttccagtgggcggcaccgactgcggaactggcggaattcacccgcaatatgatcggtgaaacccgttttcagcagctggagcctatcggtaagtttattgatgccggtgcggtcgttgcgttcggcagtgactggccgattgatgattttgatgaatggtatgacctgaaagtggctgccacccgccgtggtcatccggtcaacggccagccggcaccgcgtctggacaccgaccgtgacctgactgtcacggaagtgctgcgtgccgccacgattgattcggcttatgcccagcaccgggaagatattctcggctccctggagccgggtaaactggcagatatgatcgtgctggatcgcaatgtatttcagatccctgcggatgatattgccaatgtgaaagtgctgcgcaccattgtcggcggtaaaaccgttcatctgaccaactga

SEQ ID NO: 275754 - DNA, 462 bp, Morganella morganii
atgataatccgcccggcaacactgaatgacactgatcgcattgctgagctttatcagcagttatttgttctgatggcggaatatcagcccgaccgctggcgtccggcggagcaggatcgcggatttatcgaaaacgccgtgacggatgaaaaattctgtctgctggtggcggaaacggaagggcatattgccgggttcgcctttgcgcagacgcaggatacctcaccttatacctgtgtggtgccgcgtcgtttcggttatatctttgatattgtggttgatccggcggtacgcggacagggcaccggtaaaaaattactggattctgttaaaacctggtcaaaggcacagggccatacgcatctggagttgtcggtgctgccggaaaataccggtgccatacgtttatatgagcgtgaaggttatcagccggtgatccacacactggcgattaagcactga

SEQ ID NO: 275755 - DNA, 576 bp, Morganella morganii
atgcgggatattaaacgaataacagtctattgcggatcagctgcaggtgcatcagagatttaccgccttgaggccgtgaaatttgcccggattctggttgagcagggaattaccctggtttacggtggtgccagtgtggggatcatggggacggtggcggataccgtactccgcgaaggcgggaaggccatcggcgtgatcccggcattgctggaagggcgggagattgcccataaaaacctgactgagcttcaccgcgtcagcaccatgcatgaacgcaaaagtaaaatgattgaactggcggacggctttgtcgcactgccgggcggcttcggtaccctggaagagtttgccgaggttttcacctggagccagatcgggttgcatcagaagccggtcgggctgatgaatatcaataattattatgacccgctgctgtcgctgatcagcaaaatggccgatgagcagtttatgcaggaaaaataccgccatatggcgatagtcgaaactgacggtaacgcgcttatccgccgtttccgtgattatgaggcgccggcggtcaaaacctacgattaa

SEQ ID NO: 275756 - DNA, 900 bp, Morganella morganii
atgtccgcgtctccccgccagcaaaatggttctccgtggttaccgatcggcttattgctgttgtcgatgatctctattcagagcggtgcctcactggcgaaaactctgttcccggttattggtgccccaggtgtgaccgccctgcgattactgctgggtacagcgattctgctggtgatttttaaaccctggcggctgcgttttacccgtgagtctttgctgccgatgctgggatacggcctctcgctcggggcgatgaactatctgttctatctggcgctgtccaccattccgctcgggattgcagtcgccctggagtttaccgggccgctggcggttgctatgttcggggcacggaaaataacggattatctctggattattctggtgatcgccggtctggccttcctgctgccgctcggtgagcagatcggacagattaaccagctggatcccatggggatgttatatgccctgggtgccggggcgggctgggcactctatattatcttcggccagcgggccggacgcttttacggcgcagccacggtttccgtcggctcacttatcgccgcactgatttttttcccggtaggggcttatcacagtgatctcagtgtgatgttcagctgggcggtactgccggtcggggtggcagtggctatcttatcaacggccttcccgtactcgctggagatggtggcactgacccgcctgccgacacggacattcggcatactgatgagtcttgaaccggtgattggcgcaatggtgggtattatcttcctgagcgagcatctgttattcacacaatggctggcgctgagctgcattgtcatcgcctccatgggcgcggcactgaccatcaaaccaaagtcaaaaatcaaagctgttgagtaa

SEQ ID NO: 275757 - DNA, 504 bp, Morganella morganii
atgagcaccgcgaaattagtgaaaaccacagcttctcacttagtgtacacccgtaacgatgtcactgatgatattaagcaggaaaccattgatgaactgaatcatcaggttctgcagtttatcgacctgtcgctgatgaccaaacaggcacactggaatctgcgcggcagtaatttcattgctgtacatgaaatgctggacggcttccgtgacagcctgaacagccacctggatacctttgccgaacgcgctgttcagctcggcggtgtggcactcggtacttcacaggctgtcagtaaagcctctgctttaccggcttatccgaccgatatccacaccgtgcaggatcacctgaaagcactggccgaccgttatgccatcgtcgccaatgatatccgccgtgccgtcagccgcgttgaggatgagaataccgcagatatgtttactgccgcctcccgcgacctcgaccagtatctgtggttcattgaagccaatatcgaataa

SEQ ID NO: 275758 - DNA, 1644 bp, Morganella morganii
atgagtggcggagacggtaatggttataacagcggagctcatgataccggtggtaatatcaacggcggaccgaccggtatcggtggtaacggcggttcaacaagtggtggcgcaggttccggcagtggttggggaacaacacaactaccggacggaagaaatattcatcattatgacccggataaatttggtagtcgccgtgatagcaatagtgccaataatggctatacagatttgaataccccccctgaatctctgaattatattgatataccgggagcaccgaaaacagtctatgtttccgcagatactatcggattaacgttcagctctgctctgtcggcatattacgcctcactaaatgaggctcagcttgctgcattaaaagcattcttaacgacttccgcagttattgcaggccggattctgggaattctgggattattctatccctctcagatagcacctgacccgaaagtgaatatttacgttaaagacttcgatattgataatccctacaatgctgtcatgctacctgccggagtggtaacttctgttccgccggaagatatccccaaaaagacaaatgttccggccagcgtgattgcacaggcagtgattgatgagctgactgaaacccggcctgtcgccatcacagcgataaaccccactcaggtaccggttgttaaagcacaaaagacaaacaagccgaatgtatacaccgctcaggtgatacccggcatgaaaccaatacgaatcagtgtgaatgataccgggccggtaaaaccaaacacagctccacggagactgaataccacaccggagataaaacaatacctgccggcgccggaaaaaaaagaaaacgtttcacatcatgcaattatcgactttggtgatgaccatgctccggtttatatttctgtaacaaaacaggtaaaaccggaagaagcgaaaaaacaggctgaacaggctaaaaaagaacgtgcggctttgtatccgttggaagctgcacaggagcaactggatgttgcgaacagcgatctggcaaaagctgcttctgacctgaaaacagcgcagaaaaattatgatgcggtaaaaaatacggatgtaagcaaactaagaaatgaactgacaaaagctcaaaaagggtttgcgtattttgaagcccgtaatgccaccaacgaagctggtgcatataaagcacagatggggtacatcgaagacactatccaaaaatacactcaggcaaaagatgcactggcaatagctgttgaaaacagaaaaaatacggaaggcaggaaaaaagctgccgaggataaggttaaagaagagaaagacaaaaaaggaaaaacgcctgaactcaaatttgatgaaaaaattaaagatcagatgaatggccggggctggaccgaacaagatgccaaagatacggtagcaaaaggtccgaaagggaaatcttttgataaacgtagtccgaaaaaaacaccgcctgatcaccttgggcgtaatgatacggctactgtatacggtaaacaaggtgaatatgttgtagttaacgatcgcacaggggaagtagttcaggtcagtgataagacagatcctcaatggatcgatgactcacgaattcaatgggaggggaaataa

SEQ ID NO: 275759 - DNA, 336 bp, Morganella morganii
atggaaaaaaaattatttgatcacggtgtactatataacaaaggtgaggatttctttaaattaaaagggaatgcttcaatgaaattatcaccaaaagcagcaattgaggtttgccaggaagctgctaaacgaaatttatggatttcaggtatagatggaggccactggtttaatcccggtttcagacctgatggtgatgtatcgtggacatataataaacccaatgactataaatcaaagcttactgaaaataataagctggcaattgagaatatcaaagatgatgaagcagctgggtataccgcattcctggtgacaataagtgacctgaaataa

SEQ ID NO: 275760 - DNA, 693 bp, Morganella morganii
atgaaatcatatctgttatttatcgggtgttttatcagtgcctttgcattcgcagatggtataagtacgaacagcacccggtatatttatccggaagatgcaaaagatattactgtcagggttaataatgaatctgcctcaccggtatttgtacaatactggcttgattcaggggattcagaaacactgcccgcgaaactgccggccacgccgtttgagctgaccccgcctgtttcacgcatcaatcccggagcagagcagattttacgtatacggctgacagataaaaacagtatgccgtcagacagagaaagcctgtggtggctgaatgttcttgatattccgccggtcagtgaaacatcatcgctgaaggaaaaaaactcaggacaactggccgtccgttcccggtttaaagtcttttaccgccctgccggattaagtgacagaaacactgccacacagcaggtgtcatttcagtccggcagtcattcaatacgggtcaataatacatcgccgtaccacattaccattacggaaatcaccctggcggataaaaaacaaatactgcataaatcctttatgctgcaaccgaaaagcagttcggaaagagcggttaaacgcggtgaccatctgactgtcagtaatatcaatgatcagggcggcaacgtgacctttaccgccacagcagaataa

SEQ ID NO: 275761 - DNA, 2109 bp, Morganella morganii
atgcccctttccgccaccgtcaaacaacaaatcagcgcctggtacaaagccctgccggagcagattgacggctttatcccgcgcgctccgcagcgggaaatgattgcggaagttgcccggacgatggcgggcgatgaagggcggcatctggtgattgaagccccgaccggggtgggaaaaaccctctcttatctgatcccgggcattgcggtcgcgcgggaacagcaaaagctgctggtgatcagcaccgccaatgtcgcgttgcaggatcagatctacagcaaggatctgccgctgctggcaaaaattatccctgatctgcgttttaccggtgcattcgggcgcgggcgttatgtgtgtccgcgcaatatggcggtgattggtgcggcggaaggggaacagatcgacctgatgctgctgctcgaagataaagcggatgtggcaacggcctctgaacgcgacacggtgcgcaagctgcagaatgattttacctctttcggctgggacggcctgcgcgatcaccataaaacctctattccggacagcctgtggcgcaaaatcagcactgacaaactcagctgtctcggccgtaactgtcagtattactcgcgctgcccgtttttcctcgcgcggcgtgaaattgaaagtgtggatgtggtggtcgccaaccacgcgctggtgatggcggcaatggaaaatgaatcggttctgccggaaagcaaaaaattgctgctggtgctggatgaagggcaccatatcgctgatgtggcccgtgattccctggaagtggaaggggatatcaccctggtatcccttcaggcgcagctggataacctttcccgctttgtcacccagtatctgcaacagttccgcccggtaaaaccgccgaaactggcggacagcgcccgtctgcagaaacacctggacgcgatgtcagatgtgtaccgcgatgtggcgatgtacacacaggcgctgctgccggagcaggcggcggatccgcactatctgtttccgctcggggaactgccggagccactgacggcggcggctcagcagttgtcaaaacagacggatgccctgcacagcatggtggaggggatactcagtgatctgaacgaacagacggcaaaacaggatattgtccgtctgcaccgcgccatcctcaccgccggaaagttcctcggtgcactggaaaacagcgctaaactgtggcgtctggcggcactgtcggaaatctctcacgcaccggtctcaaaatggctcagccgccgctatgaaaaaaatcagtctcacctctggttccactgcgcggggatccgtgtcagcgaacagctcggccacctgttatggcgcaatgtaccgaatattgtggtgacctcggcaaccctgcgttcactcaacagtttcagccggttacaggaaatgaccgggctgagtgaaaaggccgatgaccgttttgtagcactcgattccccgtttgatcactgccgtcaggggcggctggtgatcccgaaaatgcactatgaaccgacaccggcggatgaagccgcgcatatcggggaaatggcgtgttatttccgctcccagctggcgtccggtgaacaccgcggcatgctggtgctgtttaacagccagcgggcaatggatctgtttctcacccatgtgacggatttacgtctgcaactgctggtgcagggggatcagccccgttaccggctggtggaaacccattgtcagcggatccgggacgggcagaacagtgtactgatcggcctgcattcttttgccgagggtcttgatctgaaaggggattacctgactcaggtgcatattcacaaaatcgcgttcccgccggtcaccaacccggtgattatcacggaaaaagactggctgaaatccctgaaccgctacccgtttgaaatccagagcctgccgggagcctcattcaccctgatccagcaggtcggacggctgatccgcagtcaccagtgtcacggggatgtggtgatttatgaccagcgcctgctgaccaaacggtacggcagcaggctgcttaatgcattaccggtctttccgattgtgcggccggatattgaaccggaaaaataa

SEQ ID NO: 275762 - DNA, 642 bp, Morganella morganii
atgctgccgtcaccggaggtgttcgcacaggctgccggtgaattcgggatcgataatgacaccatggtgattatttatgatcagggtaacctgttctccgccccgcgcgcctggtggacactgaaaaccttcggtgtgaaaaatctgcgtattttacagggcggactgaatgcctgggccggtgccggttataccaccgaaagcggcgatatcccgctgccacaggcgaaaacctttgtgccggaatttcagcgtcataatgcggtgaataaagatgatgtgctgctggcgattacggacccggaaattcagattgtcgatgcccgttctgccgatcgttttcaggcgctggcaccggatccgcgtcccggcgtgcgttcaggccatattcccggcagttgcaatgtgccgtggaataccctggtggaaaacgggatcttcaaatccccgacgcagattcagcagatattccgtgatgcgggtgtggatttaagcaaatacctggtggtgtcctgcggttccggtatgacagccgccatactgctgctggcgctgacactcaccggccatcagaatgtccgtctgtatgacggttcctgggcggaatggggcggctcagacaccctgccgattgaaccataa

SEQ ID NO: 275763 - DNA, 249 bp, Morganella morganii
atgaattttctgtcctggattatttttggcctgatcgccggtgtgctggcgaaatggattatgcccggaacctatagtatcggcattattatgacgattgtactgggtgttgttggtgctgttgtcgggggatatatcagtgttttcttcggcaaggggcgtgtcgacgggtttaatttcggcagctttgtggtagcggtgatcggtgcgatggtggtgctgtttctcgccgggaagtttgcgggctga

SEQ ID NO: 275764 - DNA, 945 bp, Morganella morganii
atgcgtgttcttttagcaccgatgcagggggtcttagaccctctcgtccgtcatctgctgacggcggtgaatgattatgatctctgtatcaccgagtttgtccgtgtggtggatatgctgctgccggagaaactgtttttccgtctctgtccggagctggaaaacggcggtctgaccgaatccggcacgccggtgaggatccaactgctgggacagttcccgcaatggctggcagaaaatgccgcgcgggcggctgaactcggctcgcacggggtggatctcaactgcggctgcccgtccaaaacagtgaacggcagtggcggcggggcgacccttcttaaagacccggaactgatttatcagggcaccaaagctatccgtgaagcggtaccggtgcatctgccggtatcggtgaaagtgcggctcggctggagcagcaatgcgcaccagtttgaaatcgccgatgcggtggcacagggcggggcaaccgagatcacggtgcacgggcgcaccaaagaagcaggctatcgcgcggatctgattgactggccggcgatcgcagctatccgtcagcggctctccattccggtgattgccaacggcgaagtccgtgactggcagagtgcgcagcaatgcctggccgtgaccggctgtgatgcggtgatgctcgggcgcggagcgctcaatgtgccgaacctgagctgtgtggttaaatataacgcgccctttatgccgtggccggaagtagtggcattactgtaccgctacacgcagctggaaaagcagggtgataccgggctgtaccatgtggcgcgtatcaaacagtggttcagctatctgcataaagcctatccgcaggaagcggatgaactttttgccgtgatccgcccgctgaaagattctgcctcgattgcacaggcgattgcccgggctcagggcgcataa

SEQ ID NO: 275765 - DNA, 1347 bp, Morganella morganii
atgagtttttcatcattaccattatgcccggaaattcagaaggccgtcgcagagatgggctacgaacagccgaccccgattcagatgcaggccattccgcaggttcttgccggacatgacttattagccagcgcacaaaccggtaccggaaaaaccgccggttttaccttacctatcctgcaatatttacaggataatccgcgcaaaggcggcgggcgtccggttcgcgcgctgattttgtccccgacccgcgaacttgccgctcagatcggtgaaaacgtccgcgagtacagccgccatctgcgcacccgttcactggtggtcttcggcggggtgagcatcaacccgcagatgatgaaactgcgcggcggcgtggatatcctgattgccactccgggccgtctgctggatctggaacatcagaatgcggtggatttatccaaagtcgaaattctggtgctggatgaagctgaccgcatgctggatatgggctttatccatgatatccgccgtgttatcaaaaaattaccggtgaagcgccagaatttactgttttccgcgacattctccaatggtatcaaatcgctggcgaataccattctgaataatccggtgacggtggaagtttccccgcgcaacagtgcctcacagcaggtcacacagtttgttcatctggtggataaaaaacgcaaagcagaactgctggcgcacctgattggccgtgataactgggagcaggtgctgattttcacccgcaccaaacacggtgccaatcgtctggcggaattccttaacgacagcggcatcaaagcggcggctatccacggtaataaatcccagggcgcacgtacccgtgcactggcggatttcaaaagcggcgctatccgcgcactggttgcgacggatatcgcggcacgcggtctggatatcgagcagctgccgtatgtggtgaactatgaactgccgaatgtggcggaagattatgtccaccgtatcggccgtaccgggcgtgcggaggctaccggcctggcattatcactggtatgtgtcgatgagcatgacttattacgtgacattgaaaaactgctgaaaaagcaaatcgagcggatggctgaaccgggttacgatccggatccgtccatcaaagccgaacctatccagaaagcgaagcagggtcgcggcggcaacggccgttccggcggcggacgtcagggcggacagggtcgcagcgccgaaggccgcggtaacagcggtggcggtgacaaacgtccgccgcgtccgcgtcagcacaaaccgcgttccggcaacagcgactccggcagcccgtggggtaaccggggcaaataa

SEQ ID NO: 275766 - DNA, 687 bp, Morganella morganii
atgtcagtcaatacgactaatacgccgcgaggcgaacaagccaaactcgctttactggaagccgctattgagattttcggactgaacggcccaaatagtgccactactcgccagattgcacaacgtgcggatcaaaatatcgcagctattgcttattatttcggctcaaaagacgggttgtatctggccgttgcacagcatattgccgacattatccgtgatgaattccgtcctgtcattgaagaaattgatctgtttctggaaaacggcgctgacgaacgggatgaaagccgctgtctgcaactgattgagctgagttttcttgcctacaatgagctggtgctgaagaaaagtaatattaatatcagccggattatgtcgcgcgagcagttaattccgaccaaagcttacacgcttatccacgaacaggcgctgtctgcgatttttacccgccaggccagattagttgcccgttataccgggctgccggacggacatatcaatacgctgatccatacacacgctctgatgggtgagattttatctttccgtctggcacgggaaaacctgttgcgccagaccggctgggataatatcggcccgaaagagtatgacatgatcaatgatgtgctgcgggaacatatccggctgctgctcagcggattaaaacagcattaccgcaactga

SEQ ID NO: 275767 - DNA, 999 bp, Morganella morganii
atgaagccaatgaaaaaaaccgggatatttatcattattctgatcctgctggccggtgccggcggatggtactggtgggagtcacgcccgtcggggcctgctctgctgtacggtaatgtggatatccggacggtaaatcttggttttcgtgtcggcggcaaactgcaatccctgaatgcggatgaaggggcagcggttcagcccggtgagctgctcggtatgctggatgatacaccgtaccgtcacgccctgctgaaagcggaaggggtacgggacagcgcacaggcggcattactgatgatggaaaccggctaccggccggaagaaatcgcgcaggcaaaagccgatgttgcccgtaatacggcagcggcggaatttgcccgtcagttttatcagcgccaggccgggctgatgaaaagccgtgccatctccgccaatgatctggaaaatgcccgcaatcagcgcaatcaggctgatgcggcactgaaagcctcacaggacaaactgaaccagctggaaaacggttaccgcaaagaagagattgccgaagcacgcggacagctgaaacaggccgaagccgccgtggagcaggcgcagcttgacctggcggatacccgtctgaccgcaccggcagaaggcactattctgacccgcgccatcgagcccggcacgattctgccggctggcagcaccgtattcaccctgacactgaccaatccggtgtgggtacgggcgtatgtcagcgaaagcgagctgggacaggcacagcccggccgtaaagtattactggaaaccgacagccgcccgggcaaaccgtatcacgggcatgtcggatttgtctccccgactgccgagtttaccccgaaatccgttgaaactccggcactgcggacagatctggtctaccgtctgcgcattgtggtgacggatgccgacccgctgctgcgtcaggggatgccggtcaccatccgctttgataatgaagagccgcagccgtaa

SEQ ID NO: 275768 - DNA, 1746 bp, Morganella morganii
atgtcagacatcactatctccctcagtgccgtcgaaaaatgctttcccggccttgataatccggcggttaaccggctgaccaccactatccggggcggcggtatcaccgggcttgccggaccggatggtgccgggaaaaccaccctcatccgtatgctggccgggttactgaaaccggacagcggggagatccgcgtggccgggtttgatccgattgaagacagtgtggctttgcgcgcacagctcggttatatgccgcagaaattcgggctgtatgaagatctgtccgtgatggaaaacctccgtttatatgccgaactgcgcggtctgccgcaccatgaacagcaggctgtttttgaccgcctgctgacctttactgacctgacccgttttaccggccgcatggcgggcaaactctccggcggcatgaaacagaagctcgggctggcctgcacattgctcgggcagccgcaggtgctgctgcttgatgaaccgggtgtgggggtcgatcctatcgcccgccgcgaactgtggcgtatggtgcactctctcgccgatgacggcatgctgatcctctggagtacctcttatctggatgaggcagaacagtgccgcgacgtgctgctgctcaatcagggaaaagtcatttatgagggcaaaccggcacaactgacagaaacgatggaaggccgctctttcctgctctccgcagcccccggtgaacgccgccgcatcttacaggaggcattgattcagccacaggtgtctgatggtgttattcagggacgttatgtccggctgattgtaaaaccacaggccgatacccgcaccctgctcagcgcgctgaaatgcccggatgcagagctgctgcccgctaagcctcgttttgaggatgcatttattgatctgctcggcggcggtccttcccaccgctcacagctggcgcagattatgccgcagatcccggcggcaccggatgagaccgtgattgaagccgtcagcctgaccaaaaaattcggtgattttgccgcgaccgatcatgtggattttcaggtcaaacgcggggagattttcggcctgctcggcccgaacggtgcgggcaaatccaccacctttaagatgatgtgcggcctgatgatcccgagcagcggccgcgctctggtgctggggctggatctgaaaaccagctcagccaaagcccgcagccgcctgggttatatggcgcagaagttttccctctacggcaatctgacggtcgcccagaacctgaaatttttctccggcgcttacgggctgcgcggcaaagcgcagcagcagaaaatcgatgatatggtaaatgcttttaatttcatcccgatcctgcgccagaccaccgaagatttgccgctcggtttcaaacagcggctggcgctggcctgcgccctgatgcatgaaccggatattcttttcctcgacgaacccacctccggagttgacccgctcacccgccgtgaattctggttgcatattaacggcatggtggataaaggtgtgacagtgatggtgaccactcactttatggatgaggcggaatattgtgaccgcatcgggctggtctaccacggcaaaatcattgctgccggtacccctgatgaactgaaggcctcggtggctgatgacacccatccggacccgtcaatggaagatgcctttatcgggctggtcgaggagtatgacaaagaaagcgcacaggaggccgcatcatga

SEQ ID NO: 275769 - DNA, 1137 bp, Morganella morganii
atgagcacaccttccggtttttcatggcgccgtctgcgggcgctgtgcatcaaagagagcaaacagattgtccgcgacccgtcgagtgccctgatcgcaattgtgatcccgctgattctgttatttattttcggttacggcatcaatctggattcatcaaaactgcgcctcgggattctggtgaatcagcagagcgaaccggcgcgggagctgatcaacacctttaccggctctccgtttattgatgccaccctcagtgataaccgccgtgaattaattgataaactccaggcggggcatatccgcggtattgtggtgatcccggcggatttggacaaacgtctggcccgtcagggcgatatcgcacaaattcaggtgattacggacggcagcgagcccaataccgccaactttgtgcagggctatgccagcggtatctggcagatctggcagcagcagcgggcacaggatcgggggatcagcagtgaaccgcctattgatgtccggttgcgctactggtttaacccggcggccatcagccagcattttattattccgggggctatcagcatcattattaccgtggtcggcgctattctgacctcactggtggtggcgcgggaatgggaacgcggcaccatggaagccctgctctcaacgcaggtgaccaaaacggaactgctgctctccaaactgctgccgtatcaggtgctcggtagttttgtcatggtattgtgtatggtggtgaccgtatatgtgctggatgtgccgtaccacggctcgctgtggcttctggccctcgtgacctccctctatctcgctaccgcgcttggtatgggattgctgatttccaccgtgacccgcaatcagtttaacgccgccatgatttcactgaatgcggcgtttctgcctgcgattatgctgtccggctttgtgtttgaaattgacagtatgccggtggcgatacaggtggtgacgtatgtgatcccggcgcgctactttgtggaaagcctgcagacactgttcctggcgggtaatattatgccggtgattatcagtaatctggtgttgctgatcctgtcagcgcttgtgtttatcggcctgaccgccctgaaaacccgccgccggcttgattaa

SEQ ID NO: 275770 - DNA, 1098 bp, Morganella morganii
atgtttcaccggatactcaccttaattatcaaagagctgcaattacttctccgcgagcggcagacccgtacgatccttatcgtaccggtgttattccagatgattttgttcccgctggcggcaacgctggaagttaccaacgcgactatcgcgatttacgatgaggacaaaggccccgcatccattgaactgactcagcagtttgccaaagccagtgcgttttctgatgtgctgctgatccagaaccggcatgatgtacaggatgtgattgataaccgcaaagccctgctgctggtgcatttcccgcagaacttcagtgctcagctcgccgcacagaaaccggcacagctgcaaatcctgctcgacggacggaattccaacagtgcgcagattgccgccaattatgttcagcaaatcaccgcgcattaccagcaggagcggatgccgcaggcggtcaccagtgagctggtggtgcgcaactggtataacccgaatctggattacaaatggtttatcgtgccgtcgctggtggcgctgatcaccaccatcggcgtgatgattgtcacctctctctctgttgcccgtgagcgggaacagggtacgctggatcagttgctggtttcgccgctgaccaccggtgaaatctttgttggtaaggcagttccggcactgatagtggccacggtccaggccagtattgtgctggtgatcggcattttcgcttaccgcatccccttctccggttcactgatcctgttttatttcaccatgatggtgtacggtttgtcgctggtcgggttcggtctgttaatctccgcactctccgccacccagcagcaggcctttatcggcgtgtttgtctttatgatgcctgccgtgctgctgtccggttatattgccccggtggagaatatgccggtctggctgcaacatatcacctggatcaatcctatccgtcatttcaatgaaatcaccaaacagatttacctcaaagatgcggatttcagtgttatccgccagagcctctggcctctgctggtgatcgccgtgaccaccggttcggctgcctatgcgttgttccggcgcaagattgcgtaa

SEQ ID NO: 275771 - DNA, 711 bp, Morganella morganii
atggaccgatttcctcgttctaacggctcgatagtttcacaggcgggctccggtattcaggcttatatggcccaggtttacggctggatggcgtgcggcctgctgctgactgccttcgtcgcctggtattcgtctaactccatggcgattatgagctttgttttctccagcaaaatcaccttcttcgggctgattattgctcagctggcactggtctgggttatctccggcatggttgagcgcctgagcgcgtccatggcgaccgggctgtttatgctctattccgcactgacagggctgacgctctccagtatctttatcgtgtatacagatgcatctatcgtcagcaccttctttatcacggcagggatgttcggtgcgctgagtatctacggctacaccaccaagcgcagcctgtccgggatgggtaacttcctgtttatggggctgattggtattatcatcgcgtcactggttaatatctggctgaaaagcgaaggtatgacactgatcatcacctatatcggtgtgattgtgtttgccggtctgaccgcgtatgacactcagaaactgcgtgagctgggtgaacagattgacagcaacaacaaagacaccatgcgccgctatgcgattgtgggtgcgctgtcgctgtacctggacttcatcaacctgttcctgatgctgctgcgcctgctgggcgaccgccgctaa

SEQ ID NO: 275772 - DNA, 456 bp, Morganella morganii
atgaataatacccggattgctgttcagacggacaatttcagtgtcggtgaggaatatcagtggctggccggttgcgcggatgacggcgcggtggtcacctttaccggcaaagtccgtaatcataacctcggtgataatgtggcggctctgtcgctggagcactacccgggcatgaccgaaaaagcactggcggatattgtcacacaggcacgtgagcgctgggaattacagcgggtgacgctgatccacagggtcggcagtttatacccgaatgatgagattgtgtttgtcggtgtcagtgctgcccatcgcggcatggcatttgaagcggctgaatttctgatggattacttaaaaacccgcgcgccgttctggaaaaaagagacattgccggaaggcggcacccgctgggtggatgccagagaaagcgaccagaaagccgcagatcgctggtaa

SEQ ID NO: 275773 - DNA, 246 bp, Morganella morganii
atgattaaggtactgtttttcgcgcaggtgcgcgagctggtgaataccgatgagctttctctgccgtatgattacgccacagcggaagatttacgggccgcgttatgtgagcgcggtgagcgctgggcgctggcgctggaatccggcaaactgctgtgtgcggtgaatcagtcttttgtgccgctgtcgcacccgctgacagacggcgacgaggtcgcattcttcccgccggttaccggaggctga

SEQ ID NO: 275774 - DNA, 480 bp, Morganella morganii
atgtctcaactcacccatattaatgcggcgggcgaagccaacatggtggatgtgtccggaaagcaggaaactgtccgcgaagcgcgcgccgaagcctttatcaccatggatgccaaaaccttacagatgattattgacggcaaccatcacaagggggatgtctttgcgacagcccgtatcgccggtatccaggccgccaaacggacctgggatctgatcccgctgtgtcacccgctgatgctgagcaaagtggaggttcagctgagcgcggagccggacacatcccgtgtgcgtattgaatcctgctgccgtctgaccggtaaaaccggggtggaaatggaagccctgactgcggcttctgtggctgcactgacgatttatgatatgtgcaaagcggtgcagaaggatatggttatcggccctgtccggttactggaaaaaagcggcgggaaatcaggacattttaaggcggacgcatga

SEQ ID NO: 275775 - DNA, 984 bp, Morganella morganii
atgactgaacaactgacagatccctttgcgcgcaaattttactatctgcgcctctccgtgacagacgtttgcaatttccgttgcaactattgtctgcctgatggttataaaccaaacggacacaaatcctttctttctctcggcgaaatccgccgggtgacccgcgcgtttgctcagctgggcacggaaaaaatccgtctgaccggcggtgagccgaccatgcgccgcgattttaccgatatcgttgccgctatccgcgaaaatgagaatatccgcaccattgccgtgaccaccaatggttaccgcatggcacgggatatccgtgactggcgtgccgccgggctgagcgccgtgaatgtcagcgttgacagtctcgacccgcgccagtttcacgctatcaccgggcaggataaattcatgcaggtgatgagtggtatcgatgccgcgtttgaggccggttttgaaaaggtgaaagtgaatgtggtactgatgaagaatgtcaatgacatccatctgcctgcatttctgaactggattaaagaccgcccgatccagctgcgttttatcgaactgatggaaaccggtgacggcagtgatgtgttccgccgttttcatatctccggcaatgttatccgcgcccgtctgttacaggcaggctggcagcaggtggcgcgtgcccgcagtgacggcccggcacaggtgttcagtcatccggattatcagggcgaaatcggcctgattatgccgtatgaaaaagacttctgtcagagctgtaaccgtctgcgggtgtctgcggtcggtaatctgcatctgtgcctgttcggcgagcaggggatcacactgcgtgatctgctggcggaagacggacacgacgcagagctgaaagcacggcttcagcgcgcattacagcacaaacgcgaaacccatttcctccatcagggggacagtggtattaccccgaatttatccgttatcggcggctga

SEQ ID NO: 275776 - DNA, 543 bp, Morganella morganii
atgaatgacctgacgtgcaccattccggtgctggaaactgaccgtctgatcctgagtgcccaccgcagagaagatcatgcggcggttgctgatatgtggtcagatacggtggtaacgcatcatgttatggcaggacaaatctccacaccgcgcgacagctggatgcggatgctggcctatctcggattgtggccgctgctgggctatggttactgggcggtcagggagaaaagcaccggagagtatatcggggatatcggttttgcggatttttaccgtgaaatggaaaaagacatcagccgctaccccgaggctggctgggtatttgcggcgcgggcacacggcaaaggctatgccggtgaggcgctgaaggcgattctgacctggctgaaagaggtgcgcggtattaatgaatgcgtgtgtattattgcccctgagaataaaccctccatccggctggcagagcgtcacggcttccgtccgcaggagacgctgagaatgaatcataaatctgttattttctatcaccttacactggactga

SEQ ID NO: 275777 - DNA, 909 bp, Morganella morganii
atgggaaaccgcacactcacgtcgctggaacatgttgttgctttaggcggaggccacgggctgggacgggtgatgtcctgcctgaacggtctgggatcgcggctgaccggcgtggtcaccaccacggataacggcggttccaccggccggatccgcagggcggagggcggcattgcctggggtgatatgcgtaactgtctcaatcagatgatcacggagccgtcgattgcttccaccatgtttgaataccgtttcagcggtaacggcgaactggcgggacacaacctcggcaacctgatgctcaaagcgctggatcatatgagtgtgcgtccgctggatgcgatcaatctgatccgcaatatgctgaaagtcaaagccaaattgatcccgatgtcggaaacgccggtcgacctgatggctatcgacagtgaaggccatgaagtgtacggcgaagtgaatgtcgatcagctgacctgcccgccgcaggagttacagctctccccgccggtgaaaaccaccaaagaggcgctggatgccatctgccgcgcagaactgattattatcgggccgggcagtttttttaccagcctgatgccgctgatgctgctgcccgatttcaccaaagccattaattttaatcaggcgccgatgatctatattgagaatctcggcaaagaactgagcccggcagcggcatcactcagcctgagtgaaaaaatcgccgtgatcgagagccgcatcgggcgcaaacggatagatgcagtagtgtgcgcacctcatatcaataccggcgacctcggcgaccgcctgattgtcagagaggtcctggaggcacaggatgtaccgtaccgccatgaccgccgcctgctgctgagtgcgctggataaaacaatcgccctgctgccctga

SEQ ID NO: 275778 - DNA, 2013 bp, Morganella morganii
atgagcaaactatttaaactgcattctgactttaaaccggccggtgaccagccgcaggccattgcaaaactggttgagggcctggaagacgggctggcgcatcagacgctgctgggggtaacgggctcggggaaaaccttcaccattgccaatgttatcgccacgctgaaccgcccgaccatgatcatggcgcctaacaaaacccttgccgcgcagctttacagtgagattaaagatttcttcccggaaaacgcggtggaatattttgtctcctactacgactattatcagccggaagcctatgtgccgagctctgacacctttatcgaaaaagatgcctcggtaaacgaacacattgagcagatgcggctctctgccaccaaggccctgctggagcggcgggatgtggtggtggtggcgtctgtttccgctatctacgggctgggtgatccggacagctacctgaaaatgatgctgcacctcaccgaggggatgatcattgatcagcgctcgatcctgcaccggctttctgatctccagtacacccgtaatgaccaggcctttcagcgcggtacattccgtgtgcgcggcgaggtggtggatattttccctgcggaatctgatgattacgcactgcgcgtggaattgtttgatgatgaggtcgagcgtttgtcgctgtttgatccgctgaccggtcatatccattatcaggtgccgcgctttactgtttacccgaaaacccactatgtgacgccgcgtgagcgcatcattgaggcgatggaagggatcaaaaccgagctggcggagcggcgcaagttcctgatcgacaacaacaaactggtcgaagaacagcgcctcgcccagcgcacccagtttgatttggaaatgatgaatgaactgggttattgctcgggtattgaaaactactcgcgctatctctccggacgcaaatccggcgagtccccgccgaccctgtttgattatctgccggcggacggcctgctggtaattgatgaatcccacgttaccattccgcaaatcggcgggatgtacaaaggtgaccgttcgcgcaaagaaacgctggtggagtacggcttccgtctgccgtccgcgctggataaccgtccgctgcgttttgaggagtttgaatccctcgcgccgcagagcatctatgtgtccgccacacccggcaaatatgaaatggagaaatccgggtctgatgtggttgaacaggtggtccggccgaccgggctgctcgatccggaagtggaagtgcgtccggtgaccactcaggtggatgatctgctgtctgaaatccgcatccgcgcacagaaaaatgagcgcgtgctggtcaccacgctgaccaaacggatggcggaagatcttactgaatatctggaagagcacggcgagcgggtgcgttatctgcactcggatatcgatacggtggaacgtgtggaaattatccgcgatctgcgtctcggggagtttgatgtgctggtgggcatcaacctgctgcgtgaggggctggatatgccggaagtgtcgctggtggcgattctggatgcggataaagaaggcttcctgcgttccgaacgttccctgatccagaccatcggtcgtgccgcccgtaacctgcacggcaaagcgattctctacggcgataaaatcactgactcaatggcgaaggctattgaggaaaccgaacgccgcagagagaagcagatggcgtttaacgaagcaaacggtattgtgccgaaagggctgaataaaaagattggcgatatccttaaaatcggccagccatcagccggggcgaaaaataaaggcaaaggaaaagcagccgcgaaaagcagcgattatcagcgtatgtcgccgaaagagctggaagttaaaattcaggaactggaagcacagatgtaccgccacgctcaggatctggaatttgaacaggcggcagcggtacgggatgaattacaggggctgcgtgagcagtttattgccaactcctga

SEQ ID NO: 275779 - DNA, 684 bp, Morganella morganii
atgttgaaaaataactggtttttaaccggtaccgatacggatgccggtaaaaccgtggtcagttgcgccctgttacagaccgcccgcaacgccggattccgctgcgccgggtataagccggtggcctcgggcagtgagatgacagaagaggggctgcgcaacagtgatgcgctggcgctgtggcgccatacggtaccgccggtcagttacgcgcagattaacccttatacctttgctgagccgacgtcgccgcacattgtcagcgagctgactcaaaccccgctggaatttgcggtaatgactgacgggctgcatgcactgaatcagctggcggactgggtgctgaccgaaggggcggggggatggtttacgccgctgtcggccacacaaagctatgcggactgggcggcacaaatgcggatgccggtgattctcgtcgtcggggtgaagctcggctgtattaatcacgcgttactgaccgtgctggcgatacagcaggccgggctgagcctggcgggctgggtggcgaatgaggtcacgccgccgggcttgcgtcagccggagtatctggcggcactgaacaacctgatcccggcaccgtgcctgggtgtgttaccgcatctgcaggatccgctgaatcaggatctatccggctatctttcactgccggtttccgcgcactga

SEQ ID NO: 275780 - DNA, 795 bp, Morganella morganii
atgcattctgccgtcactaccgccccggtgaataaagctgctgttgccgcggctttcggacgcgccgccggacactatgacaccgtggcgcacctccagcagaaaaccggccgccatctgcgtcaactgaccacacaggcactttccgggctgttactgcctgaactgcacgggttggatgccggctgcggtaccgggtttttcagtgaacagtggaaagcggattgccgcagtgtgacggcgtttgatctctcccctgatatgctggcgcatgcacggcagcagcagcgggcgacccgttatgtacagggggatattgaacagctgccttttgcggataatcagtttgatttttgtttcagcaatctggcggtgcagtggtgtgattcactggcggcagcgctggccggactggtgcgggtaacccggccaggtggtgtggtggcgttttccactctgctcagcgggtcgctggatgaactgaatcaggcttttgcccgggtggacagcaaccgtcacgccaacggttttctcagccgtgaggctgtttccgccgcctgtcagccttaccggcatactttgtcagaagtctgttaccggctctcctttgattctctgcccgcgctgcttcattccctcaaggggattggagccacgcatgtccaccagggacgtgctgccgggctgatgacacgcaacaaactcactcagctggcgaatcattatcccgccgaagacggggtatttccgctcagctatcttattcagtacggagtcatacatgttgaaaaataa

SEQ ID NO: 275781 - DNA, 1173 bp, Morganella morganii
atgtggcagacttttctctctgagcgcctgcagcaggcgcaggaacaggatgcggtacgccgccgcgaggccaatgaccgcgcggacgggcgcactcttctgattaacggcagacgcgccgtgaatttctccggtaatgattatctcggcctcagccgccacccggcggtgatccgcgcctggtgtgacggtacccggcaatacggcgtgggcagcggcggatccggccatgtcaccggttacaccacggcgcaccgggatctggaacagatgctggcggagtggctcgggtttgatcgggcgatcctgtttgtttccggtttcagtgccaatcaggcggtgatcacagcactgatgcagcgcggcgatcaccttatctgcgacaaactcgctcatgcttccattatggaagcggcgatgcattcacccgctgaattcagccgttttcatcataatgataccgcccatctgagcaaccgtctgagccggactgaaaacagtaccggcaaaaccctggtggtcactgaagggatcttcagtatggacggggatgccgcgccgctggcggcgatcctgccgctcacccggcagcataacgcccggctgatggcggatgatgcgcacggtatcggtgtctgcggccgtgaaggacggggtagctgtgatgcggcgggaatacgtcctgatattcagattgtcaccttcggcaaagcggtgggggtcagcggcgcagcggtgctgtgtgatgcacagacggcggattatctgacgcaatatgcccgtcatcttatctacagcactactttccctgcggcacaggcgtgtgccattcaggcggcggtacaggaaatccgtcgtggtgacgggttacgggacacactggcggaaaatatccgcttcttccgtgagcgggtggcgcatctgccgctgcagttactgtcgtccgcctcggcgatccagccgctgatcgtgggggataaccgcgctgccctggcactgtcacactatttacaggagcgcggcctgtgggtgaaagcgatccgcccgccgactgtgccgccgaataccgcccgtctgcgcatcacgctgaccagcgcccatcaccgcgacgatatcacacagcttacggaggcgctggatgcattctgccgtcactaccgccccggtgaataa

SEQ ID NO: 275782 - DNA, 1038 bp, Morganella morganii
atgagtcaaggtcgtcagtggacattaaaagaagccaatgcattgtttgaaaaacctttttttgaactgttgtatgaagctcagaccatacatcgccagcattttgaccctcagcaggtgcagatcagcacactgctatccatcaaaactggggcgtgtccggaagattgtaaatactgtgcgcagagtgcgcgatacaagaccgggctggaaaaagaacgtctgatggaagtacagcaggtggtggaaacggcgcgtaaggcgcgggccgccggttcgacccggttctgcatgggcgcggcgtggaagaatcctcatgagcgtgatatgccgtacctggaaaccatggtgaaagaagtgcgggcgctgggtatggaaacctgcatgacactcggtatgctgaacagctcacaggcggagcgcctcgctaaagcgggtctggattactataaccacaacctcgatacctcgccggaattttacggctcgattgtcaccacccggacctatcaggacagactggacaccctcgacaatgtacgggacgcggggatcaaagtgtgctccggcgggatcttaggtttgggcgaggcggtgcgcgaccgcgcggcgatgctggtacagctggcgaatctgccgaaagcgccggaaagtgtgccgatcaatatgctggcgaaaatcaaaggcacgccgtttgaggataatgaggaagtcgatccgtttgatttcgtccgtaccatcgccgttgcccgtattatgatgccagcgtctcatgtgcgcctctccgccggtcgtgaaatgatgaatgaacagacccaggcactttgctttatggcaggggcgaactctattttctacggctgcaaactgctcaccaccaccaacccggaagaaaataccgatatcgccctgtttaaaaagctggggatcaaacgcgaagccatccatgttacccggggtgacaatgaggagacggattctttactggatgccatcagccacagcgatgacgaaaaattctataacgcagccctgtga

SEQ ID NO: 275783 - DNA, 1302 bp, Morganella morganii
atggctttttcagggaatatttcaggtcacgccttttcggctgatgatgcggattttgaccgccgccacatctggcatccttatacatcaatgactcagccgctgccggtctatccggtggtgtcggcacacggtgcggtgctgacactcgcagacggccgcgaactggttgacggtatgtcctcctggtgggcggctatccacggctataatcacccggtactgaatgcggcggtgactgaacaactgtcacagatgtcacatgtgatgttcggcgggatcacccatccggctgccgttgctctgtgccgccgtctggtagctatcacaccggaaccgctggaatgcgtgtttccggcagattccggctcagtcgcggtagaggtggcgctgaaaatggcgctgcagtactggcaggcacgcggtgaaaaacgccaccggataatcaccccgcgtcacggctaccacggcgatacattcggcgcgatgtcagtgtgtgatccgcaaaactccatgcactcactctggcagggctatctgccggatcatctgtttgcggatgcgccgcagtgcggatttgatgaggaatggcggccggaggatcttcattctgtggaaaacctgctggcacagcatcatcatgaggtcgcggcggtgatcctggagccggttgtccagggtgcgggcgggatgcgcttttaccatcctgaatatctgaaaggtgtaagatcactgtgtgatcactacaatgttctgctgatttgcgatgagatcgcgaccggattcggacgcaccggaaagttgtttgcctgtgaacacgccagtatatctccggacattatatgtctcggaaaagccatcaccggcggttatatgacactctccgccaccctcactacccgccatattgcggacaccatcagtcagggtgatgcaggctgctttatgcacggcccgacctttatgggtaatccgctggcctgtgccaccgccgtggcgagtattgatctgctgttgtccggagactgggcagcgcgggtaaaagagatcgaaacacaactgaaaagcgccctgctgccgctgaaatcccgcagcggagtccgcgatgcacgggtactcggcaccattggtgtgattgaaacggaagagccggtcaatatggcggaattacagcgccgctttgttgacgccggtgtgtggatacggccgttcggacggctgatttatattatgccgccatacattattacagcggcacaactggaaaaactgacgcaggcgatagataaggtgacggcataa

SEQ ID NO: 275784 - DNA, 990 bp, Morganella morganii
atgaagcaggtggtttatgttgccagtacggaaagtcatcagattcatgtctggcagatgaatgaacacggtgagatgtcactgttacagacagtatcaacgcctgatcaggtgcagccgctgatcaccgcgccggatggccgtcatctttatgctgcggtaaaaccgggcaatgcggtggcgacttataaaatcgcggaagacggcaaactcacacaaaccggcctgacgccgctcccgggcactgccgcctatatcacccttgataaagcgggacgtacactgtacgccgcctcttatcatcagggaaatctggcggtactgccgatccgcgataacggcgttcccgcccgtgcagtgcaggtgattgagggattaaaaaatccgcattccgccaatattgcgcaggatggacacacactgtttgtgccgtgcctcggggaagatcacatccgcgcttacacaattgaggaagacggacgcttaaccgaacgccacgccgatatgctgacggttgccgccggtgccgggccgcgccatatggcgtttcatccggcaaaacatgtggcgtattgcctgaatgaattaaatgcgaccattaatgtttaccgcgaatgggttaaagtccgtgaaattcagtcagtggatatgatggcggatgattattcaggacgccgctgggcagccgatattcatatcacgccggacgggcgtcatctctatgcctgtgaacgggcatcaagcgtgattaatcactaccgggtgtcggatgacggcggccatctgcaactggcggggcgttatccgacagaaactcagccgcgcggttttgcggtggataacagcgggcgtttcctgatctcaaccggacagctttctcaccatgtggcggtttcccggattgatgcgattaccggcgaattgcacctgataaaccgctatccggcaggaaaagggccgatgtgggtgacggtgctgacgctgaaataa

SEQ ID NO: 275785 - DNA, 822 bp, Morganella morganii
atgtcttaccgcgtcctcgcatttgatctcgatggtacacttctcgatccggataaacatatattacaggagtcgctggatgccatccgcgaagcccgtcgtgccggggtgcaggtactgattgtcaccggccgtcatcacgttgctattcatccgttttatcagacattgcagctggatacaccggctatctgctgtaacggtacctatctgtacgattatccggggaaaaaagtgctttccgccgatccgatgagtgtcagtgaatcccgtcaactgctcgaacgcctggcacagacggatatcgagcatctgatgtatatctcggatgccatgctttatcacactgacagcagcaccattgagcggacactgaactggtcagcttctctgccggagcaccagcgtccggtgatgcgcaaagtgaataattttcttgatgaggttgaccgcgctgacactatctggaaattcgccacctgctcagatgatctgaacaaactgcgcgaattcaccgatgccgtggaagcggatatgggactgtcctgcgagtggtcgtggataaaccaggtggatattgcccgcaaaggtaacagcaaaggccgccgtttacaggaatgggtggaatctcagggaatgacaatgaaagatgtgatggcatttggtgataaccataatgacatcagtatgctttcagccgccggcctgggtgtggcaatgagtaatgcggcagacgaagtcaaagcacacgctgacctgattatcccggataatacccagccgggtattgcgcaggcgatacgccgtcatattctcagctga

SEQ ID NO: 275786 - DNA, 276 bp, Morganella morganii
atgaaaaaagcacttttctttttattactgggtattttctccggcggccaggcgctggcggcaaatcagctaatgtgttacacctacctgaaaaaagtcaaagatgttgaaatcgaaaacttaaaagtctggtgcatcggcaccactgacggctcgcagggcggaatgcgtatccctgatctgctcagtatgggatataaagtggtggcaacagaaagcttcccgtatcagtgttctgagggcggctatacttatgatgatcgaaattactgctga

SEQ ID NO: 275787 - DNA, 1068 bp, Morganella morganii
atgttagtgcttgattttgaacagcagctcggtgatttatccatggtgatcaataccgaactggccagtgaccgtattaccgctgtcttcgggctctccggggcagggaaaacctcctttatcaatgtgatcggcgggctgacaaaaccgcagaaagggcggattgagcttaacggtcacacactcgtcaatattgaaaaacgtatctgtctgccgccggaaaaacgcaaaatcggctatgtcttccaggatgcacgcctgtttccccattaccggataagaggcaacctgcgctacggtatggcacgggagatggaagatcagtttgacagtattgtggaactgctgggtatcgggcatttgctgaaccgcctgccgatgacactctccggcggagagaaacagcgggtggcgattggccgcgcgctgctgactgcaccggacatcctgctgatggatgaaccgctggcgtctctggatctgccgcgcaaacgcgaactgctgccgtatctggaaaagatggcacaggatatcagtattccgatcctgtatgtcagccacagcctggatgagatcctgcggctggcggaagatgtggtgatcctggaaaaaggccgcattctggcacaggggccgctggaagaggtatgggccggagcggcattgcgcccgtggctgacacaggaaagtctctcaagtgtactgagtgtcactgtgcttgagcaccacgaccgctacgccatgacggccgctgctatcggtgaccaggtgctgtgggtgccgcgtatcgccggtgaacgggacacgccggtacgtgtgcgtgtcagtgcggatgatgtgtccattgcactggaaaaaccgaaaagcagcagtatccgcaatatattacgggcgaaaatcacggaaatgtatgacgacgacaacgggcagactgatgtgcgtctggcggtcggcaatcatttcctctgggcacgtattaccggctgggcgcgggatgatttgcagctgaaacccggacaatgggtgtatgcccaggtaaaaagcgtgtcactgagccgcgaattataa

SEQ ID NO: 275788 - DNA, 696 bp, Morganella morganii
atgttgaatgagtatgaatggcaggcggtcatcctcagcctgaaagtatcaacggtcgccgtggcagccagtctgccgttcggcatactgatggcatgggtactggtgcgctgccgttttccgggcaagtcgctgctggacagtcttatccacttaccactggtgttaccgccggtggtagtgggttatctgctgctgatcagcatggggcgcaaaggcattatcggtgagtggctctataactggttcggcttcagttttaccttcagctggcgcggtgccgcgctggctgcggctgtggtggcttttccgctgatggtgcgggctatccgtctggcactggaggcggtggatatgcgcctggagcaggcggcacggacactcggtgcttccccgctgcgggtctttttcactatcacactgccgctgtcgctgccggggattattgtcggtaccgtgctggcatttgcccgttcgctgggggaattcggcgcaacaatcacttttgtttccaatatcccgggggaaacccggactatcccgctggccatgtactccctgcttgaaacgccgggggcggaaatggatgcagcgcggctctgtattatcgccattgttctggcactggcttcactgctggcctcggaatggctgacccgctggggacgcaaacgcctgggggttgccgcatgttag

SEQ ID NO: 275789 - DNA, 771 bp, Morganella morganii
atgaaaaaacagttcagtaagttattggccggtgttgttatctctgctgtagtcatgggtcaggcatgggccgctgaaaaagtgaccgtatttgctgcggcatcactgacaaatgcggttgatgaaatctcggcaaaatataagcaggagaaaaaaggcgaagtggtcgcgtcttatgcgtcttcttccaccctggcccgtcagattgaaaatggggctccggcagatatctttatttctgctgaccagaaatggatggattatgctcaggagaaaaacctgatcatcaatgacacccgtaaaaccctgctgggtaatgagctggtgttgattgccgcgaaagacagcaaaattgataaagttgatattaataagcagaccgactgggttaaattactggatggcggccgtctggctgtcggcgatcctgatcatgtgccggtcggtatctatgcacaggaagccctggaaaatctgggtgcctggaaagtcgttgatccgatgctggcccgcaccaataatgtgcgcagcggtatggcgctggtggaacgcggtgaagcaccgctgggtatcgtgtacggctctgatgcggttgccagtgataaagtgaaagtggtcggtattttcccggcagatacccataaaccggttgaatacccgattgctatcctgaaagatcgcaataatgctgatgtcaaaggtttctatgattacctgcagacaccggaagcaaaagagatctttaaacgttacggtttcagccctctgtaa

SEQ ID NO: 275790 - DNA, 141 bp, Morganella morganii
atgtttgagttagttaaaagtttaggtttcgcactgttaatggttcctgttgttatgacaggcctggcggctctgatctggggattaggtgaaattttcaacctgatttcaaaaggcgagcgccgcgaaaagcagctctga

SEQ ID NO: 275791 - DNA, 573 bp, Morganella morganii
atgcagaatgtattatttcgtcttcatcaggcagtcaaggattccccggaaccggaaggggctgaaacagaagaatttgcccgtatgctggcagaacaaccattctgggctgaatcacaggatcatgaaagtggcggacaaattggtctggcattcactcagggggaagatgatgaagaacccctgctgctcgtttatatgcgtgatgatggtggtcatgaagcacctgcaaaagtcgcggaagaaatggcatccggtgaacgggaatatacctggctgccgggtgcgtttttactgggactgagcaggaaaattgatttcacactgtgcatcatcggtgaggatgggcaaaccctgccactgaacagtcagtttatgaaaatgatgtttctctatattcaggaactttaccgcgaagacgatgaaggtgaaacacctgtacaatccccggctgctcctgtctcaccacgcagcagcagtattgtggaaaaacccggcagtgccggaaaagtgataggttttctgattctggcggcggctattgtggcggttgtttactttatgcagacctga

SEQ ID NO: 275792 - DNA, 786 bp, Morganella morganii
ttggatattttattaacactgaaatcagaaggtcatttatttgccgatccgcgacggatttccttactcaagcaggtcagagccactggttctatcagtcagggggccaaactggccgggatcagttacaaaagcgcctgggatgccatcaatgagatgaaccagcttgccgaggaaaccattgttgaccgggccaccggcggcaaaggcggcggcggcgcgacactgacacgctatggtgagcgcttacttcagctttatgatctgctggcacagatccagcaaaaagcctttgatgttctcaaggatgattcgctgcccctcgacagcctgctggcggccatctcccgcttctcattgcagaccagtgcccgtaaccaattcttcggcacaattatgtcgcgcaaccattctcatgtgcagcagcatgtgaatgtcctgctggcggataaaaagaccgaacttgccgttgccctgacggaacagagcgctaaccggctgggcttatcggttggtaaagaagtacttactctgattaaagcgccgtgggtgaaaatcagtaaatccgcagaaaacagcacgaattatgacaaccgcctgagcggacgtatctcttccgtagccagaggtgcggaaaacagtgaggtgatggtgacactgaccggcggggcgcagttatgctcgaccctggataatcaggatgccgacagccagcagctgaaagaaggtgatgacgtcaccgcgctgtttaatgcggaccaggtgattattgccacattatgctga

SEQ ID NO: 275793 - DNA, 1950 bp, Morganella morganii
gtgaaaacaggattaaaatattcggtgctggcattactgatcagcggaacggtcaatgccgcgacagtggatctgcgggtgatggaaacctcggatattcacagtaacttaattgactttgattatttcaaagacaaaccgacagaacagtttggtctggtccgcacagccggtttaattaaagcggcaaaaggtgaagtcaccaacgcagtattagtggataacggggatttaattcagggcagtccgctggcggattatatggtcagcaaagggttaaatgacggtgaagctcatccggcacataagctaatgaataccatgggttataccgtcggaaacttcggtaaccatgaatttaactttggcctggattatctgaaaaaagccattgccggtgcggattttccgtatgtgaatgccaatattattgatgagaaaaccggtaagaatctgtttacgccttatattatcgttgataccccggttaaagatcgcgacggtaaagagcatgtaattaaaatcggttatatcggttttgtaccaccgcagatccttatctgggataaagccaatctggaaggaaaagtccgcgtcaatgatattacggaaaccgcgaaaaaatttgtgccgcaaatgaaagcagaaggtgcagatttaattgtcgctattccgcactccggtttttctcaggagccgtataaagcgatggctgagaactcggtttattatctcagtgaagtaccgggtattaatgccattatgttcggtcactcgcacggtgtatttccgggcaaagattttgcggatatcaaaggcgttaatattgagcagggaaccgttaacggtattccggcagtaatgccgggccagtggggggatcacctcggcgtggtggatctggtgctgaataatgatgacggtgcgtggaaagtggcggatgccaaagcacaggcgcgtccgatttatgacaaagttaataaaaagccgctggtggcgcgggatgacaagctggcttctgtaattgatgaacagcacaatgcgacccggacctttgtcggcaagctgattggtaaatcaccggataatatgtacagctacctcgcgctgttgcagagcgacccgacggttcagattgtgaataatgcgcagacggattatacccgccgttttatccagggcgatccggatctggcggatttaccggtgttgtcagccgccgcgccgtttaaagtgggcggacgcaaaaatgccccggcggatttcgtcgaggtagaaaaaggggatatgacgttccgcaacgcggcggatctctatctctatccgaatacgctggtggtcgtgaaagcaaccggtgcggaagtgaccgaatggctggagtgttctgccgggatgttcaatcagattgacccgcagtcagaggcaccgcagagcctggtcaactgggatggtttcagaacctataatttcgataccatttccgggatcaactatcagatagacctgacacaaccggcaaaatatgatgtggagtgccagacagtcaatccgcaggccaaccgcatcaaaaatgtgacttatcagggtaaaccgattgatccgaaagccgttttcctggtggccaccaataactaccgtgcttacggcggaaaatttgccggaaccggtgacaaacatattgcgtttgcctcaccggatgaaaaccgcagtgtgctggcgggttatatcgcggcagaaaccaaagcaaaaggtgcggtatcagcgcaggctgagcaaaactggacatttgtgccggtgaaaacggataagaaattagatatccgctttgaaacttcaccgggggataaagccacacagtttattaaagaaaatgcccattacccgatgacccgggtcgggacggatgatgtgggttttgcggtttatcaggttgatttaacagcgaagtaa

SEQ ID NO: 275794 - DNA, 1452 bp, Morganella morganii
atggcacatctgcacatcacacaagggatcttccggttaagcgccgataaacagctttctgttccgtcattacagctggaaagcggtcagcaccacgcctttatcggtaccaacggcagcggaaaatcagccctggcccgtgcgctgattaaggaaattccgctgctttccggagagatgagcaccactttccgccgtccggttctggtcgcgtttgagaaattacaggcgctgattgatgaagagtggaaccgcaataataccgacctgacggacggcgatgataccgacaacggccgtaccaccgctgagattattcaggcggagcatcgtgacaatgagcgctgcctgcaactggcggcacagttcgggatttctgatcgactgtcacgccgctttaaatacctttccaccggtgaaacccgcaaaaccctgctgtgtcaggcgctgatgacagagccggatttactggtgctggatgagccttatgacgggctggataccgattcccgccgtatgctcagtgagatgctggcagagcttgcagagggcggactgacagttgttctgatcctcaaccgcttcagtgatattccggactttatcacctgcgccgggctgctgacagactgtgttctggcaccggcggataccttatccgcactgttacaggcacagctagcccgcagtgagcagacagagcatctgacgctgccggagcgggacgacccgtccgcagagcgccttgcgccggatattccgagggtgatcctcaatcacggctgtgtcagctataacgataagcctattctcaatgatctgacctggcaggtgctgcccggcgagcactggcaaatcaccggcgaaaacggcgcgggtaaatccacactgctcagtctgatcaccggtgaccatccgcagggctacagcaatgacctgacgctgttcggccgccgccggggcagcggtgaaacggtgtgggatatcaaacgccatatcgggtatgtcagtaacagcatccatctcagttaccgcgtcaatatcagtgtgcgtaacacgctgatttccggttatttcgattctgtcgggctctatcagaaaccgtcagaccggcaggtaaaactggcggatgagtggctgacgctgctcggtctgaaagcgtaccgcgatgctccgttccacagtctgtcgtgggggcagcagcggctgatactgattgccagagcactggtaaaacacccggcaatgctgatccttgatgagccgctacaggggctggatacactcaaccgtctgctggtgctgcgttttatcgatattatgataagccgtggtgatacccagttgctgtttgtcagccatcacagcgaagataccccggcctgcatcaaccggcggctggcgtttattcctgataacggtagttatcgttacgaaatcaatacgttgtaa

SEQ ID NO: 275795 - DNA, 753 bp, Morganella morganii
atggcagtaactaaactggtgcttgtacgtcacggtgaaagtgagtggaacaaagagaaccgctttaccggctggactgatgttgagttatctgaaaaaggccgtgctgaagcacaagaggctggtcagttactcaaaaaagaaggcttctcttttgatttcgcctatacctctgtactgaaacgcgctattcacacactgtggaatatcctggatcaggtaaaccagcagtggctgccggttgagaaaagctggaaactgaacgaacgtcattacggcgcactccagggtctggataaagcggaaaccgctgcaaaatacggtgacgagcaggtcaaactgtggcgtcgcggctttgccatcaccccgccggcactggaaaaaagtgatgagcgcttcccgggccacgatccgcgttatgcgaaactggcagaaagcgaattaccagccactgagagcctggcgatcactatcgaccgcgttgtgccttactggactgatgttatcaaaccacgcgttgcttccggtgagaaagtgatcatcgctgcacacggtaactccctgcgtgcactggtgaaatacctggataacatgagcgaagatgaaatcctcgagctgaacatcccgaccgctgtgccgctggtgtatgagtttgatgaaaacatgaagccgctgcgccgctattacctgggcgaccaggatgcgattgctgccaaagctgctgctgttgctaaccagggtaaagcgaagtaa

SEQ ID NO: 275796 - DNA, 1053 bp, Morganella morganii
atgaattatcagaacgatgatgtaaaaataaaagaaattcgggaattattaccgccagtggcgttattagagtcatttcccgcgactgagactgccgcagacaccgttcgccgcacccgtcatgcaatccacgaaatcctggaaggccgggatgaccgcctgctggtcgttatcgggccatgctcaattcacgacccgaaagcggcggttgaatatgcggatcgcctgctgacattacgcaaagaactgaaaggtgagctggaaatcgtcatgcgcgtctattttgaaaaaccgcgcaccacggtcggctggaaagggctgatcaacgatccgcacctcgaccactctttcgctatcaatgatggtctgcgtattgcccgcaaactgctgctggatatcaatgataaaggcttaccggcagccggtgagtttctggatatgatcacaccgcagtatctggcggacctgatgagctggggtgctatcggtgcccgcaccacggaatctcaggtacaccgtgagctggcctccgggttgtcctgcccggtcggatttaaaaacggcacagacggcaccattaaagtcgccattgatgccattaacgccgccgggtcgccgcactgttttctgtccgtgaccaagtggggacattcggccatcgtgaacaccaccggtaacggtgattgtcatattattctgcgcggtggtaaaaaaccgaactacagcgcggaagatgtcagtgcggtaaaagaagggctggcacaggccggtctggcaccgcgtatcatgatcgatttcagccacgcgaacagcagcaaacagtacaagcgtcagatggacgtgagcactgatgtggcacagcaggtcgccggtggtgagaaagccattatgggcgtgatggtggaaagccaccttgaggaagggaaccagaacctggaaggtgatgcgccgctcgtgtacggcaagagcgtgacagatgcctgcatcggctgggaagataccgaaaccctgctgcgtcagctggcagatgcggtaaaagcccgccgcggctga

SEQ ID NO: 275797 - DNA, 930 bp, Morganella morganii
gtggccggtggcagcttactcgcactactcgatgatatcgcaactgtactggatgatgtctctgtgatgaccaaaatggccgccaaaaagacatccggggtactgggggatgacctggcgctgaatgcacagcaggtggccggtgtccgcgctgagcgggagatcccggtggtctgggcggtggcgaaaggttcctttctcaataaactgattctggtaccgcttgcactgctgatcaatgcctttgccccctgggctgtcacgccgcttctgatggtcggcggggcgtttttgtgttttgagggtgcggaaaaactggcgcataagtttctgcataaagccggtgatgaacccggtgaaacggcaccggcggaagatattcagacaccggaagagttggccgcattcgagaaacgcaaagtcaaaggcgctatccgtaccgattttgtgttatcggcggagattatcgctatcaccctcggtattgttgccacgtctccctttattaatcagcttgtggtgttgtcagtgattgcggtcattatgactatcggggtatacggcctggtggcggggattgtcaaactcgatgatctgggattttatctgcagaagaaatcagccgcgctgctgaaaaaactgggtgacgggctgatccacgccacgccgtatttaatgaaaaccttatcagtcgtcgggacagcggccatgtttatggtcggcggcggcattttgacacatggcatcccgtttattcataacctgattgaaaatctggctcagcagagcgtacagatcccggcactcggcaatatattgcactttatgaccccgccggttgccaatttattgttcgggctcgtcgccggtctggtgattgttgtgctgattaccgctgttaagcgtattaaagtgggattagcggcataa

SEQ ID NO: 275798 - DNA, 702 bp, Morganella morganii
atggaattttttgatattaataatattctcgtggtgatcccctactggaaagaagggtcttatgcgctgtcctggattgaagcagtgggagcaaccgccgggttgttatgtatctggctggcaagcctggaaaaaacaatcaattatctgtttggcctgattaacgtcacgctgtttgcggtgattttctttcagatccagctctatgccaatctgctgttacagattttcttcttcgccgccaatatttacggctggtatgcctggagccggcaaaatgagaaagcggaagcggagctgaaaatccgctggatgccgctgcggcagacagctgtcattgcggcggtttctctggcggcgattttactgctggcgcgttttatcgaccctgtctttacgtggctggcgcagagcatggtcagtatactgaatgccgcaggggctgatctggcaatgccggtattgttgcccgatgctttcccgttctgggatgcagccatgacggtattgtctgtggtggcgatgatcctgatgacccgcaaactggtggaaaactggctgctgtgggtggttatcaatatgatcagtattgtgatttatgcccttcagggtgtgtacgcgctgtcgctggaatatattatcctgctgggtgtggcgctcaacggttcgcggatgtggataaaagcagcgaagcagccgtaa

SEQ ID NO: 275799 - DNA, 879 bp, Morganella morganii
atggaatcaattgagcaaattataaacaatataatttcttttgccctattagatccccgtatcgatgcggtcattatcaccggctctgtggcacgccagaaccaggcagaccgtttttcggatattaatgccgagctgatcggcagcagtcatgatgatttatttcaggacagccgctggctgagccggtttggtgtgccgctgattatccgcaaagaggcttcacgagaaaacgacaacctctgctggccgtcttgtcaggttctgtatgaaaaaggccgtaaagttgattttgttctggccgggcgcgaacgtatcacacagatggccgcacacgggctggacagcatctatcagcgcggttatgccgttctgcttgataaaaccggtctcactgccgggttaccggagtatgccgatccggctgccgtgctcactccgccggaccaacagacattcctggaaaactggcagaatttctggctggaagcctcacaggtgccggtttattatctgcgcaatgaactctggactgcccgtctgcgggatgtggcgatgaaacagtggctgatcacccagctggagtggcatgtgctgcttcgtagtgacggtacacaggatgtctggtatgcggggcgtcatctgagcacctggctgcctccgggcctgtacgggcgttttatggcgacactggataaccgtgatcgtgtccgtgccgcacgggcgcatatggcgatgctgacactctaccgcgatgtggcactccgtgtgattgaagcacagaaatttgatatcgatataacgctggcagataaaattattgcactggttactgaccggctgaatgccgatgatttacttgcgccggaaaatgaataa

SEQ ID NO: 275800 - DNA, 1107 bp, Morganella morganii
atgtcgtggcctgttcctgaatttccggttaaacgtgatgcaccgggcgccaaaattacgctgtggctggggttgctgttcgtcgttctggcccttatcttttttctcgatttttatattttcaaactcccgctgacggaagtactgatttttatctatctgccgtacattctgatctggatgtgtctgttcacttacgccatgcaccgtcatgagcaggcgcggatcgcctgtcagagctggaatgcctccattaatttcaaacgtaatgagtgggtcaactggtgccagcgcagactgatggtgaccggggtttcattgctgatgccgaaaagtgttaaacaggtttatacctcagagcggaaacagcggacagacgaggaagataaacagctgcttgccggttatgaccattcggttgaggctatttttaccgcgctggcgaaagatctgaatcagcagcatgaaggttaccagtcaaaactgaaaaccgtgtatgtgatcactccgaatcaactgcaaaatacagaaattgagcgcaatgtaacgaaaatctggggctgtgcaactgaattcattcagacaccggatgatatcggccatctgtttgatgaggaagataacagcgccatgtggcttctggtcgggctgaatatctggcaggcgggtcagataccggcttatcacgaaatggcaagcgccattctgctgacatcctgctactattttgagcgcaatacatttccgtttaacggtagtttgtcgcgctttatgccgatcaatgaaatgcagttaaccgccgatctgccgatgctggaaaaaatgaatctgctggataaagaggaagaaaaatcattctggctgatgcgggaaaatgaactggcgcaggatgtgatttatcagtactgcaataaagcgcagcgccgtactttcctgaaaaataatatttatattgcggataatcaggtcagcgccgacagggaagcggtttttgtgatggcaatgatgctgataaaagcgatggaaaccctcagcccgcagtgtctgctgatgatggacagtgatggtctcgggtatgccaccgtggtcgggtgcgaagtccgctga

SEQ ID NO: 275801 - DNA, 465 bp, Morganella morganii
atggcgtgtattttttgtgatatcgcggcggggaaagccccctgccataagctctgggaagatgagcattatctggcatttttgtcgatatttcccaacaccgacggttttacggtggtgatcccgaaggcgcattacccgagctatgcgtttgacctggaagatgatgttctgaccgggctggtgctggcgaccaaaaaagtggcaaaagttctggaaaaggcatttccggatgtcgcgcgctgcggtatgtttttcgagggctacggggtggatcatatccacagtaaactcagcccgatgcatggtacagccgatatgacagaatggcggccgatcgaacataaacaacccgcgttttacacacagtatccgggatttttgtcatcccacgactgtgagcgggcagatgataagaagctggctgaactggcggcggctatccgtgcaggtcaggaaaagtga

SEQ ID NO: 275802 - DNA, 228 bp, Morganella morganii
atgcgaactaacagagctgcgagacgtttgttaggaatgccctatacatacagtaaagggaaatcaaaaattaacatctttattgcagctgccgcagatgaaaacgcggaaaaaatcccgcaggcgctgaagtcaaaaagcagaatctgtgtcattcaggacgataataagaaaacccggacttatcacaaaatcgagacacattatccgggctatatggcatgctga

SEQ ID NO: 275803 - DNA, 519 bp, Morganella morganii
atggactatctgtattacgcagggcaggggctcggtattgttgcatttattatcggtacgacggtttttgtccagcgcaatgagcggaagctcaaaatccggttatcaatttacaccgccattatggcatcccacttttttctgcttggtgcatatcccgccgggatcagtgccacgctcaacagcatccggacttatgtgtctatcagccatcgtcagcgttgggtgctctggttatttgtttcactgacactggttctggcggtgccgaatatccgtacatggcaggaagtgctgccggtaacgggcaccctgatgagcacctttgcgtttttcctgctgacgggattgcgtatgcggtatgttatctggtgttcaacagcctgctgggtggtgtataacgcctggctgggaacggtcggcggcacactgattgaatcgacgtttctggtgatcaacggctgggcgattttccgtttccggcgtctgataaaacagggaattaatccgttcagttaa

SEQ ID NO: 275804 - DNA, 264 bp, Morganella morganii
atgttagaaactatcggatttgtgctactggtgagtacctgcggcgacgatgcctgcgaggcactgccggtcacggaagatatctataccagacatgagtgcgaactccgcctgaaatatatcgccaaacgccgtcccaacctctactttatgtgtaacgaggtaatgcgcgaaaccggctccggtgatgacgacacccccggaattccggatgatccggaagacacgctccctccggatgagcagccgcaaccgcttaactga

SEQ ID NO: 275805 - DNA, 582 bp, Morganella morganii
atgcaagccgatattgtgctgttcgacgattttgaaacactggatgtgttcggccctgctgagattttcggccgttccccgcattacacactgaattattgctccctcagcggtggtgtgatcaccagttcacagggagcacagataataacaacggtatttgagccggagaaaaccgcgttaatgctggtgccgggtggtcagggcacacggcagctggtcagtgatgagggcatgctcacggcgttgcgtacggcagcacagcatgcacaatggtgcctttccgtctgtaccggttcggctcttctggcagcggccggtgtgcttgacggcagacgggcgacatccaataaacgtgcctggcaatgggtaacctccctgtccgcgcaggtaaactgggtgaaaaaggcacgctggtgtgcggacggccgtttttatacctcttccggtgtatcggcgggcacggatatggcgctggcatttattgctgatcgccacggtgaggccgcagcggaagagatcgcacaacacattgaataccggtggcataatgatgccggcgatgacccctttgccgtataa

SEQ ID NO: 275806 - DNA, 555 bp, Morganella morganii
atgcgtatcgggatgagtgtggcagcagcattactgggcgtggtatcaacctctgccctggcactggaatatccgctcggacaacctgttatcaaaaacggtatggagattcagggtgtatatctgcagccgattaccatggcagtggaaggcaaacatgaaatgcatcacctcgcggcggataagtcagacatccacctggaagcagatatccacgccgttgaggaaaacccgaatggcttcgcggaaggggattggatcccgtatctgaaagtggattacaaagtcactaaactggatgatccgaaaaaagcacagtccggcacctttatggcgatggttgccagcgacggcccgcactacggtgaaaacctgaaactggatggttacggtaaataccgcgtcgaataccgcatctctccgccgagcatgaacgacaacgcggctttcggtcgtcatatcgataaagaaaccggtgttgctccgtggtttgagccgtttgatgtctcctgggacttcgagtatgccggtaccggccgcaaaggcagttactga

SEQ ID NO: 275807 - DNA, 336 bp, Morganella morganii
atgaaactcgttgttatggcactgtgtttatcggtgctctcccttatatcactgcccgccgcagcggcagagaaattcactgtcgaactggaaatgaataacggcgaactgacaccgccggtactgaaggtacccgcgaaaacgccgatccgcattaaaatctccaataccggtaccgaaccggtcgaatttgaaagtacccaactgcgcaaagagaaagtgctggctccgggggcatcttccgtggtggtgattgcaccgctcaaacccggaaaatataccttttttgatgattttcatctgtcgcatccggccggtgagatcatcgcggaataa

SEQ ID NO: 275808 - DNA, 840 bp, Morganella morganii
atgggacaggttctttttgtcgtctggcgtgaaagctttgaagctctgctggtggtcggcatcatctatgcgtggattaaacagcacccggatgccgccgcagggcgccgctatctctggggcggagtggcactcggtgttgcgctgtcactctttctcgcactgcttatctatggtgtgtttaatgtgctggatgacagcggccagacgtactttatgatcggtatgtcgctgttcgcggcggtattgatcgtgcagatggtgtactggatgcagcagcacagcgcatcactcaaatccggtattgagcaggagatgaatgacagtgcccggcagcactcctggtggggcgcgttgtttattgtggcgatcgcgatagcccgtgaaggcagtgaaatcgtagtgttcctctccggtattgtgatggggctgaatgcagacaacatgtggtcatttaccggggaagtcgtggccggtatcgcggtagcggcactgacgttgtggctgttcctgttcacttaccggaaaattgcctggaaatggtttttccgtatcaccggtattgtgctgttgttcctggcctgttcgctgctgcttaagggaacggaagaaatcgtcaacctgctgaccgaacatgatatcgaactgaatgatttcctcatctatccgctgtgggataccaccaactggctggatgacaccggtaccaccggcagcttcctggccagcctgttcggttaccgtgcgcagcctatcggcctgagtgtcattacttttgtggtgtactggctggtgattattgcgctgttctgccgcagaggaaaaaaacatgcggattaa

SEQ ID NO: 275809 - DNA, 900 bp, Morganella morganii
atgcggattaaccggactgccgtactggttctggcatcactgctgctcagcgctcccggctatgcggaaaaataccgtgcaggtaatccggataccggcagtgatgtggtgatcgccaaaggggatattccgtcaccggaaaaattccgtccggttgtggcggattacatgacgatgatggggaaacagacagctgcggctgaacatcagctgcaattgctgcaaaaagcgctggccgcgggggatatggcagccgcacggcaggcttatattcaggcacattatgattatgaggttatccgcgcggcagtggtggttttcggccacgctgacagagttattaaccctcatgccggctattttctcagccgcgagcaggatccgaaattcaccgggtttcaccgcatcgaatatgcactctttgcccaaaatgatcccgctgccgctcagaccgctaccgccgatctgctgcgcaatattaacgatctgaaacagcggatcgacgtggaaaccctcccggcggcaaaattggtgcaatctgcggatgacagtattgagctgattctcagcactaaactgagtggtgatgaaaaccgctacagtcgttcagatctgtcagatatcgccgccaatattgaaggggcccggcgcattgtcagcgggctggcgccgttattatccgcaaaaaccaatgagacactcagaaagcagtttgcggggccggatgcggtaatagcccgttaccgggatacccgggggcagtatgcggaatatgagaaactgacaccggaagataaacagcaactctatgcagacctgacgctgctggcagaatctctgacacaactgcgcgctgaactgaaaatagacgtgtattacaaataccggaatgaaccatga

SEQ ID NO: 275810 - DNA, 1290 bp, Morganella morganii
atgaaacacggcaaagtgaatctgactgagacagaagagtctgtcagtctcagcaaacgaaataccctgaaatggctgggggcagggagtgttctgttgtccggcgggttaccggctttttctgctgccgcagcaccggcggcgtgtgataacagcgcgcggctgcgggaaattccgtaccttggcaaacatcaggccggggttatcacaccggagcagaaagaggccatttttctgtcactgaacctgaccgttaaaacgctggatgaggttgaagatgttttccggcggctgaccggttgtattgcggaactgacccgcaaccgtcaggcggcggcaccgggtgatgacagaatgccgccggcggaatccggaattctcggtacggcactgacggcggatgcactgacagtgacggtctctctcggccactccctgtttgatgagcgtttcggtttatcgccactgaaaccacaaaaatttacagccatgacggcgttcccgaacgacaggcttgatccggactggtgcggcggggatatcctgctgcagttttgtgccaacagccgtgaaacggtgatttatgcactgcgtgaagtgttgcgccgcctctcaggccgggtagctccgttgtggaaaattgacggttttctgcccgcacgggatattgaatgccgcacaacaccggttaacctgtttggctttaaagacggtaccggtaatgccgatgccggtgatgatgccctgatgaacgacctggtctggatcaccggccgggaacccgcctgggcggagaacggcagttatcaggcggtacgccttatccgttttgagctggaattctgggaccggacaccgctggaagatcaggaaaatgattttggccgtcacaaagccagtggtgcgccgatgggaaaagagcatgagcacgacgacccggactttaagcaggatccgcacggtgaccgggtcttatttgattcccacatgcgccgcgctgaaccccgctccacagagcggcatgtggccaaactgcgccgccgcagctacagctactcgctggggctgactccgtccgggcaactggatatggggctggtatttatctccttccagaaggatttgaaaaaaggctttattgatacccagaagcggctgaacggcgaaccgcttgagcgttacatcaaaccgttcggcggcggatactatctggtattgccggggattacctcagagaaaagctatctgggtgagacactgattgctgccgcgagggagcagggcagataa

SEQ ID NO: 275811 - DNA, 756 bp, Morganella morganii
atgttcgacttgacaggtaaaatcgcagtggtttccggcggcgccaaagggatcgggcgcggcatcgtcaccgcgctgaaaaagggcggtgctaccattgttatcgccgatattgatgaaagaaccggcagcgcaaccgctgcagagctggaaacagactttatggcactggatgtgacctctcagtctcagtgccgcactgttatcagtaaggtcagagaaaagtacggtcgtctggatatcctctgctcaaataccggtattttcccgcaatgcaccatcaaatccatgacggagcaggactgggataccatgcagaaggtgaacgtgaaggggatgtttttcctggttcaggccgcgctgggtgtgatggaagaacaaaaatatggccggatcgtgattacctcttccattaccggtccggtcaccggctttccgggctggagccattacggcgcaagcaaagctgcacagctcggctttatgcgcagtgccgcgctggaatatgcccgtctcgggatcaccattaacgcagtccagccgggcaatatcctgactgaaggactgaaagcacagggtgaaacctatctgaaccagatgcgtgccactattccgacgcacacgctcggtgagccggaagatatcggttatgctgcggcgttccttgcctctgatgaagctaaatacatcaccggacagaccatcattattgacggcggccagattttaccggaatccccggaagcgctgctctga

SEQ ID NO: 275812 - DNA, 987 bp, Morganella morganii
atgattacatacgatctgccggtaaccattaaagatatcattgatgcacaaaaaaccatcagaggacatgtctataaaacgggtatgccgaagtccaactatttaagtgaaaagtgcaacggcacaatccacttaaaatttgagaacatgcagcgcacaggttcatttaaactccgtggtgcatttaacaagttaagttcgctgacaccagaagaaagagcacagggcatcgttgcctgctcagccggtaaccatgctcagggcgtttctttatcctgcgctatgttaggtatcaacggcaaagttgttatgcctaccggtgcaccaaaatccaaaattgcagcaacctcagattactctgcagaagttgttctgcacggtaataacttcaatgacacgattgctaaagcaagagagatcattgagcaggaaggccgtatctttatcccgccatacgatgatgaaaaagtgatcgcaggtcaggggactatcggtctggaaatccttgaagatctgtatgacgtcgataacgttatcgttccaatcggcggcggcggtctgattgccggtgttgcagttgctctgaaatccatcaacccgactattaatgtgatcggtgtccaatctgaaaacgttcatggtatggaagcatcatatcgtgctggtaaaatcacgacccatcgtgatgccggtactgtggcagatggttgtgatgtttcgactccgggcagtatcacgtatgacatcgtgaaagagctggtgacagacatcattctggtaacagaagaagaaatccgcgaaagcatgattgcgttaatccagcgcaacaaagtagtgaccgaaggtgccggtgcactggcgtctgctgcgattcttagcgggaaactgaaaaaatatatcgaacacaagaagacagtcagcatcatttccggcgggaacattgacctgactcgtatctctgaaattattggtacccacgaaaaataa

SEQ ID NO: 275813 - DNA, 1329 bp, Morganella morganii
atgagtactgacaaaacccagattccggctgagtataaaagctggcgtaaatcggacacgacctggacactcggtctgttcggtactgctataggtgcaggggtactattcttcccgatccgtgccggttacggtggcctgatcccgattctgatcatgctggttctggcatatccgattgcgttcttatgtcaccgtgcattagcacgtttatgtctgtcaggcaaaaatccgtcaggcgatatcacagaaactgttgaagagcactttggtaaaggcggtggtgttgtcatcactttcctgtacttcttcgcaatctgtccgctcctgtggatctacggcgtaaccatcaccaatacctttatggcattctgggaacagcagctgggcatgatgccgctgaaccgtggtgtggttgcactgattctgctgttagcaatggctgtcattatttacttcggtaaagatctgatggtccgcgtaatgagctacctggtattcccgttcattgccagcctggtactgttatctctggctctgatcccttactggaacactgccgtatttgaaagtgtgaacgcagacagcttccagctgttcggtcacagcggtatcctggtaacagtatggctgggtatttccatcatggtgttctctttcaacttctcaccaatcgtatcttctttcgtggtatcaaaacgtgaagaatacgaagcggcgtgcggtaaagatttcaccgagcagaaagttaacaaaatcatctcccgcgcaggtttactgatggtgggtgtggttatgttcttcgcattcagctgcctgttcgcgctgtctccggctaacatggctgaagcgaaagagatgaacattcctgttctgacttacctggcttaccacttcaacaacgtgggcggcgctaacggtactctggcgactatcctggtttgggctgcaccaatcatcgcactggttgcaatcttcaaatccttcttcggtcactacctgggtactctggaaggtatgaacggtctgttactgaaatttgctttcggtggcgacaaaaacaaagtcagcgttggtaaactgaacctgatctctatggtcttcatcatgggttctacctggttcatcgcttacatcaacccgaacatcctggacctgattgaagcaatgggtgcaccaatcatcgcatcactgctgtgcttactgccaatgtatgctgttaaccgcgtaccggctctgagcaaatacaaaggtcaggcatctaactacttcgttaccatcatcggtctgctgaccatcggtaacatcgtgttcaaactgttcgtataa

SEQ ID NO: 275814 - DNA, 621 bp, Morganella morganii
atgaatgttattgatgccgtgcgccagcgcagagcaaccaagaagtttgatcctgattttgtaatcccgcttaacgagaaaaaagcactgttgtcactggcgatggaaaacgccccgagtgcctttaaccttcagcactggcggccgctgctggtggaggatccggcacaacgccgcaatatccgcaaagtgggctgggatcagccgcagatgacggacgcctccatgctggtgattttatgcggtgatgtggcagcctggagttcccgtccccgtgaaatctggcgtgatgctgatccgctggtgcgggattttatggtcaatgcggttgataactactatcgcggtaaaccggaaacccagcgtgatgaaattatgcgcagtgccggtatttttgcccagacgctgatgctgctggcaaaagcgcagggatatgacagctgcccgatggacggatttgattttaatgcggtggctgaagttatcgacctgccggaaaactatgagatctgcctgatggtggcgattggcaaatccgccggtgagccttatccgcgtatcggtaaactgccttttgatcagctggtcagcattgaccgctttcatcctgatatgccgtaa

SEQ ID NO: 275815 - DNA, 660 bp, Morganella morganii
gtgatttcagtattggtggcaaatgcgaatgaattttaccgtgcagggattggggccattatcacggcaacaccgggtatgaaaatggcgggggaggtcagggacagcaccggtgcggtgcgctggtgccgcgataaccatgcggatgtggcgctgcttgatatcggttttccggtgatgagcggcctggaagctgccaaaaaaatcacccgttatacctccgaaaccaaagtgattatcctgacagatgaacacagcctgatctcaccatataaagtgatgaacagcggtgcggcggggtatttgtatcagagcagtgatcgtgaggatttactgcacgccatccggattatcagccggggccagcgctatgtggcgccggatatcgcccagcagaccattcttgacacccgtctgcatgcacatgacagtaatccgctggataaactgagtcaccaggagcgccaggtgatggttatgatagcgcagggcatcaaagtcacacaaattgccgacaaaatgtgtctcagcagcaagacggtgaacagttatagatatagaatatttaataagctgaatattaatggtgacattaaactcactcatctggcattgcgctacggactgatccatattgacagcgtggtgccggatgaatga

SEQ ID NO: 275816 - DNA, 1848 bp, Morganella morganii
atggaaaaagcggttgtaactgaattcgatgcgaaagcatttttaaaaactgtgaccagccagcccggtgtataccggatgtatgatgctgaaggcacagtgatttatgtcgggaaagccaaagatttgaaaaaacggctttccagctacttccgtacgcaggtttcgggaaaaaaaaccgagcagctggttaaaaatattgctcagatagatgtcacagtgacgcacacggaaacagaggcgttactgctggaacacacctatatcaaaaaatatcagccgcgttacaacgtgttgttgcgcgatgataaatcctatccgtatatctatctgagcagcaatgacaaacatccgcggctggctgttcaccgcggggccaaacacgccaaaggggaatacttcgggccgttcccgaacgcctatgctgtgcgtgaaacgctggcattgatgcagaaactgttccccgtccgtcagtgtgaggacagcgtctaccgcaaccgctcccgcccgtgtctgcaataccagattggccgctgtctggggccgtgtgtcaaagggctggtgagtgatgaggactatgacagagaagtgaacctggtccgcctgtttctggaaggtaaagatcagcaggtgctgacagaactggtggaaaaaatggagcaggccagtcaggcactgcgttttgaagaggctgcccgtctgcgggatcagattcaggctgtccgtgctgtcactgaaaaacagtttgtcaccggctccggagatgacctggatgtcgtgggtgtttattttgatgccggtctggcctgtatccatgtcctgtttatccgcaacggccgcgtgcagggtagccgcagctacttcccgaaagtcccggcaggtactgagccggatgaaatcgtacaaacctttatcggccagttttatctccagggcagtgaaaaccgctcattaccggatgatattctgctggatttcccgttaccggaaaaagagattatggaagaaaccctgtctcagtttgccggccggcggatccttatccagccgaaaccgcgcggtgaccgggcccgttatctgaagctggcacacaccaatgccgtgaccgcgctgatgacaaaacgggcgcagcaatccactatcgcgacacgcatgaaagccctgtcagaactgaccggcattgaaaccatcaaccgtatggaatgttttgatatcagccataccatgggtgatcagacggtggcttcctgtgtggtttttgacagcaacgggccggtgaaatcggaataccgccgttacaatatcaccggtatcacgcccggggatgactatgcggcgatggatcaggtgctgcaccgccgctacggcaaacatatcggcaatgaaaaaatccccgatattatttttatcgacggcggtaaaggccagctcggtaaagcgattgaagcctttgacggcctggacgtggactgggataaaaacagaccgaaactgatcggtgtggcaaagggcagtgaccgcaaagcgggtctggaaaccctcttttttgccgcctccggggaagggatggcgctgccgccggactcaccggcgctgcatgtgatccagcatatccgcgacgaatcccacaaccatgcgatcaccggtcaccggcaacgcagggcaaaagtcaaaaacaccagtgcgctggaatcgatagaaggtatcgggccgaaacggcggcagatgctgctcaaatacatgggcggattacagccgctgcgtaacgccagcatcgatgaaatcgccaaagtcccgactatctcgtatgcactggcggaaaaaattttccatgcacttaagcattaa

SEQ ID NO: 275817 - DNA, 549 bp, Morganella morganii
atgcgattaaatatccctacatggctgactctgtttcgcgttatcctgataccgttctttgtcctcgccttctatttgccgttcagctgggcacctgttgtcagcgccgctatttttgtcattgctgcgatgacagactggtttgatggctttcttgcccgccgtttaaaacaaaccacccgtttcggggccttcctggatcctgtcgctgataaagtgatggtggcgaccgcgctggtactggtaacagaatactatgcggtctggtggataacgttgcctgctatcacaatgattgcccgtgaaattattatttcgtcactgcgtgaatggatggcggagctgggcaaacgcaacagtgttgcggtttcctggatggggaaagtcaaaaccacggcacaaatggtggcgctggtgggacttatctggcggccgaatgacctgacggaaattgctgctttcatccttttctacattgcaatgatcctgactttctggtctatgttccaatatttacgcgctgcatgggcggatttgagcgaagcctga

SEQ ID NO: 275818 - DNA, 219 bp, Morganella morganii
atgatgaaatgtcctctttgcggcgaacttgcccgcacccgcagttcccgcgatgtcaccaccgaaacgaaagaacgttataaccagtgtatgaatattaattgcggtgcaacgttcgtcagtcatgaaacccttgcaagatacattacaaaacctcaactgatcggtgcggtaacacttcaccccgctaacgataagcaattatcaatgggtttataa

SEQ ID NO: 275819 - DNA, 1110 bp, Morganella morganii
atgacggattttttcctcaccggtactgagtgcaccccggcatattcactttccgccgggtccgtcaacatcaatgaacggattcaggggcggctgatctcactgtcactgacggacaaccgcggatttgaggccgaccagttggacattgagatcgatgatgctgacggcaaaatgatgctgccgaagcgcggcgaggtgttatcgctgcacttaggctggaagaatgaaccgctgatttttaagggtaaatttaccgttgacgaaatagagcacagcggtccgcctgacaagctgaccatacgcggccgcagcgccgatttccgttcgtcactgaacgcaaagcgcgaggtgtcctatcacgaaaagacgctgggcgacatcatcaccaccattgcaaagcggaataacgtggagccggttatcgagaagaaactcgctgagattaaaatcgcccatatcgaccagaccaacgaatcagacggctcctttctggcgcggctcggcaaacaggagggagcaatcgcggccatcaaaaacggccaactgctgtttatgccgcagggcagcggaaaaaccgcgtccggcaaaccgatcccgccgctgctgatcacccggtccgtcggtgacggctaccgcttttcactggccgaccgtggcgcatataccggcgttattgcctcatggctgaacacccgcaagccaaagaaaaaagacgaagtaaaagttaaacgcaagcggaagaccaaaaagaaaagcccggagaaaattaaaaaacctgacgagccacagggggattatctggtcggtgaagaaggaaatgtgctgacgctttcacacacttacgcgaacaaaaataatgctgaacgggcagcgaaagccgcctgggaaaaaatgcagcgcggtgttgcatcgctgtctctccagttggcaaaaggccgggcggatatctacccggaaatgccggtaaaggttcaggggtttaagccggaaattgacggcgcagaatggatattgacgaaagtgtcgcactccctgaatgacagcggatttacatctgcactggaatttgaagtgaaaatctctgatgtcgaaatgggtgacggataa

SEQ ID NO: 275820 - DNA, 489 bp, Morganella morganii
atggcgatggctgcactcggcctgttcgtgtttgagctgcgaaccctgccgtttcaggggatgcaggaagaaaaacaataccgttttgcgtataacagccgggtcggcaagcggccgtcctggcaatttttaggattatccaatgatcctatcaccctgtcaggtacgctctgcccggaaatcagcggtggccggttctctatgatggcgctggaagccatggccgacagcggaaaagcctggtcatttatcggcggtgagggaaccatttacgggatgtatgtcattgagtccatcagtaaaaataaaagtgagttttttcacgacagctcggccagaaagatagatttcaccatcaagctgacccgcgttgatgaatcgctgtctgaaatgttcggtgatatcagcgcacaacttgactctctgactgacaccatcagcggcatggggaataaaatttctgacagcattacagggttattatcatga

SEQ ID NO: 275821 - DNA, 2589 bp, Morganella morganii
atgagcagaaacctccgtttacaggtcgtgttaaatgccgtcgataaattaacccggccgttccgcagtgcgcaggaatccaacaaacgactggcgggcgctgtccgtcagtcccgcgatgcactgaaagacctgaaccggcaggcaggacaaattgacggcttccgtaaaaccaaacagcaactcaccgaaacgcagcaggcttatcaggcggctacacaacgcgccgccgccctcgcccgcgaaatgaacgcctccggcaatccgaccaggcaacaggccgaagcgcttaaacgtgcgcagcgtgaagccggtcaactgaaaaaccggtttgaacaactccagcgatccacccagcaacagcgcacggccttgcaggccagcggcatctcgacaacccaactcgggcaggcacagcgccgcctgaacagcgacatagcccgcaccacccagcaactgcaacggcaggaacagcagttgcgccgcagcgccgaacaggaacgccggatggcagcggccaaaggcagctatcagaaaacaatggatgtccggaataaaatggccggaaccggcgcggcagcaatggcgaccggcggcgcggcgttatatgccggtaagaaatttatggcgccgggctatgagtttgaaaccgggatgtctaaagtacaggcgctgacccggcttgataaaggctcaaaagagtataaagcgctgcgtgaacaggcacggcaactgggggcgaccacggcattcaccgcaaacgaagtcgcacaggggcagtcattctatgccatggccggttttaagccggagcagatacagaacgccatgaaaggcaccctgtcaatgtcgcttgccggtgatatcgaccttgccaccacggccgatatcggatcaaacatcctgaccgggtttaaactgaactctgatgaaatgaaccgcgtcagtgatacgctcgttgccacctttacccggtcaaataccaacctgagcatgctgggcgacaccatgaaatatgtcgcgccggtcgcgtccgggctgggggttgatctggaaaccgccgccgtcgccgccggtaagctgggtgatgccggtattcagggcagtatggccgggaccagtctgcgatctattctcggccgcctggccgaaccaccaaaacaggccgcagatgcactggaagaactcggcatcaaaacccgggacgccaaaggcaacctgagggaactgccggaaatcctcaccgaactggataaaaaaacaaagaaaatgggtactgcgcagcgtgcggggtacttcaagcacatcgccggagaagaggcgttctctgccctgtcggtgctgacagaccaggcgggcagcggcgaactgcaaaagatgatcgccgaagtcaaagcggccaaaggtgaggcgcagaaagtggccgacaccatgaccgatatccttgacggcgatttaaaaaacctgacctcagcatgggaagatgtcggtatccagatattcggcggtgttgacagcccgctgcgggatatcgcgaaatccatcaccacggttatcagtaaggtcggggactgggcgaagcgcaatccggaactggcgaacacgctgacaaaaattgccctggcgctgggcgtgatcctcgccgtgggcggcgcgattgttctgatgctggccgcgatgctcggcccggtcgcgatgctgaaactcagtatgtcggttctcggcatcaagggtgtcggtgcgtttggcctgctggctaaagggctgaaagctgtcgggatggtcttattcggtatcggcaaagccctgctgacgaacccgctgtttcttgccgccgccgtgatcgccggtatcgcttatgaaatatataaaaactgggacggcatcaaaaaatacatgtctgatctgtgggaaaccgtgaaaaccaccatcaaaaccaagtgggatcaaatcatcacggatattcagaacctcccggccaccatgaagcaggccgcatctgacatgatagacagcgttatcaacggtattaacgaaaaatggacggagttaaaaaataagttcggcgaacttaaacagatggcaaaagatgccctcacgccggactggttaatcgaagccaaaaaagacccgaaatttgttaacgccgtggacgccacgcagaaagccaccatgtccggcggcatccgtaatgccaactggacgatcccggacaaaaaatttgccggggcctatgattccggcggacgtattccgcgcggtcagtggggcattgttggtgagaacgggccggaagtggtggacggcccggcaaatgtgaccggccggaaaaatacggcagcactggcaatgctggcactgagcaccctgtcccagccgatagcagcggcaccggcacaaaccgccggcggttctgtcagcagcgcgtattcatcacagcagaacgccgcgccggtcatcaacatctacccgacaccggcacataccgcacaggatatcgcccgcgaggttgcccgccagttagaagcgcacacccgccgacagcaggccagccgccgcagcggatacggtgacacagaggagttttaa

SEQ ID NO: 275822 - DNA, 309 bp, Morganella morganii
atgactgaacaaattaataaaacatcggcggttattgaactggatgaacccatcaaacgcggtgataccgagataaccagtgtcactatccgcaagcctaaatccggcgaattgcggggagttcgtttacaggtactgctggaaatggatgtcaactccatgaccgaggtgttaccgcgtatcaccgttcccactctgacaaaagatgaaatcggtgcgatggagccgggtgacctgctcaatatgtcaatcgcggtagtcaattttttgctgccgaagtcgatgcagaacaattacccccaagactga

SEQ ID NO: 275823 - DNA, 516 bp, Morganella morganii
atggccttaccgcataaactgaaaaacatgaatatgttttttaacggtgacaactggcagggtaaagccgaagaaatcaccctgccgaagctgacccgtaaacttgaggcttaccgtgcaggcggcatgaacggtgccgcacacgttgatttagggcttgaagatgatgcgctggggatggagataaccctcggtggtatggaagcacaactctataaacagtggggcattgccgaaattgacggtgtgccgctgcgattttccggggcctatcagcgtgatgataccggtgagaccatcgcttgtgaggtagtcgtgcgcgggcgtttatctgaaatcgacccgggcagtgctaagcagggcgataacactcaggtgaaattcagctttaaaccgacctattaccggctggtctgggctggtgctgatctcattgagattgatgttatcaacatggttgaaaaagtagacggaaaagaccgtcttgcagaacaacgcgccgctatcgggctgtaa

SEQ ID NO: 275824 - DNA, 1173 bp, Morganella morganii
atgtcacaaaaatatcaccacggcgtgcgcgttattgagcataataaaggtacccggccaatccacaccgtcagcacggctgttatcggcatggtctgcacctcagatgatgccgacgaggacgtatttccgcaggataaacccgttttactgacggatatccggcatgctattggtaaagccggtagtaccggaacgctggcacattctcttcaggccatcctcgatcagacaaacccgcttactgttgttgttcgtgttaacgcaggcataagtgaagaagtaacgacggcaaacattatcggcggtacctcaatcaccgggcaaaaaacagggatgcaggctctgcttaccgccaaacagcataccggcgtaaaaccccgtattctcggtgtcccgggtcatgataatcagtcagtcacatcaaaattggtcacggttgcacaaacattgcgtggttttgtctatgccggagtccacagctacaaaatcattcagagcgtactgaattaccgcaaaaacttcagtcagcgtgaactgatgctgatttatcctgattttctgtcgtgggattccgtcaaaaatgcagagactaaggcttacgcaacagcacgagcgctggggttacgagccaaaatcgaccaggaaaccggctggcacaaaaccttatcaaacatcggtgtcaacggtgtgaccggtatttctgcggatgtgtcctgggacttgcaggacccggcaactgatgccggtctgctgaatgaaaacgacatcaccacactgatccgtgaagacggtttccgtttctggggttcccgcacctgttccgatgatccgcagtttgcctttgaaaactacacccgcaccgcgcaggtactggccgacaccatggcagaggcgcacatgtgggcggttgataagccgatgaccccgacactcgtcaaagacatgatcgacggtatcaacgccaaaatgcgcagcctgacgaatcagggttatctgctcggcggtgagtgctggtttgatcccgatgccaacagcaaagaagaactgaaagacgggcagttagcgatcgattatgactacacaccggtgccaccggctgaaaatatcaaactgcgtcagcgtatcaccgacagatacctgatggatttcgcatcaaagattaaggggtaa

SEQ ID NO: 275825 - DNA, 144 bp, Morganella morganii
atgttatacgaacagacaacgaagaaaaacactgagattgactatgctgctatcaaagcagagaagaatgcaatgcttcagcgtttcctgctggcgaagaaaaaagccgaacagtccggtcaggttgtcactaagcctatctga

SEQ ID NO: 275826 - DNA, 504 bp, Morganella morganii
atgccgcgtcattcgcattacattttacatgatgaactacagggatttgatgtattcagatacacagatattagttacgttttctctggtgatgagacccgccggataaccttccggttagttttttgcaaaaatgagtcgaataataatattctttataaattatttggtgatgaactaattaccctcaccatcagcgttatcagtttttataatattgacgctgaaaataataaagaatgtgacaccatgtttgaaaagccgcccggcgcaccggatcttaccgcgtcagaggcactttacctttatagtacattagttgacatcattctccggatagctgaaactgaagatatccggatattaactttccaggcatacagcgaagagttacgtcgtgtatacgataaacttgtaagacgctatgccgccgccagaaatctggacacacatatagaaggggcttgttatgttatacgaacagacaacgaagaaaaacactga

SEQ ID NO: 275827 - DNA, 1032 bp, Morganella morganii
atgagtaaccacgaacaatgggttgatagtgtattaccctcccacaatcgcctgacagaatctgttgttaccatactgcaaaacttattaaaatcaaacaacattaattacttatcagtgaatggcaggacaaaaaataaaaaaagcatacttgaaaaaatagaacgtaaaaattaccagtcccctcaggatgaattaacagatttatcaggaatcagagtgattgtttactttgaatctgatataaagaaagtatcaaatattatagagtcatcatttaaggtggataaaaaaaactcactaaatcaagatgaaaaactatccaccaatcaattaggttaccgttctatccattacgtttgcgatattggagaaaatagagaatgccttccggaatttaatggcctcaaagatttaaaatttgaatttcaggtaagaacggtactacagcacgcatgggctgagctggctcatgatagcaactataaattcacagataaattaccatctgatatagagagaaatttatacttatattctggtatgttagaattaatagacaaagggttcaatgaactttctttaaaaattgatgattacaccaagaaggcgaaaaaagatatcgaagaaggcgtttttcataaaacattagattctatcaatttaaaagagttcttcctaaactgggcaaataaaaactctataagactattatcaaaaaaccatctagatataaatgaaataattaacgagttaaatgaatacggaattaatacaatagacgaactaaataaattaattccagagaactatgccgagaaaataaactcattaaatattcgaactaatctagcaggtagcataagagattggatgataattaatagccctaaaaaatataccaccaaagtaaaacacacttggaaactagaaaaaaaagacattgaggaatataaaaaaatgatgaatgatgaacaatacaaacagttcaaaaatgcattcaaaaatgaaataaatttcttattgaactga

SEQ ID NO: 275828 - DNA, 1017 bp, Morganella morganii
atgactattttattctgcaatatcggttggatgaataactattgtggtgaaaatgatgacaaaatagtaaacggtggttcttacgttgatgataccaactcaggacatgaagacagaaatttcttagcttttagcggttattattatggatatgtcagaaacagaggaaattcgttcgatttagaacgaatttccggcgaatctgatataaaaactccttatatcgatggtgtagacatcatctggacagcaaccaatcccgtatatggtaatgttgtcataggatggtacagaaatgcccgtgtattcagaatgatgcaaaaactggatagttacacagaaaaaccaagagctcattttgatgaagaagagagctattggttcaaggccaggacggagaactgcttacttcttccgattgaagaacggacaataagagttccccgtaatggtaaaggattaatggggacatcaccattctggtatggtgacagtcctgaaggcgcagactttgtcactcgcgtaaaaaatcttgtaaacctcagaacacccatcccgtcaaaagatgctccggatgatttatacgggaaatcagatactgtttttgctatttacaatagtacccctgaattacggaaaaagactgaaacttcagcaatagataaggcaacaaaatattacgaaaatctcggttatattgtaaaaagtgtagaacgtgataatgttggttgggatttagaagcgcggaaaattaatgagttattgagaatagaagtaaaaggattgtttggccttagcaaacaaatacagttaacaccaaatgaatataatcattttaaaaaaaacgaacctgattatcgcctctgcattataaacaatgctctttctgatgacgatttcggattgttcatttgttatttttcatctgatagtaacaactggaaaatagaaggtagtaaagttggcattgtaaaatacactgaatatatgtcagcagccgtacaacttattttttaa

SEQ ID NO: 275829 - DNA, 471 bp, Morganella morganii
atgaaaaataaaggaaaattcacccgctataccccggaaaaacccgttcatgtccgcgcaatacatctgagaaatgaacaaaatattgactggcaaaccattgtccgaaatgcggaaaatacgagtaatcaatattacgtattaacggatgatgacggacatatccgttctgtaaacacagatatcagtacattaacgccgataaatatgaccttgtgggaaataccggaatcagaattacccgccgatttcacaatatcatggtcagaaatgaccataatcaacggagttttaacacataaccaccatgtaaaagccgaacgggaaaaacaacgtttgctttcagaagcaaaaaataaaatcaccgtattgcagtatgccgtagatttaggtattgcgactgaagatgagttagcacagttggataagtggaagaagtatgtggtaatggaaatacgtactaacatctag

SEQ ID NO: 275830 - DNA, 1026 bp, Morganella morganii
atgatccccaaataccatacactgctgacgaataaaggaacggaaaaactggctgccgctgccgcatccggcgggcaactgaagataaccgcaatggctgtcggtgatggcagcggcacccttcccgccccgaaaccggaaaacacaaaactggttaatgaacagtatcgcggctcactgaatcagttatttactgacccggcaaaccctcatcatctgattgcagaactgattatcccggagcaacacggcgggtggtggatacgggaagttgccttatttgataacgatggcgatatgatcgccgtcggaaactgccctgagagttataaacccaaattacaggaaggctgcgggcgaacacaaattttccgtatggttctgatcatcagtaataccgcaaccattatccttaaaaccaatccttctgttgtgctggcaacccataaatatgtcaccgaaacactcgataaaaaaataaaggcgatccagagtagctgttcccgggattatcagcccaaaggcaattacgcattaaaaaacagcagttatacaaagacagaatcggattcccgctggcagccgaaaggtcgttatcaacccgccggtgattatctgaaaaccggcacctgttatacaaaaacagaatcggactcccgctggcagccaaaaggtcgttatcagcccgccggtgattatctgaaaaccggcacctgttatacaaaaacagaatcagaccagcgataccagcaggcgggatattatcagccttacgggcatagctattcaaaagcagcttccgatgaaagatatatctcttcagagaccaatattattaccaatatacgggtcggttcccgtgtatacctaggtccgcttaacagccctgcacatgtttacgctgaccgtattccgcagggtgcggtattaatcggtgcttatacagacggtgataaccggatcaccggcgtacattatgcctatctgcaatatcagatagacactctctggtgcctttttgagtaa

SEQ ID NO: 275831 - DNA, 531 bp, Morganella morganii
atgagtagccgcctgctgccgaccggttccagtccgctggaacttgccgctgctcaggcgtgcgcggaaatacagtgcgtgccggtaccgataaaaaccctggtcaatccggacacctgtccgctgcatctgctgccgtatctggcgtgggcatggtcggttgatcgctgggatgccagctggccggagcggacaaagcgggacgttatcaaagcgtcaatgttcgttcacaaacataagggcaccatcggtgcgctgcggcgtgtcgtggagccgctcggctatctgatcagcatcactgagtggtggaaaaccggcgaccgtaacggaacattccgcctgacggtcggcgtctcggaaaccggcatcaccgaggaaacctattacgagctggagcgcctgatattcggcgcaaagccagtcagccgccacctgctgggattgtctgtcggcctgaacagtcgcggagaatgttataccgcagtcagcctgtcggccggagatgaaataacgatttacccgcttacctga

SEQ ID NO: 275832 - DNA, 909 bp, Morganella morganii
atgccaaccatcgacatcagccagttaccgccgccggacgtgatcgaaacgttagatttcgaacagattttcactgagcgtaaagcggctttgctggcttcgctgccggaagacctgcgggaacgggttgcccgtgtgctgcaactggaatccgaaccgctgaccaaactgttagaggaaagtacctaccgggaattactgctgcgccagcgggtcaatgaagccgcccgcgcctgcatggtggcctacgcctacagagcggacttggatcaactgggtgcgaacaacaacgtgtcccggctggttatccgggaagctgacgacaccgtgatcccgccactgccggccgtttatgaatccgatgctgatttccggatgcgtatcccgcaggcatttgagggaatgagcgttgccgggccggtcggtgcgtatgtttttcatgcccgcagcgcctccgggctggtcgcggacgcctcggcaatcagcccggagcctgcctgtgtgaccgtcagcgtgctgtcacgcgagggtgacggtacggcatcgccggaactgctggctgtcgtcgataaggcactgaatgatgaaaatgtgcgcccggtggctgaccgcgtgaccgtgaaatccgttgagataatcaattacaccattgatgcggtgctttatctgttcccgacaccggaatctgaaccgattgaagcggcagcccgggaacggatagcgcggtatgtgaaagagcaacaccgtatcggccgtgatatccggctgtcagccatttacgccgcccttcatgttgagggagttcaacacgtcgaactgaaaagcccggcaaaagatatcgtgatcagcagtacccaggcatcattttgtaccgatgtgacagtgacggtcgggggttctgatgagtag

SEQ ID NO: 275833 - DNA, 342 bp, Morganella morganii
atgaaatattacggactaaacgctatgaccggcggacacatcaccgatattgagcatctccgccagtcggtacgcgacatcctgataacgccggtcggttcccgtattgcccgccgcacctacggttcactgctgttccgtctgactgatcagccggacaacaaagcgctgcgtctgcaactgatgtctgcctgctattccgccctgctgcgctgggagccgcggattcagattcagcaactgacgatttcgtccccgcagccgggcagcattgtgatcgacctgtccggggtatacgccggaaccggccagccgttttcctttttcgtgccactgaggtaa

SEQ ID NO: 275834 - DNA, 639 bp, Morganella morganii
atgagcgcaaacaccaaaatcgcggaactcctccgcctgatcagaaatatcatccgtaccggcgttgtcaccgctgttaaggccggtcgcggttgccgtgtgcagaccggtgatctggaaaccgactggttgccggttgtgacactgcgtgccggaaccgcccgcagtagctggatgccgtcggtgggtgaacaggtggtgatcctctctgtcggcggcgaactgaccacggcggttgtactgccggggcttttttctgatgaatatgacgaaccgaccgcttcactgacagcaaaccacgttacctacccggacggcgcggtgatcgagtacgaaccggcgaccggcgcactgattgcgaccggcatcaaaaccgcgctgatcgacgccgacgacagtattaccgccacgtcaccggttgttatcgtcaatgccagtgaaaatatccggtttatcaccccgacggttatctgctctgacaacctgacctgtgccacgctgaacgtgatgcaaggcggcgagatgtccggcagctttaaacacaccggcgggacattctcctcaaacggcgtggtgattgatggtcatgaccacggcggcgtagagcgcggcggaagccggacggatggtccgcgatga

SEQ ID NO: 275835 - DNA, 618 bp, Morganella morganii
atgtcagaaaatagtcttgatgccctgaatcatgaactcgccgggctgctggcccgggtcagcccggcagaacggaaaaaactgtcgcgggcgattgtccgtgatctgcgcaaaagccagatagcccgcatccgggagcagaaaaacccggacggcagcgcctatacccggcgtaaggcacagtttattaccgtgcagcgcgagatgcgtttcatctggcgctggcgtgagcggcggctgaagaactggcagcagaacaagcggctgatcaccggcaccgacattgataaaaatgcgcagcgctcattccgcaagggtgatattcagcggttcacggccattaaaaaagaccggataaaggtcaaaggcaaaagcaaacagacccgcatgtttaaacgcctggcaaccgtccgttatatgcgcgtgttctccaatgaaaacgaggcggcgatcttctttgcccctgccgccgctaacattgccgccgtacaccagtttggtcagaaagaacggttacgcaaccttgatattcagtacccgcagcgtgaactgctgggcttttcgcctgatgatacccggcggattgaagcggctattatcgacttcctcgcatcctga

SEQ ID NO: 275836 - DNA, 438 bp, Morganella morganii
atgaacaaactcaacagcattaaagacaccctgtgccggaaaatcccctacctgaaagcgaacccggaaaaactgtatctgttcgtggatgacggcggcatttttgccaccaatgaaccctccctctcctacgaatacatttacagcctgaatattattcttgaagcctttcccggtgatcagaatattgtgtttgccgtggtggtcgaatgggtgaagcagcatcagccggatattctcgccaacccggacaaacgcgccaacggcatacgctttgaggccgatattctcaacagtcagaccgccaacatcagcattgacctgaagctgacagagcggattattgtttctgtgcaggacggtgcgtaccgcgttgaagcggtgccggagccggaaaacccgatggatagctgggaatacctgaatgtcagaaaatag

SEQ ID NO: 275837 - DNA, 549 bp, Morganella morganii
atgacgaccaaagcccgcattatcacgctgttattcagcctgctgattgcgggcttattatcattcagtctgaagcattactacgacaaagccggacggctggccggtgaaaacgccgcgctgaaaaaagacctcgaccggcaggccgggattatcaccgcgcagtcatttgaatttaaccggtttaaccggatagcgcaggttgccacgcagaataatatcacgcagcgtgccgcctcggaggagcgccagattgaataccgcaccattcttaaaaacaatccgacctgtgatctgcctgtgcctcacgctgtttctgacggcctgctccgcgacacgcaccgtctacgtgccagcacaatgcaccccgctgccggactcgctgacaaaaccggtgccgccgtccctgccgcccggactctgacctactgcgaactgccgttgtggattgatttgctgatcgcggatctgaatgaggcaaacacgcaactggacggcatccgtgccgccgaaaaggcaagacagcatgaacaaactcaacagcattaa

SEQ ID NO: 275838 - DNA, 408 bp, Morganella morganii
atgtcacgaggtatccgaaataataatccgggcaatattgactatcacccggcgaacaactggaaaggtcaacttccgcacgataacgccattgagccgcgtttctgccgcttcagtgcgccggaatacggcatccgtgccattatggccctgctgcgcaactatcagcgcaagtacagactgaatactgtggcagatcttatcagccgctgggcaccgtccaatgaaaataacaccaatgcttatgtgagcggagtatcaaaagccctcggcgtttccccagatgatactgtcagcctgtcagacaaagacaccgcgatccgcctgacgaaagccattattcagcatgagaacggcagtcagccatattctgatgcggtttttgaaaaggcgtacgcactgttatga

SEQ ID NO: 275839 - DNA, 312 bp, Morganella morganii
atgaaaacgatgaaagaacactgggctgacattctcgacacactcaaaaacgcctggccgcagctgtccggcgtggcgatagccatttttatccgctatgcctgcctgatttatgacggcgacacccgtaaaaacaagtgggctgaatgcctgctgtgcggtgcgctgtcatgggcgattatcagcggcgcggagtttatcggtattccgaacggtgcctccggcatgattggcggcgcggtcgggtttttaggtgttgagaagatccgcgacattgcacaccgcatgattaataaacgactaggagactga

SEQ ID NO: 275840 - DNA, 204 bp, Morganella morganii
atgaatgtctttgcgttgcagggtgaaacccttgatgccctgtgcttccgggtgctcgggcagacggccggtgtcgttgaacggacactggaactgaacccggggcttgccggtcacggcgccgtgttaccgcacgggacaccggttgagctgccggatgtggcggagcagccgcaaaaaacaatgatccggctttgggattaa

SEQ ID NO: 275841 - DNA, 465 bp, Morganella morganii
atggacttcacatcagacaaaacaacagacataccggacgaaacactcaacagcggggattttttcccggatatcagcctgcgtcattatcagcaatccatgctgacggacggcaaaatcaccacagaacggctgcggcacgcactggtcaacgccataacggaagtcaaccgcgagctggcaggctggaaacagtcacagattgccgccgggtttgcctcactggaggcggtaccggccgaccacatcaataacgacagtgaactgatgctgctttaccgccgggcggtatacagcggggcaaaagcgacactgacagagcgttaccgcgacaccgacaccaccgacagcggcgaaaagaaagccgctgccctgagtgaaacggtggatgacctctggcgtgatatgcagtgggctatccagcgtatcaaaggtgaatcgcacaacatctgtgaactgatatga

SEQ ID NO: 275842 - DNA, 759 bp, Morganella morganii
atgggcggcagtattttccgccgtcatgtgatgcgggtcagtgcgcagcaggatgcacagcagcgcaacccgcagacacagaccggcacggcctacacccagatgacactgatgatgaacgctgaccgccgcaggctgaagcgcatccagtcatttgagcgcaaagctgctgtgaagcgggaaatgctgccgaactatgcaccgtgggtcggcggtattctggcttccggcagaggacagcaggacgatgtactgatgcgcgtgatgctctggcggattgacgccggagactttcacggcgcactggatatcgcggactacgccctgcgccacggcctgaaaatgccggaaaaccacacccggacaaccgggtgtgccattgcggaagaaatcgcggatatggcggaaaagatgtacaccgccaaaaccccggtcccgctggatgtgctgacccgtacccttgatctgaccggcgaagaagatatgcctgatcaggtccgggcaaatctcctgaaatggctgggctatgcacagcgcgatgacgggtatttacagcctgccacctgttcatggctgcgggcacttgaattatatgaccgtgtcggtgttaagcaggatttgcgccagctggaaaaactgatcgcaaaacagcaggaagaacgcgacgcggcacaacagaacgagccacagcgccggggcggcacagcggagcagccgaccggcttatccgctgtccaccgcccaccttttacggggtaa

SEQ ID NO: 275843 - DNA, 1089 bp, Morganella morganii
atgaaaaaagagacacgctttaaatttaacgactacctgatgcgactgtctgcactgtatgaagtgccggttgaggaactgaccagcaaggttgaaatcaccccgtcagtcgcacagacgctggaagataacgttcagcagtctgcggcattcctcggccttgtaaatattgtcccggttccggaaaaaacaggccaggttatcgggctgggcgtcggctccactatcgccggaaccacagacaccacaaaagaagatcgcgaagcgaccgacccgtctgagatgaccgacattgagtatgtgtgtcagcagaccaactatgacaccgcactgacctaccagaaactggatctgtgggcgaagttcaaagattttcagctgcgtatccgtaacgccattatccgccggcaggcgcttgaccgcatcatgattggctttaacggtacacaccgtgccaaaaaatccgaccgtactgcaaacaaaatgctggaagacgtcaatatcggctggctgcaaaaggtccgcaccgatgcagaagcgcatgtaatcagtgatgtcagagacgatgccggtaacgtgatttccgccgtgatccgcgtaggtaaaggcggtgatttcaataaccttgatgcactcgtgatgagcgccgttgatgaggttatcgacgaagagtaccgcgatgacactgaactggtggttatctgcgggcgcaaactgttatccgacaaatatttcccgctggtcaataaagagcaggaaaacagtgaaaaactggccgctgacctgattatcagccagaaacgtatcggcgggttacaggccgtgcgtgcgccgtacttcccggaaaacgccctgtttatcacccgtctggataacctgtctatttactggcagagcgaaacccgccgccgccacatcatcgacaacccgaaacgtgaccggattgagaactacgaatccgtcaatgaggcctatgttgttgaggattatcgcggtaccgcactgatcgaaaacattcagatgcagaacggcacccaaaagccggacacgccggacaccggtgataccggcaaagagggcggcgaataa

SEQ ID NO: 275844 - DNA, 840 bp, Morganella morganii
atgacagcaaaatcaaagccggtgcgtatctgtacagagggtgccaccactgatggccgcaccgtacagcgcagctggctgaccgatatcgaaaaaaactacgacccgaacgtctacggggcgcgcattaatattgatcacctcaacatgtcctatatgccgcgactgggggatgtcgaatcggtgtataccgaagagattcaggacggtgcgctgaaaggtaagttagccctgtatgccacgctgaaaccgaccgccgacctgatcgaaatgaataaaaagcgtcagaaagtgtacacctctgccgaaatcgccccgaaatttgcggataccggttccgcctacctcgtcggtctggcggtgacggataacccggccagccttggtacgcagatgttgcagttcagtcagaacggcgggaaaagtccgttcgaagatcgtaagcagtcgaaagacaacgtgatcaccctggcggaagagacattcattgagttcaccgacgacaaaccggaagagcctaaaggaccgtctctgttcagccgcatcgccgaaacactgagcggaaaaaataaacaggacgatgcccgttttcatgatgttcacaggagcatcgaactgatcgccaaagccgtcgaagccattcagacggatgttgccgcactgacaacaaccacgcttacagtggatgaaccagaagaaccggcggaactggccgcgttgaaaaaagaactcagtgaactgaaaacgcagctgagccggcaggataacaacggccataagcgcccggtgtcactcggcaataacggcacacagccggaagaactgctgacggactgctga

SEQ ID NO: 275845 - DNA, 1719 bp, Morganella morganii
atgcacctgtatttcagcggctaccgtattgcacggatcgcggaaatgctgggtgagaaagccccaacgattcacagctggaagcgccgcgaccagtgggacgacatcacgccttttgatcgggtggagttctcccttgaagcgcggctgtgccagcttatcgccaaagaaagcaaagagggcaaggattacaaagagattgacctgctcggtcgccagcttgaacgtgccgccaaaatccggcgctatcagaacggcggcaatgaaaccgatctcaacccgaaactggcgaaccgcaacgccggtgaacgtaaggccccggaaaaaaatgtgttcagcgacgaacagatcgaaaagctggaacagattttcacggggaacatgtttgagtatcagaaaaactggtaccgtgccggggcgcagaaccgcatccgcgatatcctcaaatcccgccagataggggcgacatattattttgcccgcgaagcctttacggacgcgctgctgaccggccgcaatcagatatttctttccgccagtaaggcgcaggcgcatgtattcaaacagtacatcattgagattgcccgcgaggtcgatgttgacctgaaaggcgacccgattgtcctgccgaacggtgccaccctgtatttcctcggtaccaatgcccggaccgcacaaagttatcacggcaatctttacctggatgaatatttctggatcccgaaatttcaggagctgcgcaaagtcgcctccggcatggcgatgcacaaaaaatggcggcagacctatttttccacaccgtcaagcctgacccacagtgcgtacccgttctggtcaggaaaactgtttaaccggggccgtgccaaagcggatcacgtggatattgatatcagccatgcggcattacgtgatggccgtctgtgtgaagatggccagtggcggcagattgtcacggtggaagatgcggtgcgcggcggctgtgacctgtttgatatcgcacagctgcgccttgaatacagcccggatgaatatcagaacctgctgatgtgtgactttgtggacgatatcgcgtccattttttcgctggaactgatgcagagttgtctggttgattcatgggatgtgtgggaggactttcagccggaactgtaccggccatacggacaccggccggtctggattggttatgacccagccaaaggcaccgagggcggcgacagtgccgggtgtgtggtgattgcaccgccggtgatgttcggcggcgcgttccgcatccttgagcgtcaccagtggcgcgggatggatttccgcgctcaggcggaagccatcaaacaactgaccgaacgttataacgtggaatacatcggtatcgacagtaccgggatcggccacggcgtctttaaatccgtgcaggagtttttcccgcaggtgcgggagttcgtctataacccggcggtaaaaaacgccctggtgctgaaagcatgggatgtcatcaacagcggacgccttgagttcgacgcaggagaccgggatgtcattcagtcgtttatgtctatccgccgctcaaccaccgccagcggcaaccgcccgacctatgaagccagccgcagcgaggacgccagtcatgcggatctcgcctgggcggcgatgcatgccctgtacaacgaacctatcacgggtgaaaacacccaacatcataatatcgtggagctttattaa

SEQ ID NO: 275846 - DNA, 1026 bp, Morganella morganii
atgagccgcagaaacaaaaacaaacggcataaacaacagaataccggcggcgtggaggcgttcacgttcggtgagccggtgtcggtgctcgacagccgcgagatttatgattacctggagtgtgtccggatggagcactggtatgaaccgccgctcagttttaacgggctgtccaaagcgttccgggccgcaccgcatcacagcagcgcaatctatgtgaaacgtaacatactgaccagcacctttattccccacccgctgttagaccgcaaaacctttgacagcttcgcgctggacttcctgatgttcggcaacgcttacgttgaagcgcgttacaaccgactcggcggcatcctgcggtttaatcacgccccggccaaatacacccggcgcgggattgacggggatcagtactggttcaccaaatacggctatgagagtgagccgtacccgtttgaacccggcgcggtgtttcacctgattgaaccggatgtgaatcaggaactgtacggcctgccggaatatctggccgcgctgccgtcaaccctgctgaacgaatccgccacgctgttccgccgccggtattatctcaacggcagtcactccgggtacatcatgtatatcagtgattcctcccagacgccgggtgatatcgacaacatccgtaaagcggtacgcagcagcaaaggacctggcaactttcgcaacctgttcctgtatgccccgaacgggaagaaagacggcattcagatcatgccgctcagtgaagtcgctgctaaggatgaatttctgaatatcaagaacgtcagccgcgatgacatgctggctgcccaccgggtaccgccgcaactgatgggcatcctgccgcagaacacaggcggcttcggtgatgtggaaaaggcggcaaaggtgtttgtccgtaatgaactgatgccgctacaggccaagatgaaacagcttaatgactggtgcggcggggaggtgatccggtttgaaccgtacacactggatgtgatcgccgggtaa

SEQ ID NO: 275847 - DNA, 1230 bp, Morganella morganii
atgtctcaggaagaattctcattatctcacgttgccgatttactcggagtctctaaagaaacgctccgtcgctgggacacaaacggaaccctcccttcaaacagaaataccaataacaactatcggttttatacaaaagatcagcttgaacactttgagcaatttcgtgcgttatctgaaagccaatgggataaagaaatcactatcacaccgaataagacaatgacagttttagagttattcgccggtgccggtggtatggctttaggtctggagctggcgggttttacttctgtcatgctgaacgaactcgataaacacgcttgtaataccctcaggaaaaatcgccctgactggaatgttattgaaggagatgttgctaatattgattttaccccctacaaagaccaggttgatgttttagcaggtggatttccgtgtcaggcgttctcatatgccggtaaaaaaatgggctttgaagatacccgcggtactttattctttgaatttgcccgggcagcaaatgaaatcaatccaaaagtcattctggctgaaaatgttcgcggtcttttaacacatgataatggtctgacattggaaacaatatcgaatgctatcgatgagttaggctataaattaataactccaaagatcctgaaagcaatattttataaagttccccaaaagcgtgaacgattaattcttatcgctatcagaaaagatcttgctgataaattagtttttgagtggccacacccttaccagcgtatcctgacacttaaggatgctctgaaaaaaggtgaattatacccaactgatgttcctcaatctgaagggcaaaaatatccggagcggaaaaagcaaatcttagattatgttccgcaaggtggatactggcgtgaccttcctgatgatctgcaacgcgaatacatgcaaaaaagttacttcctgggtggcggaaaaaccggaatggcccggcgtctatcatgggatgaaccgagtttaactctgacatgtgctccagcacaaaaacagactgaacgttgtcatcctgaggaaacgcgtccattgacagtcagagaatatgccagaatccagacatttccggataactgggaattcaccggcccaatgaccgccaaatataagcaaattggcaatgctgtaccggtcaatctgtcatatgcaataggacgttcggttgtagcaatgttgaatcagttaccttga

SEQ ID NO: 275848 - DNA, 738 bp, Morganella morganii
atgggtattattaaaatggcttatttaacatatgtcagcgatgatgttttggtaagagaagttaaatttctattagataaagcattaaaaaaacgaaaagatgctgagaaatcatttaataaaaatgtgatagaccccttcggtgcattatttgaggctcctgcattcaataatcatgctgaatggaaaaatgccgaaatggctcggcagtgtcaaaaaaccattcaaaatcatgttggtacattccaccaacgtatcttaggtagtgtcgacggatgggaagatcttggtgtcggtggcattgttgaccttgtcaacaacggtaaaaaaattattgctgaagttaaaaacaaatattccactgtaaccggtggtaatctggcagcaatgtacaattcccttgatgcgcaagtttcacctaaaaacagccgctataaagattataccgcctatttcgttaatattatcccgaaacaccctgcccgttctgacgttccttttattccgtcagataaagaaaaagggcaaaaatgtcatgaaaatgaaaaaatcaggtgtattgatggtgcaagcttttataccatcgttaccggcagagaatccgctcttagtgaattacattccgcactgccggaagtaattgaacacgtgtatcgaaataattacggtaaaacagacttttccatacctgatccggctgagtttaccagctattttcacctggcctatggtgaataa

SEQ ID NO: 275849 - DNA, 300 bp, Morganella morganii
atggctgccgcgcattctaatttagcaaatccgaaaaataaacctgaagtgtcagaacgttactatactgtggcctatgtctcacgaccgaaaagctatgaacagataccggcaatcaccctaaagggcgactggctgcgggctgcggggttcgatacgggcaaaacgtttcgcgttaaggtgattgatggttgcctgacattaattgccgatgatgatactaccgagcaactgaagaagctgtgtaagcaacaacagcggcagttgcgggagattaaaaggagtgtgaaggcggtctga

SEQ ID NO: 275850 - DNA, 285 bp, Morganella morganii
atgaataaaaaatccattccgtgggaaggtgcccgcaaaaatattttgtccgacccggaagtgaacgcgatttatgaagcggagctaagggctgaacgaatccgcgaacagttactgtcatggcgcaacgctgccgggctgaccagctcacagattgcggcacgtctcgggatcacccctgcggcggtatcacggacagagcgcaatgcagaaaaagcgactgtcgaaacactggcccgctatgctgccgcttgtggcgttaaagatcctaaaatcatgttgtaa

SEQ ID NO: 275851 - DNA, 321 bp, Morganella morganii
atgtctgagattaagatccacccggacgcactacaggaattgcacgagttaccagccccgcagcgggctaaaatgacccgacaggttgataagctatcttcgtacagcacatcactccctgaacctgctcctcagccagccagagacggtttctttgaattgcggataaaagccggtgatattgatcatgagatctatatgtaccggaaaggaaaacagatttttgccctgaaaatctttgcaaaaagtaccgcgaaacttccttcatccatgttaactgccgctgcccggcggttagaggagatgctgtacgatgaataa

SEQ ID NO: 275852 - DNA, 981 bp, Morganella morganii
atgctaactcatataaagaaaaatctaccaactatttctggctttatatttttcttgacaattcacggaatatttattttaggtgtgtatgcaaaaaataacaaactaccgttttatgaattaattacatctcaaatgcttatatctattggtggcgcatctgtttttataataatattttctgttttttatcttattttattttcttttataacaccttttttatctgaaatgctatttggtaagatttcattagtcagtaatattgataaaagtctatatttattatactcgctaatcatctcgttttctttctatgttttttctttggatataaatgagttattcattcctatcgcaatagctttgctagctttcatacctcttaaaataatcatcaattacaaagcaaactctattttattctttataaaattcatcccctttgtattcatgacaaccatttctcttattttatttggatttatatttatcataataaatgatgtcgcagataccagatattataatttatttttatctattatttactttattagtctaatcattccagttcgttcttcatggggaattgtaaaaaatcgatttgagctaaaaacaacttctgaaataaaacatgagaatatccttcgtcatgagtcaaatataagatacatcaaagcaatcagtataagtgttattttcacacttccactatttacaaatgaaagcagtgctgtaataaaattcataggtgttggtaacgaaaacagatgttattattcagaggatatttcgaaatataaaataccaatggatttaatagaaaaatctaaggatggaacaatatctaaagtatttgttattgctgacatttcaaataaaatgtatttaggtaaagacagcaaaatgaacgatgttggatttcaatactccttttactatgaaagtataaatagagtaaagtgtgttacacattaa

SEQ ID NO: 275853 - DNA, 2664 bp, Morganella morganii
atgaaatcatatcacttgcaggcactactgccgcgcctcatcaacgactttcagttcaaagaactgaacggctatttacggcagggtgtctgcccgaactgcaaaaagaaagaactctttacctctgtggaaatgccgtttgtgctgcgctgcggccgcgaaaataagtgcggtgccgagttgtttgtcaaagaaatgtacccggatgtttttgatgactggtcagcccactatccgaagacagaacaggccccgaacgcggcggcagatgcctatttgcagcattcgcgcggactggatatcagtaccctgaaagggctgtacacggaatcatcttatcatgctgacggactgggcgcggcaaccgttaaattccccctgccgaatggcgcgtactgggagcggatcatcgaccggccatcccgttttgaccgcaaagctaactttttcggctcgtataaaggctactggtggcagcatccgaaacaggatttaacacaggcgaaagagatctggctgacggagggtattttcgatgccctgagcctgattcagaacggcattaccgccatttccctgatgacctgccacaactacccggatattgccctgaacgcgctgagggaagccttgggcgcagagaaaaaaccgttactggtgtgggcgctggataacggcagtgccggtgaacgggcgatgaaaaaatttgtttcccgcagccgtgatgagggctggcgtgccactgccgcacgaccagcggaaaccgacaacggcaatgactggaacgacttacacctcaaagaacgtctgactgaacgggatctcggccgttaccgctattacggtaaattgctgctggccgcatctgcgtttgaaaaagcccggctgatgttcaaccagaccgagcgatcagaatttgattttcagcatgataaccggctgtactggtttaagctggatgtcgataagatgatgaaagcggttgagcgcataagcgaagccgagccggaactgacggacgaagacgcccggcaaaaagcggtgaaagaatccggcaccgtcgttgagatcgccaactgctatcccacaccgctgtatttccagaaatccgttgaaacggatgaatcctggtattatatccgcgtcgatttcccccatcgtcaggcatgtgtgaaagccacctttaccgccgcgcagctgaccagcgccggtgagtttaaaaaacggctgctgcatgtggcaaaaggcgcggtgtataccggtaccaccctgcaattagaccgcatctgtaaacaggcgctgccggatatcaaagaagtgatcacacagaattatgtcggctacaacaaagagtacggcgtgtatgtctttaatgatgtggccgtgcagaacggtaaatgttttaccctgaacgaagaagactatttttccctgaataagctggatatcaaaaccctgagtttaagtccggcgttatcaatcaataccgatttaaacgaatttgataaccgctggcttgattctctctggagtgcgttcggtgaaaaaggctatgtggtgctggcgttctggctgggttcgctgttttcggagcaaatccgcaagatccacaaaagctatccgtttctggaaatctgcggcgaaccgggttccgggaaaagtaccctgattgaattcctgtggcggctgtgcggccgtgcggattatgagggctttgatgcgtccaaatctagtgccgccgcccgtggccgtaacttttcgcagatcagtaatctgccggtctgcttaattgaaagtgaccgcgttcaggataatgcaaaattaaaagcgttcgattgggaggagctgaaagccctgtataacgggcgtgcaacccgttcacttggtgtaaaaaataacggtaacgagacctatgagccgttattcaaaggcagcatcatcattgcacagaatgcggagataaacgcctcacgcgccgttctggagcggattatccacctctacaccgacaaagccgagcagactattgaaacccgccacgcggctattgcgctggaacgctaccctatcgaaaaactgtccggattcctgccgctggtgctgatgaaagaagatgccattttaacgcagtacaccgcccgggtggatgatttacaggcgaaactgttcgctgacaaggcgattaaccatgaacgtattgccaagaaccacgcccagctgatcgccctgctggaaaccgtgtcgctggtactgccggtgaaagctgaccgaatcagaaaaacgcgggattttattgttgaactggcaaaacagcgcgttcaggccatccagcttgatcagccgccggtgatggagttctgggaaacctttgattatctccaggacaacgaagcccacggcgtgaaccacagcaccgaaccgggcgtttatgcggtgaactttaaccatatcgcacaggtggcaagtgaacagcggcaatccctgctgctgaataccgatatcaaaaacctgctgaaagccgggaagatgcgtaaatttatcggtatcaaaaccgtaagaagctgtgtaaacagtatgtacaacagttgcttaccgatagccagtacagcaaaaaagccggaagtggtgaaatgctgggtgttttatgaaaacagtaatatctga

SEQ ID NO: 275854 - DNA, 222 bp, Morganella morganii
atgtctgattcaattgctcccgccaatgattacaccgcattaatgctggcacggcaacgcgccgttacccgccataccatgatcacagtttctgcttttatatgcgaagactgtgacggtccgatctatgaagcacgccggaaagccatgatgggatgctggctgtgtgctgattgtcagactatcgcagaactgaaaagtcgccactaccgaagcgtctga

SEQ ID NO: 275855 - DNA, 222 bp, Morganella morganii
atgacattattccctaaacctttatttattccgattaccgaacacataaaagctaaccgcgaggatgaaagaaagtccctgctgaatcggtttgccgatcgtcagcgcaagctggcctgcaaaatcttaaatgaaaaaatggattatgccgtaacttatcagttactgatggatgatgccgaccattttgagcatcaggccggagggcttaatcatgtctga

SEQ ID NO: 275856 - DNA, 204 bp, Morganella morganii
atgaggaaaataacaatcaatttttctgttggttccccctatgtttcccttgatgaatacgccaggttaagcggcatccctttaaacacttgtcgtgcaatgataaatcgtggtcagattattattcgccccaaatcaactgcaaaggaaaaaatacaagttaatatgattgccatgttaaaagatgctatcgataacagctaa

SEQ ID NO: 275857 - DNA, 342 bp, Morganella morganii
atgagtttaggtgatcgaattaaggaagagcgcaaacgtttaggattaactcaggtgaagtttgcagagtgtgttggtgttcagccaacaacacagattaactatgaaaaaaacacacgtatacccgatgccgtttatctggagaaagcagacggaattaattgcgatgttttatatttggtcacaggccaaaaatctcaacaattggatatatccgcagaagaacaggtgctccttgataattaccggttaatgtctccggctgcacggctgaatgttctggcggttgctgctgcctttgcaaaatcagagtctccggaaaacagggagcaggggtgttaa

SEQ ID NO: 275858 - DNA, 996 bp, Morganella morganii
atggctgtaaagaaagcaccatcaggaaaatggatttgtgattgctacccgaacggccgtaacggtccgcgtgtgcgtaaatattttgtcactcgtggtgaggcgatggcattcgaacgaaaattacagcccggcatctctgctaccgggacagtgaaagaatcaatgaaactgagttcactggtggatcgctggtatgaaatgcacggaaaaacactcaattccggacattcccgtaaatctacactggatgctatttgtcagcggttaggtgatccctgttcttcagattttgacagaaatatgtttgctgtttaccgggaaaatcggcttaacggaaaatggaatgccaaaggaaaatcatcaccgaagcaggcaacggttaaccgcgagcaatcctatttgcatgcagtatttgcagaattaaaacgcctcggggaatgggaaggggacaacccgctcgacggcatccggcaattcagggaaggtgagcaggaactggcatttttatatgaggatgacataaagcggttattacatgcctgtgatacatcggcaaataacgatctcggcaatgtagtgcggatttgtttagcgacaggggcaaggtggggtgaagctcaattattgaaccagtctcaggttatgccttacagagtcacgtttactaaaacaaaagggaataaaaaccgcacagtcccgatctctccgaaactatttgaattactcccgaggcggcgcgggaacttgttttcaagttgctatgatgcatttgaaggcgcattaaaaaaagccgacatcgtattaccaaaaggccagcgaacccacgttctgcgccatactttcgccagtcattttatgatgaacggcggtaatattttagttttacagcaaatactgggccacagcaccatcacaatgaccatgcgttatgcacatttcgcaccggagcatttagatgctgctgttagtttgaatccgtttgatagagtgtga

SEQ ID NO: 275859 - DNA, 1206 bp, Morganella morganii
atgaaaattagtaatgtaacatttaaaggattatttaatagattggactataatctccattttcatggggatgaaattaatatcctgacagggcctaatgggtatggaaaaactattattttaaaatctataaatgcaattataaatgctgaccttgatttttttgaacaagttgatttcaatgagttctctattgattttaataacgtgagtatttctattcataagagtgttaatttatatattcaagtgagtagtatttatgggtatgagaatattatatatgaaagaaacctagagttagatactagtaaatataaagaatctatatctgatatggaaataaagtggagtgaaatgaagggggtttcagaatcaaggaaaaaagctgagtttactttactcaagcatatggatgatttaagtgttctattcattagagatcaaaggataaaagtaggcgctggagcttctaatgaaataatgttgacgaaattagcatcagatcttaggggtaaaatgcgaagttgtattttacagtcaaatagcataggtcagagattagatgcctcttttcctagacgattattagagttagagtataatgttaacgtatcaatgattgaggaaaaattaaatgggttaaagaaaataagaaaagaatatattgattatggacttttagatgatattgataatttgaatattaatttgggtgaatttaattatgtgacaagaagaaataatagtaatgttttagagttatatattaatgatagccttgagaaatacaagccattttgggatttaaccaaaaaaataaagctttttattagcttgcttaatagaaagggattggctttcaaatatgtaagtgtaaacaaagaattcggtttcgcttttttcgataatgataatgatctgattgcattagataaattatcatctggtgagcaaaaccaaattattatgttatataatttaatttttttaactaatgaagatactatagtattagttgatgaacctgaaatttcattacatatcgcatggcaaaaagaggtttaccagaacttagaggaaatacttaaaatcaatgaaatacctcatattgttatggcaactcattcaccaagtgttatcaatggtaattgggataaaagtatcgatttatatgagttagctaaccaaaatggtgtattttaa

SEQ ID NO: 275860 - DNA, 897 bp, Morganella morganii
atggtgtattttaatatgggctcattacgtgaggaagaaaaaaaatcatcttgggtcgataacaatagactgctctttaatcatgagtcatctaaggaaaaaatatttattcttgttgagggggatagtgatagacgtttcttttataaaatatttaacaaatatactaataaagtcgtaattgactctccggaatcagggaaacctgaagtaattaaagccgttaaagatataagaagattaaatcacagtaacatatatggtatttgtgatacagactttgattatttaatagggaatgatgattatagtgataatgatattattctattcactgattttcatgatttagaaataactattatatcattaggtgtttttgatgatatttataacgaatatactatatttgatagcttgaagccggaggatgcgtctacgctaaagaataatatatttgattctgcttataaaattggaatattgaaattaataaatgctcaaaattcattgaatttaaattttaatactatcagacatagccggcatgttcatgctgatggagttaatataacagttgatattgaatcaataattgaccatctaatatcatgcagcagaggattcaataatcagttatttaataaagaaaggatacttgatatatataataccttgatgatagctggtcacgatgaaaaacatgtgtgcaatggtcatgatttctgtgaaatattagcgttatgttataaacaagatttttcaagagataaacttttaaatagagctaaattagaaagcgatcttcgtattgcgtgtactttagaaagatttagaggcagtattttgtactcctcattgagagagattcttataagacatcatgtggtacaatag

SEQ ID NO: 275861 - DNA, 1179 bp, Morganella morganii
gtgcctgatgaagtacaggcagacggctcattgtcttacactcagggctacggttacgattatgaacgtgaccaggcgaccgatccggcggccaaagatattgaacgcgagaagatgaacagtatcttccatgatattaccggtgcggtcggggaaatacaggcgttcggtatgccggtgtgggcggaagaaggtaagccctatgctatccgcagtatcgtgtatcacaataaaaaagcctggcagtcaaagattgaaaataataataccgaaccggctgccggtaccgcatggacggaactgaaagctgacctgaccgccggggaggtcggagcctacaccaaaggggagagtgaccagaaatttcagccgctgggtaattacctgcccgctggttacagctattcgaaagctgaatctgacaccaatttccagccgaaaggcaactacgctccggcgggtaactatgctctgaaatctgatgtttataccaaaacagagggggacggacgttatcaggcaaagggcaattatgcacctgcgggtgactatgccactaaaaccgacctgggtttaaagctggataaaacagcagtgacacagacaaccggtgcgtcatcaacaagtacgatgagccagaaggccataacggaggcactgaaaaacgccgttaatattgacactatttacccggtcggtgtggtgatctggtttgcgcagaacaagaacccgaacagcctgtttccgggcaccaagtggtcatacatcggggaaaacaaaaccatccggctggcaaacagcagcggtaataatgttctgagcagcggcggcagtgacagcgtgacactgacaaccgcacatttaccggcgcacagccatagtttctcagggtctacatcaagctttgattacgggacaaagacaaccaatagtacgggggcgcacacacatacatatcaaacactacaataccagaaagggaatagtcacgatgttggaggggggaactctggctatgagacccgaacaacttcaagtgcgggggctcatacccacactatcgctattggagcacactcgcacactgtttcaggtacaactggaaatacaggtaatggctcgtcagtatcagttattaatgcttatatcatgctcatggggtggtacagaatagagtaa

SEQ ID NO: 275862 - DNA, 507 bp, Morganella morganii
atgttgaaatatctttattatttattaaaaaacaaaataacgccacgccaagcggtaatattttttaatacttcaacattatccagaaggaaaagaaactcgatattaataaaatctggcttccatgcagaaaaaaacgcttcaattacatcccctatatattttgaattcggaaatgtaaaattaattggtgatgtattcattaacgcaaattgtaattttttagataacgcattaatcacaatagacgataaaacaatgattggccccaatgtgactatatgcacagttaatcattttgcttcccccgaaaaaagacatgaagacaacataatacaaccagtcaaaatcggtaaaaacgtttggataggtgcaggagctgtaattttacccggagttaccgtcggagataacagtattattgcggcaaatagtgttgttaaccgcaacgtgccagctaactctctctatgccggaactcctgcacgttttatcaaaatgttatga

SEQ ID NO: 275863 - DNA, 186 bp, Morganella morganii
atgatgagatgcccgctttgcagtaaccccgcttatacccgcagttcccgcgaattcaccaatgaaaccaaagaacgttataaccagtgcaggaatatcaactgcggcgcaacctttgtcagtcatgaaacactggttaaatttattacaaaaccgcagatcattgatgctgtggaaccacattga

SEQ ID NO: 275864 - DNA, 855 bp, Morganella morganii
atgaccgatttcttcctcaccggcagtgaatgcgccccggcgtattcgctttctgccgggtccgtcaacatcaatgagcggattcaggggcggcttatctcgctgtcactgacgggcaaccgcggatttgaagccgaccaactggacatcgagatcgatgatgccgactgcaaaatgatgctgccgaagcgcggcgaggtgttatcactgcacttaggctggaagaacgaaccgctgatttttaagggtaaatttaccgttgatgaaatagagcacagcggaccgcctgacaagctgaccatacgcggccgcagtgccgatttccgttcgtcactgaacgcaaagcgcgaggtttcctatcacgaaaaaacgctgggcgacatcatcaccaccattgcaaagcggaataacgtggagccggtgatcgaaaagaaactcgctgagattaaaatcgcccatatcgaccagaccaacgaatcagacggctcctttctggcgcggctcggcaaacaggagggggctgttgcggccataaaaaacggtcaactgctgtttatgccgcagggcagcggaaaaaccgcgtccggaaaaccaatcccgccgctgttcatcacccggtccgtcggtgacggctaccgcttttcactggccgaccgtggcgcgtacaccggcgttattgcctcatggctgaacacccgcaagccgaagaaaaaaacagggttaaaaatacagcctgacgggctgcaaggcagctatctcgccggagaggacggtaatattctgacgctgtcacatacctatgccagcaaagccaatgcagaacgtgctgcaaaagccgccctgaaaaaatactga

SEQ ID NO: 275865 - DNA, 666 bp, Morganella morganii
gtgggaataaaaaattatttcctgaactacacccttgtcgggctgatttataaaaaccgggacggcatcaaaaaatacatgtctgatctgtgggaaaccgtgaaaatcaccatcaaaaccaagtgggatcaagtcatcacggatattaagaacctcccggccaccatgaaacaggctgcatctgagattgtactcggcctgttcgtgtttgagctgcgaaccgtgccgtttcagggaatgcaggaagaaaaacaataccgctttgcgtataacaaccgggtcggcaagcggccgtcctggcaatttttggggctgtccaatgatccgattaccctgtccggcacactctgcccggaaatcagcggcggtaagttttccatgatggcgctggaagccatggccgacagcggtaaagcctggtcgtttatcggcggcgagggaaccatttacgggatgtatgtcattgagtccatcagcaaaaacaaaagtgagttttttcacgacagcgcggccagaaagattgatttcaccatcaaactcacccgcgttgatgaatcgctgtcggagatgttcggtgatatcagtgcgcacctggattcactgagtgatacggccgccactatcggaaacaacattgctgacggcatcacggggttactgtcatga

SEQ ID NO: 275866 - DNA, 777 bp, Morganella morganii
atgctctgcttacaaaagattgaaaataataataccgaaccggctgccggtgttgcatggacggaactgaaagcggatatgaccgccggggatgtaggggcctacaccaaaggtgaggctgatcagaaatttcagcctcttggtaactatgctctgaaatctgatgtttataccaaaacagagggggacggacgttatcaggcgaaaggtaactatgcgccggcaggggactatgctttcaccgcagatctggaaaagaaaccagacaagaacgcggtgactcagacaaccggggcatcaacaacaaacaccatgagccagaaagcgattactgatgcattacagaataccgtcaatatcgatactatttatccggtaggtgtggtgatctggtttgcacagaacaagaacccggacagtttgtttctgggtacacaatggtcatacatcggtgaaaataaaaccatccggctggcaaacagcagcggtaataatgttctgagcagcggcgggagtgacagtattacactgacaaccgcacatttaccggttcatagccatagtttttcagggtctgcatcaagctttgattatgggactaaatctgggccagttggttattcaggagatcattatcatcaactatggtcagatactatcactgaaacacaaggacagacggtagggctgggcggcagcaatggatatttggcggtaactggctctactcatgggttcacattcaccgggctatttgtcagtaaccgggtcaaataa

SEQ ID NO: 275867 - DNA, 945 bp, Morganella morganii
atgaattcattggtaaaagaaaatataaatatttttttggggcaatgcgatggtaataacttgcatatcgcattcgctgttgatgataatttcattaagccagttggtatattgataacttcgattgtctataacaaccctggccaatgttttcattttcatatatttactgcgtctctttgtgagggtaatttagataaattaaggcagataaatgttggtaattcttctcttactattcatttatttgatgaggaaatattcgtaagttaccaaacattaaagaacttaccatcttcaatgtattataggttaattattccggctattttgaatggtgtaaccagtcgtgttttatacctggatgccgatattgtatgtaacggaagtatagaggaactagttaataaggatattagtaattacattatttgtgcgtgtttagatcctgcggttattactaatcatgataaacatgtatcaagcctgggtatagatagaaatgattgctattttaactctggggttatgttaatcaacattgatgagtggaataaacaaaatgtgttatctcgttttaatgatcttatccataagagggaatataaatttcctgaccaggatgtattaaatattgttttacaacataaagttttattactggatgagaaatttaatacattttcatctaatgttgaaaattataataaagctgcttttgtgcactttgcgggtgaagctaaaccgtggacaattattgcaaacagaaatgatttgtatatgaaatattatgatttatcaccttgggggcaagaaggtttattaatgccaaggaatcataaagaatgtaaaaaatacgcatctagtttatggaaggaatatcgttatttttatggtgctttttggttttttaaatatttaataaaaaaatattttagtaaataa

SEQ ID NO: 275868 - DNA, 330 bp, Morganella morganii
atgcaaaataaatacattatgacgattttgattagtaccttactgtcaggctgctctgcgtttgaaaataatcacgggattaattggggaagtggtacttgcccggagccatccactgatgaaattgcagcgtcagggcatcttaaaatcatggatggcaggacactgaaatgtcagttgcacccttatgtcagtaacatggcctgtcagggtattacggacagcacgaacgcagacggcatggtttgtcaggatgcatcaggaaagggaatgttatttatctttgatgacaacggagtgctcaaaggacataagtcgctgcagaattga

SEQ ID NO: 275869 - DNA, 357 bp, Morganella morganii
atgaaaaaaagtttatttttaattttgggaattatgctgattgttggctgtcaggtaccggcaaaaaacagagcaacagacgggatgtctgaaaaatggggaaacagccttatccgttattctgccgggcaggcactgacaaccactgacagcaaaaaaacaattaccgataacgcgtataagaattgtaagaaagaaatgaatgaagcggtggatatgctggttgaggatatctcagcggatagcgcaaccaaagccgccgcgagaaaaaaagcatttgtgatgatagaagaagggtacagacaagagattgttcctgagctctataatgctattgatgaagtcagaaaattataa

SEQ ID NO: 275870 - DNA, 168 bp, Morganella morganii
atggaagatggtttaatggttattgcggggctggcgcttgttgccgcagttgcaggtctggtaaagccttctcttgtggggatgaagagccgtgttggtgcggtattgggttatcttattattttcattatttttttagtacccgcgttaatactgatgccggactga

SEQ ID NO: 275871 - DNA, 369 bp, Morganella morganii
atgaaaaaaacacttattctcactgctctgttatccggcgttatgacattcggggccgtggcaaatccggtattgttaagtggagatatgcatgctgttaccactccggtgcagaaagagttgggtgattctatgatgcgtatgcatgatgatatggcaaaaacattatctgagcaaaatgcggatattgcatttgctgaaggtatgattgcacatcataaaggggccgttgaaatggcacaaattgaactgaaatatggttcagatccggaaatgcgtaagttagctcaggacattattgatgcccaggggccggaaataaaacagatgcaggattggcttaaaaataataatccagcaaagaaataa

SEQ ID NO: 275872 - DNA, 726 bp, Morganella morganii
atgccggatccggagattactgtattttttacaaaatatcaggtgtcaaaaaaatgtcctgagttttcccgtctgcaatggctgtccgatgccgccggacgtgcgaaacaactgtcactgacgacacatccgtttgcttttacacatccccgtgcccgcagaaatcgctatggcaaagcgggtgcggtactggcggaggttaaaaagaaaaatgatggttttctgcggtccggtaatgtggttgttccgccggatgctgagggtaatgccgctgcactggacatatatacgtttctgatgctgaaaatgcaggatggaaaaacaatactgacacatttgtgtgaggaaagtgaaacggcaaagaaaattctcagcagtgaaaattaccgggagctgcgtgccggttttttacagatattctccgaggataaaataccagtaacaaactctaagataaagcaggttttttttcctgtgccggataaagaatgcaatgcgggttatcatttactgtcagtactgactccgtcggggttattatttgagttataccgccggcttggtaaatccggtatattcccggggcatcttgttgtcattcatatcggcgggtctaaaccacaaaatatttctgcgcttaatatgcaaaataaaggaaaagcctgtttattattatccgtcccgccgggagcagtcactaccggaggtcgtcacaatgtccattaa

SEQ ID NO: 275873 - DNA, 822 bp, Morganella morganii
atgtccattaattatctgctgctgaaaaatattcttatccggaatgccaatgcgttatccggtgcactgatagccggttttccggcagttactgcctggctgggatttattcatgcgcttgagcgaaaagtgaggaaaaaagggtttccgtccgtcaggtttaatcacaccggtattatctgtcaccactgccatttacaactgtatgccgaacccggcggagtaatatattccgcattaaacaggcgtaaaccgccggataaaaaaggcagaaacccatcactggttgaggaagtgtattgtcatctcaacgtttcactgcttatttacggcgggaatatacaagataagaataaggaattcattactgtggtatctgaagcaataaaaatgctgaaaattgccggtggcgatattacagattcaggtaaacaggagaccggcccttttcctgacagtaaaccgcgatggtgtgaattacggcaatgtattgctccgggatatgcattactggaacggcgggatgtcatggtcaatgcaatgaacagcggaatggatgcaatggcggcattactgaaatataccactgctccgggtacagtgctgatcccgatcgtcaccggatatcaggggctttccccgccgggaatagcgaaaaatgtcagggcagaaggtataccacaccgttttgcggaaagtgttattactttaggggaattccggccggtagataaactgcggcatccttcggatatgttgtggggttatcactatttatctgacgggaatctttatctgtgtcagcaaggtaaacacgattaa

SEQ ID NO: 275874 - DNA, 1017 bp, Morganella morganii
atgaccggactcaggaatataccgtctgttttatcattttcaaaaaaactgatcccctctgacggtattttttccggaacatcacagcatccggattcacgggttactccgctgacaatacagacgagaactgcccgggggacatttgctttccgccggaaaaaccgggggaaagaggaaaaaatatccggacaaaaaattcatgatcctaatatccggtctatggattactgcatgctgggagctgaacagaatgtgattttattccggttcacactgaagattaccggcgggctgaaatatccggctgcctgtaataatgaaatcttccgtcagcgctatcaggcagtaataacggattatctggaaagagaacattgccgggagcctgcgcggcggtatgcacataatattgcctgcggccgttttttatggcggaacctggttggcgcagagcatattgaggtggttgtggataatctcagtgcggaaaaaaaacagcagtggatatttgatgcacgaaagtacagccttcgtcattttgagcagacggataatatagccggcgacctggggagacatattgccgcagcactgagttgtgatgatggtgcattattactggctgtttcagccagagtgataaccggaaaagggcaggaaatttatcccagttgtgaatttgtgatgaataaaagaaagggggggagcagccggatactctgccatattgacggcactgcagggatgcattcacaaaaaatcggcaatgctttgcgttcagtggatacctggtatccggccttttctgatttaaccgcaggggcgggcgttatcgcggccgatccctatggggcggtcacgcatctgggggcagtatttcgtccgccggggtcagggcaggatttttatacactatttgaaaaatgggtcagcggaaaaaaactcgctgaacatgaagaaaattatgtcgtggcagtgttaattcgcggcggtgtgttcggtggcggagggtaa

SEQ ID NO: 275875 - DNA, 558 bp, Morganella morganii
atgcgattttatcagacaatcacgattttgccggatgtgcggatatcggctgtatttctccgccagcaaatctggcggcagcttcacctgatactggcagagaataaaaccggtgaaaacagcagtgctgttgctgtcgcatttccggattactgccgcaagccacagacaccggggaaccgcctgcggttgctggccggggattatctttctctggcggaattggggctctctgtgcggttatctgctttttacccgtatatccggttaagcgggatcttacctgtaccggaaaaaacgttaccagtcagttacatccgtgaacatgtaaaagggttgcgccgttctcaggctgcggaggccgggcggttatttattccggaaacgctgccgtttatctggacgaaatcgctgtcaggaggcagacatcaccggccatttcctttttttatccggaaactggatgcaaaatctgccgcagaagggcggtttacctgttacggactgagtcaaaaaaggactgaaagcgggaaggtggcaacagtgcctcacttttga

SEQ ID NO: 275876 - DNA, 330 bp, Morganella morganii
atgactcagccttccggacaaccggcaatccgtatcaaaatctgccgcgccaggttatccgaatcgttcagttcaccggtagacgcaacgctggacgatggccgggcagtaaccattcccggtatttatttccagcgcaatatcggcctgagttttaacgacagaaccggtattctgcacggtacaccaacagaatacggtgagtttccggtgcgggtggtatgggagccggtaccgaaaaaacggttttcctccgcaacagtaagctgcccgcccctgcctgttgaagtgagggggcatttccggcagtgcattatttttttatcataa

SEQ ID NO: 275877 - DNA, 720 bp, Morganella morganii
atgtcgtatcgcgcattttttcagcctgtaaaaaccctgacacaggcacagcgtcaggaaatggcctcactctattttatgtattataccggcagcgacggtacgcagtttttatcagatctcgatcataaacaggaagttctgtttctgatgtcaggggatgaaatggccgggttcagtaccctgcagttttatccgttccgcggacaccggattgtctattccggcgacacaattgtgcatcccgcccactggaagcagcagacgctgcacggtgcctggctgcggcgtattgcgcttttgcgcagtgaatatcccgccgagcgggtgttctggttcctgctggtgaagggcgtgcgcacttaccggtatatgagcacgctggcacagaccttttatccgcactggaacggtaatgtcaaagagccggaactggcacggctggcggcggaactggcaaaagataaattcggttcactctataatccggcacgcggcgtggtggaatgcccgtcggcgtttggctatctgaaccgcacaatggcaacggttactgacgcgcagcgcagcaaaccggatgttgcctttttcctgcacaaaaacccgcactatgtctgcggccatgaactggtctgcctgtgtgaagtctcccctgataatgtggcgaaacgttatcagtcactgtttgaagaacccgatgttgagttctgctatggataa

SEQ ID NO: 275878 - DNA, 1539 bp, Morganella morganii
atggataatgcctggcagcatttccgtgccgggatgccgtctgttccgccgcagggaactctgcgcgaaagacagttccgctggttatccgcttgtctggccgcgaatgcggcgtgtgaatacgggcagcggtatcatttttccgctgtcacatctgtggcggattatcagcagaacgtccctctgacaacctattctgagctcagcccttttatcacccgcatgacggccggggaagaaaatctgttgtgcagtgcgccgatcacggcatttgagctgaccggcggcagccacagcggtggcaaactgctgccttatacttctgccgggttaaccgatttccgtcttgctgtcaccggctggctgcgggatgtgacccgccgttttgatctgacctccggccatgtttactgggcactcagcccggcagtaacacggatgacaaaaacgccctgcggtattccggtcggcggtggtgatgcgctctatctgggggtggagaatctggcagcattcagtgacttatcggctgtaccgctgacactggcgcaggttgaggatgcggcagactggcagttactgaccctgatttatctgctgcagtgcccggatttgcgtctgatatccgtctggagcccggtatttttatttccgctgctcagtgctctggatatccgccggaatgagatcaccgccctgctgcgcgacggcggggaaattgccgggcactctctgcgtgctgacccggcggcgctggtgcgttaccggcagtatctgcaggagcataataccgcactgctgtggccgcagctggcattgatcagctgctgggatcaggctgcgtccgcttccccggcacaggcactgatgatgcgctttcccggcgtgacacttcagggcaaagggctgctctccaccgaggcggtgatcaccgttccgcctgactgcggtgacccgcaactgagcgcagacagtaatttttatgaattccgccgggataacgggcagatatatttagcggatgaattgctgccaggtgaaacatacagtgtgattgtcactaccaacagcgggctgtaccgctatcagaccgatgatctcgtgttgtgtaccggccacacgccggaagggctgccgcagctgcgcttttgcgggcgtgagggtatatgcagtgatttggtcggggaaaaactgaccgagccgttcgtttgtgccggtttaccgccatcacaggattttgctgtactggcagcggatgagcagggctatgtgctgctgctcagcgatacctgcactgagacacaggcacaggcatattgtgaggaaactgagcagtatctgtgcaccaatccgcagtatcactacgcccgccgtatcggacagcttaaaccgctgacattcctccgcctgtatcagccggcggagcactattttcaccggcagcttcaacggggaaagcggctgggggagattaaaatcccggcattgctgacctcgtctgactggcgtgccatgtttgagatcagggagtttccgtga

SEQ ID NO: 275879 - DNA, 1395 bp, Morganella morganii
atgacacagactgtttatacgccgcagcggccgctggatttggtgctgctttcaccgaaagggccgctgtaccgcaaacggggcggaattttcaaacgctcgctgcgttatcagccgctgacgctgaccaccctttccgcactggtgccgaaatccctgccggttaatatccgcctgattgatgaaagcattgaggaactgccggaggatttcacggcagatctggtcgcaatgacggtgatcaccggcaacgcgccgcgagcctatgaactggcggcgcagatgcgggcgaaaaatattcccgtcgtactcggcgggccgcatgtcacactgctgccgcaggaggcactgcagcatgccgatacggtctgcaccggctattccgagcagagctggccgcagcttatccgtgattttatggcgggtaatatgcagcgtgaataccgtcagggcgcggatttcacgcttgatatcccggacttgccgtttccggaacgcgaacggtttgatgcaaagcattttctcacccagggggtttttgaagcgacacgctcttgtgctcacaactgtgagttttgtgttgcaccaagtgcctgggggcgtaagcagtttcagcatccggtggagtgggtggttgaagatatccgccgttatgtggcgcgtaccggtaaacggaaagtaatatttgttgatctgaacctggtgtcggatatcggttatgccaaacggctgtttaccgcactgatcccgctgaatattcagtggttcggtttatccaccgtgctgatagctcataaccacgaactgatggagctgatggcccgcagcggctgcaaagggctgctgctggggctggaaacggtcagtgacggcagcctgaaagatgccgggaagaaatttaacggctcggtggattataaagaattgattggtgacctgcaccggctgggaattgcgattcagggctgttttgtattcggtctggatcacgacaccactgatgtgtttgaccgcacggtggatctggctatcgatgccgggattgatttaccgcgtttctctgtgctgacaccgttcccgggcacgccgctgtttaaacgccttgaggaagagaagcggattttaaccatggactggtctctgtatgacgcgcagcatgtggtattccgcccggcgctgatgagtgcacgtgagctggaactggggcacgaacgcgcctggaaaaaagtgtaccgttacagcagcatcgcgaagcggctgtggcaggcgcgtaactttaaaccgctggcgctgacggcaaacctgggttaccgcttctatgcacatcacctgcatcagtattacacctgtgactggccggttgaacaccgtccggcgaagtcgggcaaccactga

SEQ ID NO: 275880 - DNA, 1347 bp, Morganella morganii
atgcggctgacatttattcacccggcgatcggccaccggcgcggcgaaacctatctgcgatcctggcagatggagcctctgccggtcgcggcactgaaagggctgacaccggcggatattgaaacgcggttttacgacgatcgtctggagctgatcccgtttgatgaaccggctgatctgatctcaatttcagtcgaaacctacacagcaaagcgggcctatcagatagccagtgagtaccggaagcgcggtgtgccggtgctgatgggcgggtttcacgccacgctgatgccggaggaagtgaaacgcttcgcggatgtcattatcaccggagaggcggagtcagtctgggaaaccatgattgatgatttacgccacggcacactgcagcgggaatatcacggaatacagaccgatctgcgcagtatccgtgttgatcgcagcctgttcgcgggaaaacgttatctgccgatagggctggtggaaaccgggcgcggctgccgtttccactgtgaattctgtgcggttcagtcgttctatcagcagcgttaccggcggcgcgatccggatcatgtgctgcgggaactggcgggtctcaaaggcacaaaaaatctgtttttctttgtggatgataattttgcgggcagcctgcgggaaagccgcgagtttctgccggctctggcgaacgccgggatccgctgggtgacccagatgagtattgatgccgcgcatgatgaggaatttgtccgcgcattgtcacaggctggttgccggggcgtgctgattggctttgaatccctgaatgaagccaatctgcggcagatgaaaaaaggctttaacaccatgaaaggcggctacagtcaggcgctggataaccttcgccgccatcatattgccgtttacggcacatttgtgttcggctatgaccatgataccccggattcattcggcgaggcggtggcttacgcccgcgaacagagtatgtatatcgcggcattcaatcatatgacgccgtttccgggaacgccgctttatgcgcggctggcgcaggaaaaccgtctgcgctttgagcactggtggctcgatgatcattaccgttacaacgaactgccgttcagtccggcacagctgtctccggaggcagtaacgcaggggtgcctctcagcaaggaaggcattttacagttcacgctcgattcttcagcgcagctggcgtaaccggggcgatttttttatgtttcgcaactatttcccgattaactggctgcatcaccgtgagatcagctgccgtaacggctatccgctcggtgatgagaattggcagggtaaattagcagaggttaaatga

SEQ ID NO: 275881 - DNA, 1029 bp, Morganella morganii
atgatagaggttattgacgcgacaacggagcatatcgcggatttactcaggctccttgaagagaatgccatgcagggggactgggagctggtgatgacccggcggcccggttatttttccccgcgggatgatttcggtgaaatctatccggcgctggcaagagacggtgataccctggtcggcatgtgccagctgagcatacagagcggctgggttaacggcgaagaagcgcggatgggttatctcggcagtctgcgtattgtgccgaaataccgtaatcacctgaaagtgttacaggccggattttcttatctgcgccagctgccgacaccggatcactgttataccagtattgcagagaataatttactggcccggcgcctgctggagcggggcgtggaaggactgccgctctaccgttttctgagcagtatgagcacactggcgatcagcaaaagcagaggcaaagacagaggactgtggaaagtggtgccgccggaggattacaccgatgtcatccgtttctttgcacaggaatccgcttcccgtcagctggcaccggcgctgaacctgaaagcgatgcagcagaccggtattacggtgctcggcagttatcagaacgggcaactggttgcctgcggtatgctctgggatcagcgtgctttcaaacaggttattgtggccggttactccggcagaatgaaaatgctgcgcccgctttacaacgcttttgccggaatgacccggcggccgcagatgccggcggcgggtgaggtgattccgcagagtttcctgtcattcctggcctgtaccgatgataccaaactgccggatctgattgaggaagcgctgttgtactgcaccaccccggttatgaccgtcgggttgccgtccgggcatatctgcactaatgatgtgattaaacgcaccggagcatccgtttaccgcacccggatttacggcgttgatctgactgccgcaccacagtgggacggccgcattgtctggccggagatagcgctgctgtga

SEQ ID NO: 275882 - DNA, 1311 bp, Morganella morganii
gtgaatatcgtgctgatctacccgaacatgggggattaccgcacgaaagatgctatgacgccattggcgatcggtatcctggctgccctgtcgccggggcaccgggtcacattttatgatgacaggctggataacatcccggaatcactgcctgatgcggatctgatcgccatttcggtggaaacgttcacggcacagcgcagttatcagctggctgaccggttccgccgtcagggtaaaaccgtggtgatgggcggctgccacgtcacctttatgccggatgaagcattgcagcatgcggacagcgtgttgctcggtgatgcggaaggggcgtgggaacagatgctggcggattgtgaacagaatgcgcttaagccccgttaccggggcgcgcatgaccgcccgcttgccggttaccgtcttgaccgcaccatttttgagggtaaacgctacgcgccggtgtcgctggtgcagttctcgcgcggctgccggtttgcctgtgatttttgctctatccatgcattttatccggaaggtgtgcgcacccggccggttgatgagatgcgggatgagattttatctctgcctgcaaagcgttttctgatttttgtggatgacaatctctttgccggtaagcgggcgctgaatgagttgctggcgatgctcacaccgctgaaacgccgctggggatgccagatcagtatcgacatcgcccgtaatgaggagatgctggataaactggccgccgccggttgctgcttcgtgctgatcggctttgaaagcctgaatgaaaccacgctgaggcggatgggaaaatcccgcagccatacggcggaggattatgccgctgtgctggcggcgctgtaccggcgtggtatctgtgtctacggcacctttattttcggctatgacgaagacacgccggagaccatccgcagcacactggcgtttgcggagagtaacaaactggcgattgccaattttaacctgctgatcccgacacccggtacggcgctgtatgcccggctggaggcggaagggcgcctggtttatccggcctggtggcttgacccggatttccgctacggtgaaccggttttccggccgggcggaatgagcacctcagaactggctgccggatgtttttatgcccgcacccgcttttaccgttatgcatctgttatccggcgtctgtgtcgttccggcagccggagccgctggcgcacgctgctggtcgcctggctttacaatattgcctcgcaccgggacatcgcccgcaagcagggaaaacgccttggagaaaaagggtga

SEQ ID NO: 275883 - DNA, 1344 bp, Morganella morganii
gtgaaactgatactgattaaaccgaatatcggccgtcaggagcacagcctgtatgtggatgaggggcggatggaaccgctgatgctcggtgttctcgccggtctgaccccgccggatgtggaagtggtgctgtatgacgaccggatggaagccattccttatgatgaaccggcggatctggtcgctattacggtcgaaacgtttaccgcccgccgcgcttatgagattgccgcagaatacagggcccgtgatgtgcgggtggtgatgggcgggatccacgccacactgctgccggaggaagtggcgcagcattgtgacagtatttttaccggtgacgcggaaacccgctggacagagatgatccgtgatgcggagaaaggccgcctgaagccgcgctatgatgcgccggccggggtgggccaggtcgatcataatctgtgcggctgcctgccgcgccgggatatcttccggggaaaaggctatctgccgatcagcctgatgcagtttacccgcggctgtcgttttgcctgtcgtttctgtgcggtcagccgttatttcgggcggcagcactatatccgccggatcgatgaagtggtgcgggagatagaaacacagaaaccgaaatttatcttttttgttgatgacaatatcgcgtctgatcatcgcgggctgagtgagctgtgcagtgcgctgatcccgctgaatgtgcactggataagccaggcaagcctggatatgacccgtaaccgccgcctgatgtcgctgttacagcagagcggctgctggggtaatgtgatgggatttgaatccatcaacccggacagtctgcgtgatgcgcgaaaatcgccgaatatgcggacattttcacagtatcgtgaggaaatttcggtattacgggacttcggattgcagacctgggcggcgtttaccctggggtatgaccacgatacggcagaaaccgtggaagataccgtggcattcgccctgaaaaaccgctttgcttttgccgcctataacattctgatgccgtacccgaacacaccgctgtatcagcagctggcgcaggaaaaccgcctgctgtttgacgggaaatggtggctgcatccggaataccgttttaatcaggccgcctttcagcctgcaaatatgagccccgaaacgctgacagaactgtgccatgctgcgcgcagccgttttaacagtgtgccgtcgattatccgccggttttctgatttgcgcctgaccctgcaatccttatcgcgtatggccactttctggcgttataccctgttattccgcaaagaggtgcataaaaaacaccgtatgcgttttggtttaaaataa

SEQ ID NO: 275884 - DNA, 609 bp, Morganella morganii
atgaataccgatccggatcctttttcccgccgtgtcatcagttatctgttgtggtgtatcccggtcagtgtggtgtttttcacagtttacccgctgatgaatgcgtatacggccgggcgcgacagcctgtatgccctgtggtttccggctgagctgcacatcccgtttgtgcccggttttatctgggtgtactgctcgttttacctgattattctgatgccggttttgtttctgccgcgctgggagcaccggcagctggcacttacctttatggtgatgacattactgggcggcgtgatcttttttctgtttccggcacagctcggctttgtacgggaggtgccggagtctccgctgtaccggacgatgtacatgacactgtttgcgctggatcacccgcataatctggttccgtccctgcatgtggcctggtcgtgtgccgcggtgctggccattatccgccataccggacgcgggctgacactgttgtttctgttgtggctggtgctgattgtgtcgtctgtgctgctggttcatcagcaccatgtggcggatgtggtcaccggcctgctgttggcggtaacggtttcatatatgatgaggaaataa

SEQ ID NO: 275885 - DNA, 621 bp, Morganella morganii
atgatgaaaaggataattatcagtgcgttaatgatattcagtttttcggtgtatgcgcagcccggagaagaggacggcgctatccatgatgaactgcggcaggcgatcggcactgtggaaagcgccatcaacagcggggattatgacaaaatgctgccggtgatgagtgaaaatctgcgtgccacgcccatcactcaggagtttatctccggcaaagcagcaataaaaccgtattttgaatcctggttcgggccggacaaattcctgaaaaaactgaatatcagttttaatgccgatgtggtgacggaattatccccggataaaacctggggtgtcgcctacggtaaagggatggaaaaatatcagctgagtgacggccgtacctacgattttccgacccgctggactgcgacggttgcgcttgaggacggcgcctggaaaatccgcactatccatatcggtaccgatttcacggataacccgctgctgaatgaaacccgcaatgccttacagggcatgatgtacggagcgggtggtctggtgattggtttgctggccggtattgtgctgttccgccgtaaaagtgcggtaaaaccggaagcggcaacagataagaaataa

SEQ ID NO: 275886 - DNA, 921 bp, Morganella morganii
atgcgtcttttactcaacagtattctgctgattttttcgatgactgcggcagcggcctgtttatggggagtgagccatctcgcctggtattatgtgctgcctgccctgatcggttttatgctgattaataacatgccattcgctattctgcatgaagcggtacatggcgtggccgcccgcactgccgccggtaaccgcgccatcgggattattgccgcatgggcatttccgacttcctttaccctgcagcgtcgcgcacacctgaatcaccataaaaataaccggacagataaagagctgtatgattattacctgccagaccagccacgctggctgcgcaatatctggatgtacggcggcaatctgctcggcctgtactatttttgcgtactgctcggtaatctgctctggtttattgcgcctggtgtgtaccgttcacggatatttgtcaccaaaattgccccggcgatgggattcgggtcacaggtgccggaactggcaaaactgccgccgctgaccatctggagtgaactgctcggtgcatttctctggcaggcactgctgttttgggcgctcgacttaagtgcggccggttatctgctctgcctgtgggcttttgcgctgcactggtcagctctgcaatatgcggatcacgcctggagccgccgcgatgtgatgaacggtgcgtggaacctgaaagtactgccggtctcccgctggctggcgctgaattatcactgccatctcgcacaccaccagcacccgcaggcaccgtggtatgaactgccgtcgctggtggatgaccagccgtgcccgaccttctggcgtgtctatttcactatgtggcgctatggtgtgcgccctgccccgcagatgggtgcggcagcggatctggattttctgtttccgccggaaaaataa

SEQ ID NO: 275887 - DNA, 1374 bp, Morganella morganii
atgtcagctgcggagcaggaagcaccggtgagaatattactgattttgccgtttgacaggacttaccgctaccggaaaagcgcgttttccgtggcgataagctatgctccgctgacccttatcaccctcgccgccctggttcccccgcatctgaatgctgaactgaccctctgtgatgaaggcgtttccccgccggtcactgccggggattttgatctggtggtgatcaccgccaccgcctcctcttccccccgcgcttatgcgctgtgccgctactggcacgaacgcggggcaagaaccgcaatgggcggagcgcacgtcacactgcggccggatgaggccgcgcagcatgccgataccgtccttatcggcgccggtgaactcatctggccccggtttctgcaggatatggctgacggacatccgcagccgcgttatcagcaccgctctgagcgcggctttctgccgatgccggtgccgcgtcgcgatctgctgccgtcccgcgcctatatgaatatcgccactattattgccgaccgtggctgtccgcttgcctgtgaattctgttcagtgcagcatcagtggggacgaaaaggcaccgcacgtccggtggcagacgtgattgacgagataaaacagagcggcagacagcgctggatattcctcgaccctaatctgtatgctgaccggcagtacagtctggatctgttccgggctctgatcccgctgaaaatccgctggtcgggactggcgacactcaatgtgacggatgatgacgaggttttccgggcgatgtgtgacagcggctgcgaagggctgcttatcgggctggaaaacctcagtcagcagaccatgacggccaccggcaagaattgtaaccaggtcagtgaataccgccgtcagatccggcggctgcgcgataaccggattgccgcactcggctgttttgtgctcgggtttgatgaagacaccccggagagcatccgcgatacgatacggcagatcccgtctctcgggctggatctggtgcgtttttctgtcctcaccccgctgccgggtacacgactgtggcagcggatggcggaaaacggccgcttaatcacacaggacctgagcctgtatgacaacgaacatgtggtttttcagccgcaaaatatgtcaccggaaaccctgcaatccttactgcatgaagcctggcaggaaacataccgtttgccggccattctgcgccgggtattgcaccgtccgggcagccgttttatccgcctggcggccaatctcggcttccggctgtacgcccgccggttacgccatgaaaaaaccgggctgttcaacccggcaatagtgacgaataacacaaggaaaacagactga

SEQ ID NO: 275888 - DNA, 1038 bp, Morganella morganii
atgtcttatactgaaccggatttaatgagtcccgcagaagagcaatccgtcatccgtatcctgaatgttactctcgggctggcgctgcccggttgtctgcgggttgcggcagagctgaatattgctgaccatctggctgacgggccgctctctgtcaccgcactggcagaacgcaccggctcagatccggataacctgcgccgcattctgcggatgctggcactgaacggtattttcaccggtacaaatgatgacagttaccggctctctcctgatgcggagtttctccgccgcgatcacccctgcacacagcgggatgccgttctgatactgacagacaatacttactggtcaaccattggtcagcttaatgaatccgttcgcggtgaactcaactttaaaaagctgttcggtaaaaccttctatgaatatcaggccaccaaacccaaccgcaacgacagctataatttcccgtccgggatgtctgccctgtcagaaatggaaaactattttgtcacgagagcttatgacttcccgtcatcgtgccatattgccgatatcggcggaggcgaaggctcactgctgctgcggattttgcgcagagacccgacactgaccgccaccctgttcgacagcccgcatgtggtatcagacaaatatctgtctcagttgggtgacggttcccgctggtcgctggacggcggtgacttctttaaatccgtgccgcaggcggacatgtatctgctgaaaaaagtcatttttaatcaggatgatgccaacgcactcgccgtactgaaaaactgccgcaaagccatgaaaccggacagcaaactactgatcatcgaatccattgtgcatccggaaaccaatccggccgcgcattacggtatgggcattctctgtatggcgatcctacccggcggcggcgagcggactattccggagtttgaggctctgctggctgaagccggactgaaaataaaccgccttatcccgactgaatgctatatctctgtgcttgaagtggttgcagcctga

SEQ ID NO: 275889 - DNA, 1182 bp, Morganella morganii
atgcaagccgccacccgttccaccattgctctgctcgcttcctcattcttaattactatcggacggggtgccactatcccgtttatggcgatttatctcagccgtcagtatgacatggcggtggatcaggtcggggtggcactgacggtcgcactgacaaccggcgtgttattcagcctcggcttcggcatcattgcggataaatttgataaaaaacgctacatgctgatggcaattctggtttatatcgccggatttatcgctattccgctgactcacaatatcgcactcgtcgttgtcttcttttcactgattaactgcgcctactccgtttttgctacggtgctgaaagcctatttcgccgatacgctgccacctgcgcgtaaaaccaaagtcttttccctgaactataccttcgtcaatatgggctggactgtcgggccgccgattggcaccgggctactgatgtacagcgcggatctgccgttctggctggcggcctgcaccgcctcattcccgatattctttattcagcgttttgtccgcagcgtgccgccttctgcttcaggcagcaacagcgccgcctggcagccgtctgtcatgctgcatgataaagccctgctctggtttacgttatccgcctttctgggatcgctggtgttcggttcgttttccgcctgtatttcccagtatgtcctgacggtggcagataccacactggcagaaaaagtgattggtgtggtgctgccggtcaatgccgccgtggtggtttcactgcaatatatggtcggccgccggatcagcacagacaatctgcaaaagctgatgactctcggtacactcttttttatggccggactggccggatttatgatgtcaggcagcaaccttgtgttctggggaatagccgcgtttgtttttactctcggtgaactgatttatgcgccgggtgaatatatgctgatcgacaacattgcgccggacggcatgaaatccagctacttctccgcccaatccctcggctggctcggcggtgcctttaacccgctgatgaccggcggtgtgctgacctatttcccgccaaataccctgtggctgctgctgattggtgtttccgcctgcgcctggctgtgtatgatgcgcggcctgaagatcagcagaaacaggcttattcaccactga

SEQ ID NO: 275890 - DNA, 405 bp, Morganella morganii
atgacgataaaacggattaatccgccctcactgtttaattccctgcaatacggtttcagtcaggtcgtggaaacaaccggcacccggcagttatttctgtcaggacaggtcggcgttgatcacaatgaagtgacagtcgcaggcggtatgcgggaacaagctgcacaatctgtggacaatattgcccgtgccctcgcggcagccggcggttctctgtctgatgtggttatgctgcggatttatatccgtgccggtgcggattcacacgatgaacaaatggcaattgcggatgtgctgaaagaaaaatttgccgccgcagcccctgcctcatcatggattattgtcagcggattatctctgccggaatggctgattgaaatcgaagcacacgccgtgctgccgtaa

SEQ ID NO: 275891 - DNA, 273 bp, Morganella morganii
atgtcacataccatcagggacagacagaaacttcagaaccgcgccagtaaaattcaggggcaggtcaactcactgaaaaaaatgctcgatgaaccgcatgagtgctctgccgtgctgcaacaaattgcggctatccgtggcgcggtaaacgggttaatgcgggaagtgattaagggtcacctgattgaacacgtagttcatgaggaagatgaggaaaaacgtcagggtgatctggatattgttctgaaagtgctggattcttatattaagtaa

SEQ ID NO: 275892 - DNA, 873 bp, Morganella morganii
atgactgattttgcctctttactgcagcagggaaatgcctggttttttatcccgggcgcgattgcactgggtgcgctgcacggcctggagccgggccactcaaaaaccatgatggcggcctttattattgcggtgaaggggacggtcagacaggcggtgatgctgggactggcggcgacgttatcgcataccctgatagtctggctgattgccctcggcgggatgtatatcagtgcccggttcacgccggaagccgtagagccgtggctgcagatggtatcggcggtgattattctggcaactgcattctggatgtttatgcggacataccgtggtgaaaaaaactggctgacagaaatgcagcaggaaagccatacacacagtgaccatcatcatgagcatgatcatcatcacagccatgaacatgaccacgatcatcatcaccatcatgcagagcatcaccacgatcatcatgaccaccatgatggcgaatatcaggatgcgcatgccagagcacatgctcatgaaatcaaaacccggtttaccggcggcaaagccaccaacagccaggtgttactgttcggcctgaccggtgggttaattccgtgtccggctgcgattactgttttgctgatctgtctgcaactgaaggcttttaccctgggcgcaaccatggtgctcagtttcagtatcgggctggcactgacactggtcacggtcggcgtggtgactgcggtggggctgcgccaggtcagccgccgctggcaggggctgggtgatatcgccaaaaaagcaccgtacttttcggcgacgctgatagcgctggtcgggctttatatggggatccacggttatatggggctggcaaactga

SEQ ID NO: 275893 - DNA, 213 bp, Morganella morganii
atgtccgcaacaattaccggtactgtaaaatggtttaacgatgataaaggttttggctttatcactccagctgacggcagcaaagacgtgttcgttcacttctctgcaatccaaagcgacagcttcaaatctctggcagaaggccagcaggtttctttcaccatcgaaaatggtatgaaaggcccggctgcagctaacgtggttgctctgtaa

SEQ ID NO: 275894 - DNA, 735 bp, Morganella morganii
atgtctcagaatatttatgataatccggatttctttgccggttatgccacgctgccccgctcagcagaaggactggacggcgcgccggagtggactgccatgcagacattgctgccgtcactggccgggaagtcagtgatcgacctgggttgcggatatggctggtttagccgctgggcaaaagagcagggcgctgcccgggtgaccggttttgatctgtctgagaaaatgctggcgaaagccgcatcgatgaccacggatcctgatattacctggctgcgcgccgatctcgagacactgcaattaccggcggcacaaagtgatgtgatttacagctcgctggcactgcattatctgcgtgatatcccggcactgtttgccacgctgtatcaggcgctggttccgggcggccgtctggttttttccgcagaacacccgatctacacagctcctgtcattcagaactggtgcacggacagtgcgggtaataaagcctggccggtcaatcagtaccagcaggaaggcgtcaggatcagcaactggtttgccgacggcgtggaaaagcagcaccggaaattatccacctggataaatgcgctgattacagccggttttgaaatcaccgctatgaatgagtgggggccgtcagcggcacagattgctgccaatccggcactggatgaagaaaaagaacggccgatgatctttctgctcagcgcccgcaagccggaatag

SEQ ID NO: 275895 - DNA, 552 bp, Morganella morganii
atggaaacattactgacacactggattacagaatacggctattgggcaacctttttcggtactatgattgaaggggaaaccgctgcatttttatccggtattgccgcacaccatcagttattatcctacccgaaagtgatgctggtggccgcactgggcggaattatcagtgacaatgttctgttttttaccggttattttgccggaaaccggatcctgccccgcattcataaacatgcggataaaatagcccgtctgcagcggataattcaccgccacgaaagcctgattattatcggaatacgtttcgcttacggattaagaactatcggccccgttattatcggagccgccggtattaatccgctgaaattttttgtgctgaatattctcggcggggcgatatggggaagcgttattgtctctgcggggtattttgtcagcgcagcaatccttgccctgccgctgcatacttaccttgcctggttccttatcctcgcagcggttgccggtctgtttgtgctgataagaaagcataaattcacgctgtaa

SEQ ID NO: 275896 - DNA, 678 bp, Morganella morganii
atgttgcgctatggtattcgcattactcatattttccggcacgcctttcactcgcgtccacgttttattatctctctgatggtcgcgtttgtgactttttttgctctgctgcccgtacagagtgcactgatgtgcctgatcctcagctggaatgccttctcctgggtgtatttgctgtttctttttgagcggatcattaataagaaagtaaaagatatccgtaaactgactaaaattgaggatgaaagcgcccgcatggtgatgtttttcctgctggccgggtgttgtgtcagtttactggtgctcttttttgccctcggcgggcacggtaacctgaccggtaatgataaagctttccagtatattctgaccgcatccacattagtgtcctcctggctcttattaccggccggatttaccatgcactatgcgcacctttattacaccaacccgcaacaggaaaaaccgtggttattatttccggacagaccggctgaacccgcttactctgattttatgtatttctcatttacgattgccgtcgcctcacagactgccgatgtcgaaatcgcgtcatccccgatgcgccgcgcggtattaatgcaatccgttgtctcttttgtttttaatatggcgatactgggattatgtattaatatctccgccggtttattttaa

SEQ ID NO: 275897 - DNA, 753 bp, Morganella morganii
atgagcataacatttcttattgtcatgttttttgtcgccgtggccgccggatttatcaatgtggtatcaggcggcggtggttttctgtcgattaccgcattgctgatttccgggttaccacctgctaacgcactggcaacaaataagatgcaggcactgggcagttcattaacatccggtatttatttcttgcgtcaggggcggattgatttaaagaataataaatgggtatttattgcgacattcttcggtgctgcatccggcacgatttttgtacagtttatcgatccgacttttctgaaaaaattactgccgggattaattatcagtgtcacgctgtactttatttttgcccctgatatcactaaatccaaagaaaaacagcgtgtttcttttttcctgttttcatttatctgcggcggcggtgtcgggttttatgacggattcttaggtgccggcgccgggacattttataccatcagttatatgctgctgttaggataccggatcgataaagcacaaattcactccaattttctgaacctggcctccaatacctcgtccgttatcttttttatcgcgggcggtaaaatgatgtggtcgctgggattactgatgtttgccggacaagccatcggggcgcggctgggagcaggtgttgtactgagctccggcctgaaagtcataaaaccgatgattattctggtctccgccgggatcagcaccaaaatgttatttgatatgtatttttag

SEQ ID NO: 275898 - DNA, 939 bp, Morganella morganii
atgtattcatccctgcgaaaaacggatatgaatttactgctggtctttgatgctgtttacaggcaccgcaatatcagccttgcagcagatcagctcgcactgagtccgtcagcactcagtcacgcccttaaccgtctgcggaattctctcggtgacccgctttttatccgtcacggcggaaaaatggtaccaacggccaaagctgaaaatatagcgccgcagatttcagccgctttacaaacactctccgtctgttttcgtcaaatgaatgccttcgatccggctctgagtacggatacattcacatttgccgcgaccgattacaccgccgccgttattatgccgggattaatatcccgtattaaccgcctggccccgggtatcactataagattattgtattcacagaattttaatgctgttaatgatatccgttccggcaaagtggattttgctctcgggttcgaggaaggacaaaaatttccgcagagagaaacggaagcaataacctgctttaccgacaattatattgttgcagtccgccggggacacccagaaattaataatatgcttacacaagcattatatcttgccgccggtcatgtcgtggttcgtccctgggcggattcacagggcgctattgatacctatctggaaaaacagcaactgaaacggcggataatggtggagttacccagtctgatggctgccccgctgattgtttctcagacagacctgattatcacattgccggaaaaaggaattacatctctttttaacatgcaggatttagtggtattcccggtgcctttccccgcaccgcagtatactttaagagcttattataatccggcattatgcaattcccccgggcaccactggataaaagaacagattatggcaatatgttccggtagtaacgattatatcacccgctga

SEQ ID NO: 275899 - DNA, 492 bp, Morganella morganii
atgttaacccccgtatttcgtcaggtcacagcagcagatgttgatcgctgttatgaaattgaaactgtttcttatgaaggtgatgaagcggcaacacgggaaaaaattgcattacgtgcaaaacgctatccggaaggtttcttgtgtatgctggtggataactgcattgctggttttattaatgcaggttgtgctgataacgtagtgatgtctgatgaggagtttaaagagcttgtcggtcatgatcctgacgcacccaatgtggtgattatgtcagtggtggttcatccggattttcaggggaaagggtattcttccctgctgatgcgggaatttatctcccgtatgaaagcaatgaataaaaaaatggtttatctgatgtgtaaagagcagcatattgcgctttattcacattttggttatgagtacattaaactttcagagtctgaccatggcggaatgacctggcatgaaatgtatatgacactctga

SEQ ID NO: 275900 - DNA, 480 bp, Morganella morganii
atggcgatgaacggaacaatcacaacatggtttgaagataaaggctttgggtttatcaaagatgagaacggggataaccgttattttcatgtggttaaggtcgccaatcctgacctgattaagaaaaatgccgccgtgacatttgaacccggcaccaataacaaagggctgtcagcctatgcggtaaaagtggtgccggaaagcaaatatgttttcatcgccggtgagcgtattaagctgacggccattaagtccttcgtggtttacagtgaggaagaagcggctgataccgggattgataaagagaacgtggtactgtctgttggtgtgctgatgaacaacatcaaaccaaaatccgccggcccggccgaaatgcgcacactcagaaaactggcgatcaccacacagcacggcactaccctgattttttcagaagatgaaatagatatcgatgagacggtgaaaatgcttaaggtgtga

SEQ ID NO: 275901 - DNA, 1764 bp, Morganella morganii
atggtaacgtatcgtccgaaatacggtgacaaagtttcccagatgattagctggggacactggttcaccctgtttaatatcctgctgagtcttgcactcagcagccgttacctgtttatttctgactggccggacacgctgattggccgcatttacgccatcaccagctggctgggacatttcagtttcctggcattcgccctctatctgctgattgtgttcccgctcacctttgtggtgatgtcacaacggctgctgcgctttttatccgccgccctcggtacagccgggctgacactgctgctgtttgatatcggcatctatgaacagttccgcctgcatttaaacccggtggtgtgggatctggtcgtgaaccctgaacagggggaaatggcgcggcgctggcagtttatctttattgcgatcccggttatcttcctgatcgaaatgctgttcggcacctggagctggcagaaactgcgcagcctgaaccggcaaaaattcggtaaacctgttgcggtggtatttatcaccgcctttattacctctcatattatgtatatctgggcggatgccaatttctaccgcccggtgacgatgcagcgctataacctgccggtctcttacccgatgactgcccgcaaattcctggagcgtcacggcctgctcgacagcaccagttatgagcagcagttacttctgcacggcgacccgaccgcccagggtgttgagtacccgatcaacaaactgacctatgcagacaatggcagcggctacaatttactgcttatcaccctcacctcgctgagccgggaagatattaataaggcaatgccgaacctgaaccggtttgcagaggaaagcacacaattcacacagcactacagcagtgaaattaatccggaacgggcacagttcgggctctattacggcatctcaggtacctattatgacggtattctcaacggacgcattccgtccgcactgatgacggcgctgagtgcacagaattatcagtcagggttcttctccacagaaaactttgcctccccgctcttccgctatgccctgctggcggattacagcctgccgccgctgcgtgacggacagaataacagcggaactgcttctgcggatgtggcagatcgctggtcagtctggctgaaacagacccgcaaagatcagccgtggtttgcactgattaacctcagcacaccgttaccggacggtcattccgccccggatatgacagatattgataacacactgggtacactgattcaggatatccgtgcgcgtggtgagtgggataaaacagtgattgtcatcaccgccggtgccggtgacagcatggccaaattacaggacagctgggtcaccgacggcaaatttaaccgcgaccagttacgcgtgccgctgattattcactggccggataccccggcacaaactatcagcaaactgaccgcacatccggatattatggcaaccctgatgcagagactgctgcacgtcagcaatccgccgggagaatacacccagggtgatgatctgttcactactacacggcgcaagccacggatattcaccggcgataacagcaatctggtgattatcaagccggattccgcatcactgctgaccgctcagggtaaataccagcgctttgatgagaataatgagaagatccgcaatgccaaaccggatatggctgaattactccaggttctgacagagcagaaacgctttatcgatacccactga

SEQ ID NO: 275902 - DNA, 228 bp, Morganella morganii
atgccgcaatcatcccgctacagtgatgaacacgttgaaaagttactggctgagctggtcagtgtgctggaaaaaaaccggacaccgaccgacctttctcttatggtgttaggaaatatggtgaccaatctcatcaataccagtgttgcgccgtcacaacgcgctcatattgctgaatccttcgcccgcgccctgcaatcttccgtcagtgaagataaagcgcactga

SEQ ID NO: 275903 - DNA, 1005 bp, Morganella morganii
atgagtctggatatcattcagattgcgttgcatcaattgattaaacgcgatgaacagacactggaagtagtgctgcgggacacaccactggaaaaaaccgccattgttgaggaaatgatggctgagctgcaccgggtctacagcgcgaaaagcaaagcgtacggtgtgtttaatgaagagagtgaactgtcagaggcactgcgtctgcagcggcagggcgaagaggaatttcacgcctttacccgtgcggcaaccgtccgcctgaaggatgagctggcaaaatacccgtttgcccagggcggtgtggtgttatttgcccattaccgctatctggcggtggagtatctgctggtggcggtactcgatagctgccagagcatgctggtcaatgagagcctggagcttaacagcacccattatctggatattccgcatgcggatattatcgcccgtattgacctgaccgaatgggaaaccaatccggaatccagccgttacctgaccttcctcaaaggccgtgtcggtcgcaaagtctccgatttctttatggatttcctcggtgccgctgaaggctttaatgccaaaatccagaacaaagggctgttacaggcactggacgattactgcgaggaggctcaggcggacaaacaggagcgccagtcttaccgcaaacaggtgtttgattactgcacggagcagttacagagcggtgaagagattcagctgacagagctgtctgcggaactgccgccgctgggtgagcagagttttgcgcagtttactcaggaaaaagagtacggactggaggattcgttcccggccgatcgcagcacattacgtcagctgacaaaatttgccggcagcggcggcgggctgaccattaattttgatgcgatgttactgggggagcggattttctgggatgcggccacggataccctgacgattaaagggacaccgccgaatctgcgggatcagttacagcgccgtggtaataaaggatag

SEQ ID NO: 275904 - DNA, 282 bp, Morganella morganii
atgttaactatcaatgctgaattacgtaaagagcagggtaagggtgcgagccgccgcctgcgtcgcgcaaacaagttccctgctatcgtttatggtggcaaccaggaacctgtttccatcgaactggaccacgacgtcctgatcaaccaggaagctaaaccagaattttacgaagttctgaacctggttatcgatggtaaagaaaccaaagtgaaagtacaggctgtacagcgtcatccgttcaagccaaaactgacacacatcgatttcctgcgcgcttaa

SEQ ID NO: 275905 - DNA, 1761 bp, Morganella morganii
gtgacgtttaccctgcgcccttatcagcaggaggctgttgatgccaccctgctctatttccgcaaacacaccacgcctgcggtgattgttctgcccaccggagcgggaaaaagcctggtgatcgccgaactggcgcggctggcacacggccgtgtgctggtgctggcgcatgtcaaagagctggtggagcaaaaccacagtaaatatcaggcttacgggttggatgccgggatctattctgccggattatcacaaaaagaatcctcacaaaaagtcattttcggcagtgtgcagtctgtcgcccgtaatacggcggattttgacggcaaattttccctgctgattattgatgagtgccatcgtatcagcctcagcgaagacagtcagtatcagcaggtgatacagcatctgcagaaaaataacccagccctgcgcatcctcggcctgacagccacgccgtaccggctgggcagcggctggatctatcagtatcactatcatggtatgatccgcggcgatcatgaatgcttcttccgcgattgtatctatgaactgccgctgcgttatatggtcagccatcagtatctggtaccgcctcagcggctggatatgccggtgctgcaatatgatttttcacaggtaccggtcagcgccgccgggatgtttgacacacaggtgctggcgcgggaagtaaaaaaacaaaagcggatcacaccgcgtattgtccgccagattattgagtatgccgcgccccgtcagggctgcatgatatttgccgccactgtggaacatgcggcggaaattgtatcactgctgccgccgggcgaagcggcgctggtcagtgcggataccccgcctgcggagcgggaaacgataatccggaatttcaaagcgcgggagctgcattatctggtcaacgtttccgtgctcaccaccgggtttgatgccccgcatgtggatgtgattgccattctgcgcccgactgaatcagtcagcctctaccagcaaattgccggccgcggcctgcgcctgtctcccggaaaaacggagtgtctgatcctcgattacgccggaaacccgcatgacctttatatgccggaagtcggcaatcacaaaccaaacagcaaaagccagccggtacaggtattctgcccgttgtgcggctttgctaatttgttctggggattatgtaccgacgacgggcatatcatcgagcactatggccgccgctgtcagggaattattgatgcggatgatgaatccgcccgtcatcaatgcgatttccgtttccgctttaaactctgcccgtcctgtaacggggaaaatgatattgccgcacggcgctgctgccactgtgatgaagtcctcagtgatccggatgacatgctgaaagccgcactgcgcctgaaagatgctctggtgctgcgctgcggcggtatggcgctttctgccggacaggataaccgcggtgaatggctgaccatcaactattacgatgaagacggcaccactgtcagcgaacgtttccgcctgaccaccccggcacagcgttttgtctttgaaaaacagtttctggcacagcatctgcgcgcacccggtgtgccgtttcagtggcaggatgcagaatccgtaatccgtcagcaggtgttgctgcgttacccggattttgttgtctcacgcaaaaaagagaactactggcaaatccgcgaaaaaatctttgattatcaggggcgattccgcaaatctgacagtctggcataa

SEQ ID NO: 275906 - DNA, 696 bp, Morganella morganii
atgcgattagataaatttcttgcccatcagatgggtatcagccggaaccttgtggccagagagctgcgtgcggggatggtgactgtggatggtgaggtcgtgaaaaacggcgcactgaaagtcagcgcggagaacgaggtggcgtatgacggcaatgtgatgacacacgtcaccgggccgcgctactttatgctgaataaaccgcagggctatgtctgctcaacggatgacccggttaacccgactattctctattttatcgatgagccggttgcccataaactgcatgccgccggacggctcgatattgataccaccgggctggtgctgatgacggacgacggacagtggtcgcaccgtatcacctcaccgaaacatcattgcgagaaaacctaccgcgtcaccctggcggagccggtggcggacactaccgcagcgttgtttgagcagggtgtgatgcttaacggcgaacagcacccgaccaaaccggcaaaactcgagattatcaccccgcaggatgtgcggctgacgatttccgaagggcgctatcaccaggtcaaacgtatgtttgctgctgccggtaaccatgtggacgaactgcaccgcgagcgtatcggcggcattgtgctggatgacagcctggagccgggggaatatcgcccgctgactgatgaggaaattcagtcggttctctga

SEQ ID NO: 275907 - DNA, 1185 bp, Morganella morganii
gtgcaagtgcaacgttcggcctatttcggcctgatttttatcctggggctgttatcgatgctgatgcctctggctatcgatatgtatctgccaagcatgccgaccattgcccgtgactttggtgtcactgagggcgatgtccagatgacactcaacagttacctgatcggtttcgccgccgggcaactggtatacggtccgatggcggatgcgctcggccgaaagccggtgatcctcgggggaacactgattttcgccctggcctccgccgggtgtgcgatgtctcaggatatcggcacctttatcgggatgcgcgggctgcacggctttgcagcggctgcggcaagtgtggtgatcaacgccctgatgcgcgatatgttcaccaaagatgaattttcccgcagtatgtcgtttgtggtgctggtaatgacagtggcaccgctgctggcaccgatcatgggcggtatgatgatgctctggttcagctggcacgcgattttctggaccatcatgattgccgcgctgatcgctgcactgctggtgctgttcttcatccgcgaaaccctgccgaaagagcggcgccagccgttccggctgcggatcatgctcggccagtttgtcacactgctccgccagaagcgcgtactgtgttatatggtggcatccggtttttcatttgccgggatgttttcgtttttatccgccgggtcattcgtttacattcagctttacgggctgacggagctggaatttggttactgcttcgcactgaatattgttttcctgtttattatgaccaccattaacagccgttatgtccgccgtttcggcgcactgaatatgctgcgcaccgggctggtggtgcagttactggccggatgctggctggtgctggccgcatccgccgatctcggctttgtggcgctgatgataggtgtggcctgttatgtggggaatattgccatgatcacatcaaatgccatggcggtgattctggatgattatccgcatatggccggtaccgcctcatcactggccggcgtgctgcggtttggtatcggtgcgggtgtcggtgcggtggtggcttcatttaacatgacaacggtctggccgatggtcggtgcgatggcgctctgtattctgattgccgcctctctggtgctgtacgcacggcgttttgcctga

SEQ ID NO: 275908 - DNA, 345 bp, Morganella morganii
gtgaatagtaatgcgctttcagttgtttcccgcctgccacagcattaccggcttgccggtaatgatgacggccgccggttagaggcgttaccggaatctttgcagagcagggaagacagcctgaccggtttaaaattactgagtcacggccaccattcaacatatgatgcactgtgcgccatccggtcgcacctggaaggattacggattgacagcctgatcctgacctgggaaggggagccgtgcctgtttttacacagtgatgatgaaagtaccgcactgtgtgccctgaaaaccgcaggggcggcaattgcggaaaatatttctgcccgttaccccttctga

SEQ ID NO: 275909 - DNA, 555 bp, Morganella morganii
atggtcacatctcaaccaattctgagatatatcacccggattgttccggcattgattatcgcggcgacattgtcagcatgcagtacatctccaaattcagcccgtcaagttcaatctgaaacccgtacaaacagttttatcttgcaagcgtctcaggatgaattcgaacagttagttaataatgttgatgttaaatccaaactgatgtctcagtatgccagctggaaaggcgttgcttaccgcctcggcggcaccacccgctccggtattgattgctccgcgtttgtccgtcagactttcctcgaccagttcggtatggaactgccgcgttcaacagcagagcagcagtctgtcggcaccagcgtaaaacgcgctaagttacaggccggtgacctggtgttatttaaaaccggaaaacgtcagcgccatgtcggtatttatgtcggcaatgacaaatttgtccatgcatctacatcaaacggtgttatcgtctcaaacatgacggataaatactggaacaaccgttattacgacgggcgccgtttaattaaataa

SEQ ID NO: 275910 - DNA, 720 bp, Morganella morganii
atggcagtacaacgcatcacacttccgctttctgtcagcctcgccggtatcatgctgtttctttcctggtacctgccggttgatcacggctggtgggcggtacctgaccatgctgttttccgttttttcaatgccccgctcgccggtaatcattcactggctgtatttattgcggttattaacaaccgggcatttgatgtggcagcactcctgctgatggggcttatctattatgcggctttccgcagacaggacagcgacggtaaacgccgtctggtaatggcaggtgtggtgatggtaataagtgcggtactgattaatcaggccggacaggcaattccttttaaccgcctcagcccgacactggtgctcgattcggctcatcgtgtcagtgatatcaccgggatctttacaaaagatgcctcaaaaagcagttttccgggtgaccacggactgatgctgatcatttttgccgcttttgtctggcgttatgccggattccgttattttgcggcggcagttttactgacaattatattttccttaccacggataatggccggtgcacactggttcagcgatattatggccggttcactgtcgctgacattaatcacggttccctggattttactgacaccgctgagtgatcattgtgtaaattttctggtacgccatatgccccgtttatccgatattacaaagaaaatttcacattag

SEQ ID NO: 275911 - DNA, 330 bp, Morganella morganii
atgaaaaagctacagttctttattgctgctgcaggcttattaatgagtagttttgctccggcaactgaaagtaaagcccagacagcatcgggtgtgatcatctttcatggtgcgattgttgaaggcccctgtgcaatggactttcagaccaatgacatcagttcccgctgttaccgctccgggatgaaaaaagagcggctgaatacccagactattacccgtaatacccggtcagtttctgatttgataccggcgaatatgggtgatgcaaaacttcactggatggatgacagtaagctgatagcgatggttattgtcagttatctttaa

SEQ ID NO: 275912 - DNA, 339 bp, Morganella morganii
atgaatcatcttaaggctattttcagtggtatgttgttaagcttgtcagttatcacaccgggtgcggcagccggtatcagtgaagggacgattctgctgtccggcagtgtggtgaatgccgcctgtgaggtcagtgtcccggcggcggaacagccgcagaacagtcagccgtcatttgaatatcgttgtctgcgcaacggagagcccgccagtgtacaggacagtatcgctgaaggtgaacttgtgcaggggcgtctgccgcagtcaatggggcgcacatcttactcggtgctgaatgaagagcgccgggaagcgtatctgcgggtggattatttctga

SEQ ID NO: 275913 - DNA, 573 bp, Morganella morganii
atggcaaaagccaatgaaattaaacgcggaaccgcagtgagctataacggcaaactgctgatggtcaaagatatcgatgtccagacgccaagtgcccgcggggccagcaccctgtacaaaatgcgttttactgatgtccgtaccggtcagaaagtggaagagcgttttaaaggcgatgatattattgagaccattaccttaacccgccgcgctgttcagctctcttatgtcgacggtgatgagtatgtctttatggatgatgaagacttcacaccgtatccgatgaaaaaagatcagatcgaagaagaactgctgtttattcctgaggaaggtctgccgggtatgcaggtgctgacaatggatggccaggtgctggcgctggaattaccgcagactgtcgatatggaaatcattgaaaccaccccgggcatcaaaggagcatcggccagtgcacggaccaaaccggcaaccctgccgaccgggctggtgattcaggtgcctgaatacctgagtaacggtgaaaaaatccgcattcatatcgcggaacgccgttatatgggccgcgcggattaa

SEQ ID NO: 275914 - DNA, 1248 bp, Morganella morganii
atgagcagcgacgcaataacccaaaccaaacgcccttccgtcctgggcggtgccatgattatcgccggtaccgctgtcggtgcaggcatgttttccatccctgtgatgactgcgggtgtctggtttaccggctccgttctgctgctgatttacacctggttttgtatgtatacctccgggctgatgatcctcgaggcaaacctcaattatccgtcaggctccagctttcacactattaccaaagatctgctgggtaacggctggtcagtgattaacgggctctccatcgcctttgtgctctatattctgacttatgcatatatctcggcgggtggttcgatgctgcaggaaaacctggcagcacgcggactcaatatcaccccggcgatgagcggaattttctttgccgccgtggtggccgtgattgtctggatttccaccaaagccgttgaccgcctgtgcaccattttaatcggcgggatggtgattgcatttgtgatgtccgccggtggcatgatcacggaagtgaaaaccgcggtgttatttaacacacaggacccggaagcccgttatctgccgtatgcgctggtggcgctgccgttcctgctgacctcattcggcttccacggtaacgtgccgggtctggtgaaatattaccgtaatgacgcgaaatccgtggtacgcagcctgcttatcggctccctgatttcgctggtgatctatatcttatggcagctggccgctcagggtaacgtcccgcgcgaaaactttaagcaggttatcgcggaaggcggcaatatcaccgcgctgttaaaccagatgaaagcggctatcaacagcgacaccacggtgcagttacttaatgccttcagttatatggcgctggccagttcattcctcggggtgtcactgggactgtttgactacatcgcagacttctttaagtttaaggataacggcaccggccgtctgaaatccgccgtgtttacctttgttccgccggcgattctggcagtgctgtacccggacggattcctgtatgccatcggctatgccgggctggcagcgaccatctgggcggtgattgtcccggcgctgatggcaaaagccacccgccgccgcttcccgcaggcagcctaccgggtgccgggcggcaatgcgatgatcatctttatcattctgttcgggcttctcaacgccgtcacacatattttatccatgatggatctcctgccggtttaccgctga

SEQ ID NO: 275915 - DNA, 423 bp, Morganella morganii
atgtcagtcgtcgtcggtaccggggtggttattatcaacagcaaaggtgaggtgctgctgggtaaacgcagcggtaaacatgcgccatactggtccattttcgggggacatgttgaccccggtgaaacctttgaagcctgcgctatccgtgaaattcaggaagagatcggcattacccttactgacccgaaggttatcgggctgtgcaataacctggaaacataccgggcggaaggcaagcatactgtgtctgtctgcctgctggcacactatgacagcgatacgctgccggtgatccgggagccggataaatttgacggtattatctggtgctcaccggacaacctgccggagccgcattttgaagccagccgcaacgccattcatctgtggcagaccggtcagttttatctgacaaaataa

SEQ ID NO: 275916 - DNA, 1005 bp, Morganella morganii
atgctgcataatattactaatgattataacccgttagccaaaaataacagagggagcacccggctgatgacccgtcgagtagccacaattaccttaaatccggcctatgaccttgtggggatgtgtccgtcccttgtcccgggcgaggtgaaccgtgtcagaacggtcgggttacatcctgcgggaaaaggcattaatgtcgccaaagttctgcgcgacctcggggtggatgtgactgtcagcggctttctggggaaggataatcaggaagaatttcagcattttttcagtgagaacgggctggcaaaccgcttccatgtgatcccggggcgcacccggatcaacgtgaaactgaccgaaaacagcggcgcggtgacggatctgaatttttccggtttccgtatcaccgaaagcgagtggcagaagtttatggccgattcgctgacctggctcgggcagttcgatatggtggtggtcagcggcagcctgccggaaggtgtggatccggcgtggttcaccacctggatgagccgcctgcgccagctgtgtccgtgcattatttttgacagcagccgtgaggcgctggtggccggtctgaaagctacgccgtggctggtgaagcccaaccgtcatgaacttgaggtctgggcgggtaaaccgctgccggaactgaaggatgtgattaacgccgcccatgccctgcgggacaaaggcattgcccatgtggtgatttcgctgggacaggaaggggcgctgtgggtgaatgcctccggtgcctggcgtgcactgccgccgcattgcgaggtggtgagtactgtcggggcaggggattcaatggtcggcggcctggtatacggactgctgatgagccagagcagcgaacacacgctgcggatggcgacagcggtgtctgcactggcagtgagccagcccggcgtcggtgtccgtgaccgcgccgaactggctgcaatgatggcaaaaattaaactcagcccggtggtataa

SEQ ID NO: 275917 - DNA, 843 bp, Morganella morganii
atgaaatatgtcggagcacacgtcagcgccgccggtggtgttgatcaggcggttatccgtgcgcatgaactgggcgccacagcctttgccctgttcaccaaaaatcagcgtcagtggaaagctgcccctctgccggaaaacgtcatcgcggcctttaaggccaactgcaaaaaatacggctacggccacgggcagatcctgccccacgacagctatctgattaacctcggccatccggaaacagaagcactggaaaaatcccgcgaggcatttcttgatgaattgcagcgctgcgaacagctcgggatcgaccgtctgaatttccatcccggcagccacctcaataagattgaggaaaatgattgtctggcgcggatcgcggaatccattaatattgcgctggataaaaccagcggtgtgattgccgtgattgaaaataccgccggacagggcagcaacctcgggttccgctttgagcaactggccgccattattgacgatgtggaggataaatcccgcgttggtgtctgtatcgatacctgtcatgcgtttgccgccgggtatgatctgcggacaccggaaacctgcaaagccacctttgcggattttgaaagcattgtcgggtttgagtatctgaagggcatgcacctgaatgatgcaaaaagtgaattcgccagccgtgttgaccgccacgatagtctcggtcagggtaaaatcggcaatgcaccgtttgagtttattatgaaagataaacggttcgacggcatcccgatggtgctggaaaccgtaaatcccgatatctgggcgcaggaaattgcctggctgaaatcgctggagaaataa

SEQ ID NO: 275918 - DNA, 1089 bp, Morganella morganii
atgtctgaaagtcatatcaaaaccgaaaaagcccgctgcacagcaaaaccgatgtggctgagactacttccgggctttgccctggcgggggttctgaccaccgccgctatgctgctcggggaaatgccctggtttatcaacctcgggctgggcgcactgacactggctattctgctgggaattattgccggtaataccgtttacccgcatatcaaaccacagtgcgaagccggggttgggtttgccaaacactattttttacgggcggggatcatcctgtacggcttccgtctgacatttcagcagattgccgatgtcgggatcagcggcgtgattattgatgccgtaatgctgaccagcaccttcctgatcgccatgtatatcggacgtaaatggttcgggctggacagagaaaccgtcattctgattggtgccggcagcagtatctgtggtgcggcagcagtgatggccaccgagccggtggttaaagccccggcaagtaaagtggcggttgcggtctccacggtggtgattttcggcaccatcggcatcttcctgtacccgtggctgttccatctcaatgccgcactgggctggctgccgttcaccgacatgagtttcggggtgtatgccgggtcttccgtacatgaagtggcacaggtagtggcgattggtcacaccatcagcccggatgctgaaaacagtgccgtgatcagtaaaatgatccgcgtgatgatgctggcaccgttcctgctgattctgtctcagtatctgatccgtcagaaaagcagtgccgggggcgcggcgaaggaaaaatccaaaatcactatcccgtggtttgccgtcttctttattctggtggccggatttaactccttccatctgatcccggaaattattgtccgccagattattgtactcgataccattctgctggcgatggcaatggtggcactcggcctgaccactcacgtcagtgctatccgtcaggccggtatcaagccgatgctgatggcgctggtgctgttcggctggctgattggcggcggtgcggcgattaacctgcttatcccgctgatcaccggctga

SEQ ID NO: 275919 - DNA, 867 bp, Morganella morganii
atgcgcatcacactgagacagctcgaagtctttacagaagttcagaagtccggttcgacgacacaagcttcccagcagttagcgctttcacagtccgccgtgagtgcctctctgacggatctggaaaatcagctgaatgttcagttgtttgaccgggtcggtaaacggctggtgaccaatgagcacggacgactgctgtatccgaaagccattgctctgctcgagcaggccggtgaaattgaacagctgtttaaaaccgatgcgggggcattgcgttttgcggccagtaccactatcggcaactatatgctgccggaaatgctgggggcataccgtgcagtgcatgaaaatacaccggttgaattatttatcgctaatactgaggaagtgattaaagccgtgctggagttccgcgcggatatggggcttatcgaaggggtctgccattccccggaactgattaccgagccgtggctggaagatgagctggtgattttctgcagcccggataatccgctcagtcagaaaagcaatgtgactcctgatgatctgaaaaatgtggcctgggttctgcgtgaacgcggttcgggtacacgggaagtgctggatcagatcctctttaaccgtctgccgggtttccgcgtggaaatggagctggggaattccgaggccgtcaaacacgcggtacgcttcgggcgcggggtcagttgtctgtcgcggcgggtgattgccgaacagctgagtaacgggctgttgtcagaggtgaagattgccgggcttaccctcaaccgcacacttttccggatttatcaccgtcagaaacatatctccaacgccctcaataccttcctgacctattgccgctga

SEQ ID NO: 275920 - DNA, 1482 bp, Morganella morganii
atgtctcagcaagcaaatcaaatcgcgggtgaacaaccgcagacactgcgccgtgaattaaaggcgcgccatctggcgatgatcgccatcggcggatctatcggtacggggctgtttgtcgcttccggtgccactgttgcccaggccggtcccggcggggcgctgttaacctatgccattatcggcctgatggtctatttcctgatgaccagcctcggtgaactcgcggcctatatgccggtatcgggttcatttgccacctacggcgccaaatatgtggatgaaggcttcggtttcgcactgggctggaactactggtacaactgggcggtgactatcgcggttgacctggtggcagcacagctggtgatgacctactggttcccggcggatcagatcccgggctgggtctggagtgcggcgttcctcgccatcatgttcctgcttaactttatctctgtaaaaggattcggtgaggcggaatactggttctccttaattaaggtcagtaccgttatcctgtttattgttgtcggcgtgatgatgatcaccggcattatgaaaggcggtgagggggcgggctggcataactggactgtcggcgaggcaccgttcaagggcgggtttgccgcaatgatcggggtggcaatgattgtcggcttctccttccagggaacagaacttatcggtatcgctgccggtgaatccaaagatccggccaaaaatattccgaaagcagtgcgtaaggtgttctggcgtatcctgctgttctatgtgctggcgattctggtgatcagcctgattatcccgtacaccgacccgaatctgctgcgtaatgatgaaaccgatatcagcgtcagtccgttcaccctggtctttgaacgcgccggtctgctctctgcggcagcagtgatgaacgcggttatcctgacagcggtactgtctgcgggtaactccgggatgtatgcctccacccgtatgctgtacaccctggcaaaatccggcaaagcaccgaaactgtttgccaaactgtccaaaggcggtgtgccgcgtaacgcgctgattgccacgacggtgattgctgcgctctgcttcctgacatcgatgttcggtaaccagtccgtgtatctgtggctgctgaatgcctcggggatgaccggctttatcgcctggctggggattgccatcagccactaccgtttccgcagaggctatattaagcagggctatgacctgaacgatctgccgtaccgctccggtttcttcccggtcggcccgatcttcgcctttattctgtgtctgaccatcacgctcggccagaactatgaagccttcctgcaggatcagattgactgggtgggtgtggtcgcgacctatatcggtctgccgctgttcttcgccatctggtttggttataaaattgttaagcgtactaagtttgtccgctacggcgaaatggactttccggccagccataaataa

SEQ ID NO: 275921 - DNA, 1125 bp, Morganella morganii
gtgaaattagtatctgtagcaaaagggctgaccatgagcctggcagcaggggctgttctgatgagcagtgcagcatgggcggaaacagtggttgatgccgcaggacgtacagtggaagtaccggaaaaagtggagcgcatcctgttaggggaagggcgtatgatccacgcggtggcattgctggaaggggataaaccgctggcacgtattgccggctggcagggtgacttccgcaaactcgatccgcagtcttatgctgtctacaaagctaaattcccggaaatcgacaagatcccgctgatcggtaacacgacagaggacagcgtcagtgcagaaaaagtattaaccctcaatcctgatgtggcaattttcggcctggccggtcacggaccgggtaaaaacagcgagctggtcggtcagctggaaaaagccggtatcccggttgtctttgtggatttccgcaacgaaccactgaaaaacactctgccgggtatgcgtgtgctgggtaaagtgctgcaccgcgaagaaaaagccaaagcctttgaagatttctatcagaagcagatgaagttagtcactgacgtgacagacaaaatcccggaagataaaaaaccgaccgtctttatcgatctgcgcgccgggtctttccctgactgctgcggtactgccggtaacggtaacctcggtaactttatcgatctggcgggcggtaaaaatatcgccaaagaggttctgccgacaccattgggtaccatgaacctggaaaaagtgattgcggcggatccggatatctatctggtcagcggcgcgaaagccccgggcagcaccgatgcgggtgttcagctgggtgcgcaggcaacagaagcggatgccaaagccagtctgaaagccattactgaacgtaagggcatcaatacgctgaccgcagtgaaagaagggcgtgactatgctatctggcacaactattataactcaccttataacgtgattgccgcgcaggcctttgccaagtggttctatccggaacagtttaaagatctggatccgaagaaaaccatggatgacatgtacagtcagttcctggctgtcgaaccaaccggcacatactgggtcagcggtaaataa

SEQ ID NO: 275922 - DNA, 1098 bp, Morganella morganii
atgagtattaccacagaagcaatgctacagacgaagccggaacaggcaggcagtgaattaagctgtgatgtgaaatcacattaccggcgtgtactgcgcaggcggctgatgtggatgtttgcggtggttgcggtaatactctgtaccgtggtgctcgatttcaccatggggccgtccgggctgacccttgatgcactctggcagaccctggtgtcgccggaaagtgtatcagcgggcacccgtgtgattgtctgggaaatacgtctgccgtatgccctgatggcagtggtggtcggcatgtctctcggtcttgccggggcagaaatgcagactatcctcaataacccgctggcgagtccgtttaccctcggtgtctccaacgccgcatcgtttggtgcggcgctggcgatagtcctcgggattggtattccgggcgtaccggatcagtggtttgtttccgcgaacgcctttatttttgccctgttttccgcgctgatgcttgacggcatcacccgctggacacgagtggcaacctccggtgtggtgttattcggtatcgcaatggtctttacctttaacgcactggtatcaatgatgcagtttatcgccacggaagacaccttacaggggctggttttctggacgatgggcagcctggcgcgcgccacctgggtgaaactgggtgtgatgacactggcctttgccattctgctgccgatttccatgagtaactcgtggaagctgaccgcactgcgcctcggcgaagatcgcgctgtcagttttggtattaacgtgcgccgtctgcgtctcggtacgttgctgcgcatcagtattctgaccgcgctggcggtggcttttgtcggcccgattgcgtttatcggcctggtcgcgccgcacattgcccgcatgatgttcggtgaggatcaccgtttctatctgccggcgagtgcattaatcggggcgctggtattgtcgatggcatccattgcctcgaaaaatctgattccgggcgtgattattccggtcggtattgtgacatcactggtaggtgtgccgttcttcctgagcatgatcctgcgtcataaagggagcatgtaa

SEQ ID NO: 275923 - DNA, 819 bp, Morganella morganii
atggacctgaatgcaatgtctgctcagagcgggttacagattaaacacttcaatgccggttatccgaaacggaaaatcattgaagacctgaatgttgagcctctgccgcgcggtaaaatcactgtgctgctcgggccgaacggcagcgggaaatcgaccctgctgcgctctctggccggtctgaacaaggcagagggacagttactgctcgacggtcatgacctgacgcggatgaattttgccgaacgcgcgaagcaggtggtttatctgccgcagacactgcctgccggggtgcacctgcatgtgctggaatctgtgattgttgcacagcgggcatccggcggcgtttctgaccgcgacagcgagcaggaagtgatgtctctgctgtcacaattaggcattgaacatctggctctgaattatctggatcagttatccggcggtcagaaacaattagtcgggctggcacaatcgttaatccgtcagccgacactgttattactggatgagccgttgagtgcgctggatttaaattatcagtatcacgtaatggatttggtgcgccgtgaaactcagcgccggaatattattacggtggtggttgtgcatgatattaatatcgcgctgcgtcacggtgatcatatattaatgctgaaagacggaaatttaattgcggaaggggatccggaagcggttattacaccggatagcctggcaaccgtctatggtgtgcgcggccgtattgagcactgctcacagtctgtgccgcatgttgtgattgatggcctggtgccgcgcgcggttgcggcactggcataa

SEQ ID NO: 275924 - DNA, 1965 bp, Morganella morganii
atggttattttttcaaaacgaaaagtggcggtatgtgttatggcagcactcgccgctcaggtgatggttgctcaggctgcaaataaagaagacgtgatcgtggttaccaccgcatccggcttccagcagaaaattgaggatgctgcggcgactatctccgttgtttcacgcgaacaactggaagataaagcctaccgcgatgtgaccgatgccctgaaggatgtaccgggtgttgtggtcaccggcggcggtagctcgtcagatatcagtatccgcgggatggatccgaagtacaccatgatcctcgtggacgggaaacgggttgccagccgcgaaacgcgccctaatagtgataactccggtattgaacagggatggttgccgccgctgactgcgattgatcgcattgaagtggtgcgcggaccgatgtcttcactgtatggttcggatgccatgggcggggttatcaatattatcacgcggaaagcgcagggtgagtggcatgcgagcgtccggacagatgcaaccattaccgaacgcaaagacagcggtaacaccgggcagggaagcttctttgccgccggtccgctggtggataacctgctgagcatgaaagtgaatggccagtattctcatcgcggggaagataattttgcgaacggctttaaccgccagattatgaccagcggcggcggtacactgacattaacgccggatgagcagaacagcatcgattttgatttcaaaaaagataatcagcatcgtgattcccgtctcgggaaaagtgcctctgcgcgcagtaaagaaagcagcttcagcaagtatgagatgtcgcaatatgcgattacccatgacggtaactatgactggggcagcatgaacagctatgttcagcgtaatgaaaccaaaaacccgggccgtaatatggagtattacgacactatcgcccgtaaccagactgttatgccgctcggcgaccatatgctgagcctcggcggtcagtaccgtttcgaagagctgaaagatcagggtaataaattagccggcaataaactcgatcgctacagctgggcactgttcgcagaggatgactgggcgctgaccaatgatttcactctgaccggcggtctgcgtatggataaggatgaaaacttcggtacgcactggacaccgcgtgtttacggcgtgtggcatctggatgagagctggacagtgaaaggtggtgtgtccaccggttaccgctcaccggatctgcgtcaggcaacggcatcctggggacaggtgaccggcggcggcagtctgaacggtgttattttcggcaacccggatctgaaaccggagaaaagtgttaccgaagagatcagtgtgctgtggaacaatcaggataacctcaatatgagcctgacggtctttaacactgactttaaagataagatcactgaaatccgccgttgtggtacaggaactaatactatctgtacggaaaaagatccggataacaacacttacgatttcatcagtgaccgtatcaacgtcgataaagccaatatgcgcggtgtggaagcgattatgaactggcagattgtggaatctgtggatctgtcagcgaactataccttcaccgattccgagcagaagagtggtactttcaaaggtaaaccgctgaataagatgccgaaacatatggctaacgcgacactgaactgggataccacgcaggatatcaaaacctggagccggattaacttccgcggcaaaacctccgattacctgtcccgtaccagcatggcaacaggaaccggctcttatgctaccgtggatatcggcggcagctatcagctgaataaagacctgaactttgtggcgggtgtgtataacgtactggatcgccgtattaataatgaaaactacggcgccacactcgacggccgccgttacaatatcggcctgaattataacttctga

SEQ ID NO: 275925 - DNA, 1380 bp, Morganella morganii
atgtcgcataatactaccctcgatattggcctgaatcgtacagctgccaataaccgcgtacaactcgcaaaaacacttaccctcgttcaggttgtcatgatggggcttgcgtacctgcagccgatgactatctttgatacgttcgggattgtgtccgaaattaccagcggtcatgttgcgacctcttatgctatcgcactgacagccattctttttactgcgctgagttacggcaaactggttaaacggttcccgtccgcaggctcggcgtatacttatgcccagaaatccatgagtccgcatatcggctttatggttggctggtcatcgctgctggactacctgttcatgccgatgatcaacattctgctggcaaaaatttatcttcaggcaatcttccctgactgtccgccatggattttcgtcgcgggtctggttttcctgatgacattatttaacctgcgcggcatcaatgttgtggcaaacctcaataccgggattgtactggtacaggttgcggtgatgattgtgtttgtcggtctgctggtccgtggtgtgtctgcgggggaaggggctggtacgctgctctccttccgtccgtttgcttccattgatgcggaactgatcccgatgataagcggggcgaccatactgtgcttctccttcttaggatttgacggtatcagctcactgtcagaagaaacaccgaatgccgggaaagtgatcccgaaagcgattttcctgaccgcactgattggtggtctgatctttatcgcggtgtcttatttcctgcagctctatttcccggatgtgtcccgtttcaacaatccggaagagtcacagcctgaaattatgtacatggtggccggtgccttcttccagtctatcatcctggtgttctcctgcgtgaccgtgctggcttccggtatggcggcacaggcaggggtatcccgtctgatgtatgtgatgggccgtgacggcgtgttcccggagaaattcttcggctacgtgcatccgaaatggcgtaccccggcactgaacgtgctgttggtgggtgtgctggcgatgagtgcagtctggtttgatctggttaccgcaaccgcactgattaacttcggggcactggtggcgttcaccttcgtcaacctgtctgtgatttcacagttctacatccgcgagcgccgcaacaagacgctgggcgaccagattaactatctgctgctgccgattatcggtgccgcgacagtgaccgtgctctggttcaacctcgatgcgaaatcgatggaactgggtctgagctggggcgcgctgggtctgatctatatgttatggctgacccgccgtttccgccgtccgatgccgcagatgccggaacagtaa

SEQ ID NO: 275926 - DNA, 786 bp, Morganella morganii
atgtatattgagcacagtctgatggcagactatttttatgcgggactggcactgctggtcatcgcctcttttgtggccgggtatattgattcgattgccggcggtgcagggctgattctgatccccgcctttatgctgaccggtctgccgccgcatatggcgctgggacaggaaaaactggtgagctctgtcggtacgctggcggccatttctaatttcattaaaaacaaatcggtttactggcagataattccggccgggattatttcatcattcttcggggcctgggtgggcgcgaaagcgattatatatctgccgtctgaaacgattacctatattattatctgtatgctgccgatcggcctgctggctgccttttttaaaggaaaactaggtggtgcacaacagggcagtgccgtacgcaaatccgtgtggctggtctttttcacctgttttattgtcggtttctatgacggctttttcgggccgggtaccggcagtatctttattatctgtctgtttctgatcaataacctcgatttactgaaatcctccgccacctcaaaaatctttaacctggcgtcgaatgtcggcgggctggtcgcctttattatggccggacatatcgcgtttctgctcagtatcccgatgatcgccgccagtctgctcgggaatcacctcggcagtcagcatgctatccgcaccaacggagaaattgtccgtaaaatcctgatcctgacagtcgggattatgatggtgacgctgctgatcaatctgttcagatag

SEQ ID NO: 275927 - DNA, 1746 bp, Morganella morganii
atgatcaacagtcagcaacctgacggcgcacgtcttattcagacactgaccgatattgtcagtcataaacacattttaacagagccgcgtaagacggaacgataccgcaaaggctttcgttccggagaaggcagcgcgctggcggtggtgttcccgggcacactgtatgaactgtggcaggtgtttaaagccgcggttgaagctgacagaattgtgatcatgcaggcagctaataccggtctgaccgaaggctccactccgagcggggatgattatgaccgtgaaattatcattatcagcacgctgcgtctggataaaattcaggtactgacaaaacagcagcaggtggtggcactgccgggcagcaccctgtggcacctggaaaaagtactgaaaccgctgggtcgtgagccgcattccgtcattggttcttcctgcatcggggcttccgtagtcggcgggatttgtaataattccggtggctcactggtgcagcgcggtccggcttataccgaactggcgctgtacggccgcgttaatgcggacggtaccgcagagctggttaaccatctggggattgatttgggttcaaccccggaagagattctgaattgtctggaataccggcaatatcaggatgcggatattgaggacacggataaaccggcctctgaccatgattatcatcagcgtatccgtgatgtggatgcggataccccgtcccgtttcaacgccgacgaacgccgcctgtttgaagcctccgggtgtgccggtaagctggtggtatttgcggtgcgccttgatactttcccgtctcagggagagagcaaagttttctatatcggcaccaacacgccttcggtgctggaagatatccgccgtcatattcttgcggattttgagcatctgccggtggccggtgaatatatgcaccgcgaatgttatgacatcgcaaaagtctacggcaaagacagcttcctgatgattgataaactcggcactgaaaaaatgccgaagctgttcactatcaaagggcggatggatgctgttttcaataaaatcccgctgctgccgaaaaacctgattgaccgcacaatgcagttattcagccatctgtggccgaaccatctgccgcgccggatggaagagtaccgcgataaatatgagcatcacctgatgctgaaaatggccggagaggggattgatgaagcccgccgctggctgagcactttctttgacaatgctgagggtgctttctttgagtgtgatgccaaagagggggcggatgctttcctgcaccgctttgtggccgccggtgccgccatccgctatcacgcggtcaacagcagcaaagtggaggatatcctcgcactggatattgcactgcgccgtaatgatcaggcgtggctggaagtcctgccgccggaaattgagagcaaactggtgcataaactctactacggacattttttatgccacgttttccatcaggactatattgtgaagaaaggcgtggatccgcatgcgctgaaagaggaaatgctggaaatcctgaacacgcgcggggcggaatatccggcagagcataatgtcggccatctgtataaagcgaaacctcagctgaaagccttctataaagccaccgatccgaccaacaccctgaacccgggactgggcaaaaccagtaaactaaaatactggggggaagggcaagaaggatgcagctgcggaaagtataatcagtaa

SEQ ID NO: 275928 - DNA, 303 bp, Morganella morganii
atgattatgtttaaaagactcaagaatgccttcggcaaagcggttcaggtcaagtgccataaagcagaggtgctgcataacctcagcacggatgagcgggcgctgattgtgtatatcctgaatgcccgtgatgaaaatgtcagtatcggcattaagcacagcagtgcggattcactgatcaccaaaggggtgctgaaagagctggggcgggatacagagagccgcacgcggctggtctctgtttgtccgaagtacagggaatccctgtgccgggtgttctataccgctaataaagcgggatga

SEQ ID NO: 275929 - DNA, 1419 bp, Morganella morganii
gtgtcttcagcacaatttttctttcacgattacgaaaccttcgggcaggatcctgccggtgaccgcccggcgcagtttgccggtgtccgtacggacagcgaattcaatattatcgccgacccggtgatcgcctactgcgccccggcggatgattatctgccgcagcccgctgcggtgatgataaccggcatcacgccacaggaagccctgcagaaaggggttaatgaagcgcagtttgctaagctgattcatgacacctttacacagccggacacctgtattctcggctataacagcattcgttttgatgatgaagtcacccgtaatattttctaccggaatttttacgacccgtatgcctacagctggatgaaccgcaattcccgctgggatctgatcgatatcacccgcgcctgctatgcgctgcgtccggacggcacaaactggccggagaatgacgaaggactgccgagctttaagctggaacacctgactgctgccaacggtatcgctcatgaaaatgcccacgatgcgatggcggatgtgtatgctaccattgccatggcaaaacagctgcgcggtgcacagccgcgtctgttcgattatttcttcactctgcgcgataaacgcaaactcgcggcactgattgatattccggccatgaaaccgctggtgcatatctccggaatgttcggggctgtccgcgccaataccagcctggtggccccgctggcatggcatccggataaccgcaatgccgtgatcatgtgtgacctcgccggtgacctgaccccgctgctgacactggatgcggatacactgcgcgaacacctgtacacccgccgtgatgaactgccggaaggcgcaatcccggtaccgctcaaactggtgcatatcaataagtgtccgatcctggcaccggaaaataccctgcgcccgcaggatgcacagcgtatcggactggataaagacctctgtgcccgtaatgcagagttgctgcatcagcatccggagatccgcgagaaagtcgtggcggtgttcgcacaaccgcgtgagtttccaccgcagaatgatgtggatcgcatgatttatcagggctttttcagtgattcggataaagcggccatgacgattatccgcgaaacagatccgaaaaatctgccggcactggcactgagttaccaggatgcccgtctgccggagttactgttccgctaccgcgcccggaattttcccggcacactggatgagcatgagcagcagcgctggcttgcccatcgccgtgaggtctttaatcaggataatttaacccgttattttgagcagattggtgaaatgatgcaggaatatcagcatgatgccaacaaaacagaattactgaagaagctggtgcaatacgcgcagcacctggcgcagtaa

SEQ ID NO: 275930 - DNA, 327 bp, Morganella morganii
atggacaacacaaccaagccttcctttcacaatgtcctggagttcgttcgtatgtttcgccgtaaaaacaaaatactgcgtgaaataactgacaacgaaaagaaaattcgtgataaccagaaacgtgtacttctgcttgataacctgagtgaatacatcaagccgggtatgtccattgaagatatccgggctatcattgccaatatgcgcagtgactatgaagatcgtgtggatgagtacatcatcaagaatgcggatctgtcaaaagagcgccgtgaaatctccagagaactcaaagcgatgggcgatatcaaagatattaagtaa

SEQ ID NO: 275931 - DNA, 381 bp, Morganella morganii
atgccttgcgtagtgagcgttcatgctgatgtcgagatgccggatatcgcaaacagttacgctaaggctttagagacgtggaaaaactcacggattttacccgaccgcttcggtaatgaaggtcagtgggagagtaattcaagactgtgcgattctttcgtctataaactgcatatccggttaccgtcagaacccggatggaaaaaaaccaaagcacagattgacaggcactccaatcattatcttgtcttttcaagacactggcttgattacgacaatatccaaatcatcagcatcatgagccctgacggccacgaaaaagccagaacatcttatatgtatgagttagaacggcgggcagaagaatttcagagcagttaa

SEQ ID NO: 275932 - DNA, 612 bp, Morganella morganii
atggtgaaaaagacaacccagacaacagttacggcgatcgtggcaagccttatggcttcgctcgctcctgtccctgctcagagtaccactctgcctgcaactgctgtggaaatcagtgcaaaccatggtgtggctgcctctctcacatttaaccttcccggaggcgtcgttttcctgcctcttgaagaggctgctgattatctgaatcagattaatgaacgtcagcgatcacttcttaataccgtcgtgcaggacagacaaaaccggggaaaaggtgccctttttacattcaccccgcgaatgaaacgtctgtgtaccgatggccttaaacatcatatgcgtgtgaaagaagctatccggcttgttatgacaaatgacaatctcagtaaagcctttccgggtgacctgaaacaacagacaaaatataaagctgacctgctccgcttcggccgggcagtggcacagagtgaattcatcctcagagatacgttgtcactcattgagcaaagtgaatcccctgaaaataccgtgcatttaacagatatgccggatgacagtgaagtgcgtgcctggattgcagctgagcacaaaaaactcaagttaccggtatag

SEQ ID NO: 275933 - DNA, 3165 bp, Morganella morganii
atgaaaagaatgttaatcaacgcaactcagcaggaagagttgcgtgttgcccttgtcgacgggcagcgcttgtatgatctggatatcgaaagccccggtcacgaacaaaaaaaagcaaacatctataaagggaaaatcacccgtattgaaccgagtttagaagctgcttttgttgactatggcgcagagcgtcacggtttccttcccgtcaaagaaattgcccgcgagtatttccctgctaattaccacgcttccggccgcccaaatatcaaagatgtcctgagagaaggtcaggaagtcattgttcaggtggacaaagaagagcgcggtaataaaggcgcggcactcaccacttttatcagcctggccggcagctatctggttctgatgccgaataacccgcgtgccggggggatctcccgccgtatcgaaggggatgaccgcaccgagctgaaagaagccctgtctgccctggatatcccggatggaatgggtctgattgtccgcaccgccggtgtgggtaaatcggccgatgccctgcgctgggatctcgagtaccgtatcaagcactgggaagccatcaaaaaagttgctgaaggccgccctgcaccattcctgatccatcaggaaagtaatgttatcgtccgcgcgttccgtgattacctgcgcccggacatcggtgaaatcctcatcgataacccgaaaattctggaactggcacgcaagcacatcactgctatcggccgtgcggattttgccagcaaaatcaaactgtatcagggcgaagtgccgctgttcagtcactatcagattgagtcgcaaattgaatccgctttccagcgcgaagtccgtctgccgtccggcggtgcgattgttatcgacaccaccgaagccctgaccgctattgatatcaactcctcccgctcaacgcgcggcggtgatatcgaagaaaccgcttttaacaccaacctggaagcggcggatgaaatcgcccgccagctgcgtctgcgtgacctcggcggcctgattgttatcgactttatcgatatgaccccggtccgtcatcagcgcgaagtggaaaaccgcatgcgcgaagctgtccgtcaggatcgcgcccgtatccagattggccgcatttcccgctttggtctgctggagatgtcccgtcagcgtctgagcccgtcactgggtgaatcaagccatcatgtgtgtccgcgatgcagcggcaccgggactgtgcgtgataacgaatcactggcgctctccattctgcgtctgattgaagaagaagcgctgaaagaaaatactcatcaggtacacgcgattgtaccggtaccggtcgcctcttatctgctgaacgaaaaacgccaggctgtcagtgcgattgaagcacgccaggccggtgtcagcgtgattatcgtgccgaacaaccagatggaaaccccgcactttcgtgtggtccgtgtccgcaaaggtgatgaaatcggtaccctgagctaccgcctgccggagaaatacgaagcggaatccgctgccggtgaagaagaggaaactcaggaacgccgtgcaccggaacaaccggctatcaatgcctttgctatcacctccgatgcaccggtaccggcacagactgccgcaacccgcaaaccggaaagcaaacgcgataaccgtcaggacaagcaggcacctgcggcttctgaaggtggtttcttcagccgtctcatcaaaaaactgttcggctccgcacctgctgtgccggaagaaactgaacagaaagagaaaaaacagactaacgacaacaaccgccgcggcgggaatgatcgtaacaaacagcgccgtaaccgccgtgaccgtaatgatcgcaacggcgaacgtaccgagcgggctgaccgtcctgagcgcagtgaacgcagtgataacgaatcgcgcaacaaacgcgatcgcgatactgtgaatgagccgcgtaaaggccgtaatcagaatacaccgaacgaagatctgacaccggaagaactggccgcccgcgaagcacagcagcagttacgccgtgaacagcgtgcagagcgtcagcgccgccgtcaggacgaaaaacgtgtccagcaggatgcgaaaaaactgcgcgcccagcaggaagatcaggatgtactgaacagtgacggcaatacggaagatgatgatgcaccgacaccggttcgtcagcgccgtacccgccgtcagctgaacggttctgtccgtattactgatggtgaaacacagactaaaccggctgttgcagcaccggttccggttgttatcgataatgcaccagtggcagttcctgcggataccgacgtaccggcagcggctgaaaacaatggtgatgaggcacacagtgataacatcctgccgcgccgctcccgccgttcaccgcgtcatctgcgtgtgagtggtcagcgccgccgccgttaccgtgaagaccgtcagctgacgcagtctccggttccgctggaaatggctgtgttctcccctgaactggcttccggtaaagtgtggatccagtatccggttgtggcacctgctgcacaggcagaacaggaaatcgcagctgagacaccggaaatcaccgaaacaaccgctgtgattaccgaaaccgctgttgttgctcaggtgattgctgaaactacagaaaccaccgttgtggcagaacagttctctctgactgtcgcatctgaggctcctcaggtcactgctcatgaagaaacacctgttgcggatactgtcactgaatctgtaccggctgaagagcctgtacaggaaaatgcggacattatcgctgatgagcctgttgtggctgacgtgattgttgctgagccggttgctgtcactgaacctgttgctccggttgttgttgcagaaccggaagtgattgcagagcctgaggcagttgttgtgactgaacctgttaccgcaccggttgcggctccggttactgaaacaactgtcgttgctgccggccgtcatgcttattcaccgatgaccaaagcccctgctccggcaaccaccggcgaagcctttgttatcaccgaatatcagcgtgaagcccgtaaagcctatgcgctgcacggtgcaggcggtcatgcggccaccaaccatgccgcatcagagccgtcaaaaaccctgctctga

SEQ ID NO: 275934 - DNA, 960 bp, Morganella morganii
atgaaaactgataatcagacagttcaatttgttgttgtgtccggcgatgaagccggccagcgtattgataatttcctgctcgcgcgcctcaaaggggtgccgaagagcatgatttaccgcatcatccgtaaaggggaagtgcgtgtcaataaaggccggattaagccggaatacaaaatcgcggacggggacagcatccgtatcccgccggtgcgtgtggctgagaaaaacgatgccccggtgtcggcgaaactggataaggtttctgcactcgcagagtgcgtattgtatgaagatgatcatattctggtgattaataaaccggcgggtacggcggtacacggcggcagcggtctgagtttcggtgtgattgaggcaatgcgcgcactgcgtccggaggcgcgtttcctggaactggtacaccggcttgaccgcgatacctccggtattctgctgatcgccaaaaaacgttccgcgctgcgggcactgcacgagcagctgcgtctgaaacagatgcagaaagattatctggcactggtgcgcggccagtggcaatcctcagtaaaagtggtgcaggcaccgctgctgaaaaatattctccagagcggcgagcgcgtggtgaaagtcagcccggaaggcaagccatcagaaacccggtttaaagtggaggagcggtttgactctgccacgctggttaaagccagcccggtcaccgggcgtacacatcagatccgtgtgcacacactgcatgcagggcatccgatcgcgtttgataaccgctacggtgatgtgcagtttgatgctcagctgaaagggacagggcttaaccggctgtttttacatgcggcggcactcgcctttacccatccgtccaccggtgaggcaatgcgtctccaggctccgctggatgaaaaactgcgccattgcctgacggtactgcggtcgaaacaggcaaaataa

SEQ ID NO: 275935 - DNA, 327 bp, Morganella morganii
atgaagctgaaaatgatcgctgccgcaacgctgctgttcagtgctgccggtctggctgccccgtcactggcggataaaacaacctttgttgccgactgtacaaaaggcgctgtgaccaacctgaaaaacccggagaaccgcagcaaagtcccggcagtctgtgagtgtgtgtatgacaactcactggcgaaattcggcaaagacgggctggaaaaactggatgaccgggtccgcaaaggtcaggcgctgaccgaacaggactctcaggcgatcggagagattgcacagagctgtaccacaaagattatcggtgtacagccgcagtaa

SEQ ID NO: 275936 - DNA, 591 bp, Morganella morganii
atgatctcactggttctcgcctccacctccctgtaccgcaaagctttgctggaaaaactcggcatcccgtttgtatccgccgccccggagacggatgaaaccccgcatccggcagaagacgcgcagtcactggtcatgcgcctggcgcgcgaaaaagcccgttcattaacgcagcagtaccctgacagcctgattatcggctctgatcaggtctgtgtgctggacggcgaaattaccggcaaaccgcatcattatgacgcggcctttgcacaactgcgcaaagcctccggtcagtgcatcaccttttataccgggctgaccctgtacaacagcgccaccggggaagatcacacgatatgtgaaccttactgtgtgcatttccgtacactggatgatgacgaaatccgtgcctatctgctggcggaaatgccgtatcagtgtgccggaagctttaaatccgaaggtttaggaatcgccttatttaaaaaactgcagggagatgaccctaatacactgataggtttaccgctgatccgcctgacagaattactgattcaggccggatacaacccactgcggatcccccgctga

SEQ ID NO: 275937 - DNA, 525 bp, Morganella morganii
atgcaaaagataaaattacctctgactattgatgcaaagcgcgccgcgcagaagcgtctggattaccgggggtgctacgcacccgagcaggttacgcggttagccgaatcggtagtcagtgtggacagcgatgttgatgttgatttgacgtttgaaatcgatccgcagcgtctgacagtcattaagggaacagcagaaactgatgtttcacttgagtgtcagcggtgtggtaatatcttcccgcttcatgtccgcgcaacgtattgtttcagcccggttgtcagcgatgaacaggctgaggcattaccggaagagtatgagccaattgacgtaaatgattttggtgagacagatttactggcaatgatcgaagatgaattaattctttctctgcctgtggttccggtacatgattctgaacactgtgaagtgtccgacgcggtgaaagtctttggtgagcttcctccggaagcagaaaagccaaatccgtttgccgcattagccagtttaaagaaaagtacttaa

SEQ ID NO: 275938 - DNA, 171 bp, Morganella morganii
atggccgtacaacaaaataaaccaactcgttccaaacgtggtatgcgtcgctctcatgacgcactgtcagcaactctggtttctgttgacaaaacctctggtgaaactcatctgcgccaccatgtgaccgctgatggttactaccgtggtcgtaaggtaatcaacaagtaa

SEQ ID NO: 275939 - DNA, 1005 bp, Morganella morganii
atgggtggggatatcggcccccatgtcacagtgcctgcctcgctgcaggcactggcatctaatccaaagctcaccctgttgctggtcgggcaccctgattccatttctcctctgcttgcaaaccagaatgctgagctgctcagtcgtctgcgggtgatccctgcctatgagacgattgccggtgatgccaaaccttctcaggctatccgccagagtaaaggcacatccatgcgtatcgcgctggaactggtgaaagagggggaggcacaggcgtgcgtcagtgccggaaacaccggggcgctgatggggctggcgaaactgatgctgaaatcgattgaaggcatcgagcgtcctgcactgatgaccgtggtgccgaatcagaagaaaggcaaaacggtgctgcttgatctgggcgcaaatgcggagtgcagcagtgagatgctggtgcagtttgctgttatgggcgcggtgatggcagaagatgtggccgggatcccgcatccgcgtgtggcattactgaacatcggcgaagaagaaaccaagggactcgacaatatccgcgaagcagccactgtgctgaaatcgataccggacatcaattatataggctatgccgaaggcaacgaactgctgaccggtaaaactgatgtgctggtctgtgacggcttcgcgggtaacgttaccctgaaaacaatggaaggggtgattcgtgtgatcctttctatgtttaaatcacaaaatgaaggcaaatcctcatccctgctgtacaaacttgtgaagaaagtggtgacaaaatggctgaataaacgcttcagtcacctgaaccccgaccagtataatggtgcttctctgttaggattacgcggcattgtgattaaaagtcacggtgcggcgaatgtaagtgcattcaacgctgccataacgcaggcggttcagactgttgaaaagcaggtgcctgaacgaatcgcatcccgtctcgctatggtattacccaagagtaactaa

SEQ ID NO: 275940 - DNA, 954 bp, Morganella morganii
atgtatacaaaaattttaggaaccgggagctatcttcctgcacaaatccgcacaaatgctgatctggaaaaaatggtcgacacaaccgatgagtggattgttactcgtacgggtatccgtgagcgccgtctggccggtgatgatgaaaccgttgttacgatggggcaccaggcagctctgaacgcactggatatggcgggtattcctgccggtgatatcgatctgatcgttgtgggcaccacctcttccacgcacggtttcccgagcgcggcctgtgaaatccagaaactgctgggcattgacagctgcatctcttttgatgtggcggcggcgtgtgccggtttcagctatgccatcagtgtggtggatcagttcattaaaaccgggatggcgaaaaaagccctggtgattggctcggatgtgctggcgaaaacgctggatccggcagatcgcggtactgttatcctgtttggtgacggcgcaggtgcctttgtggttgaagcctcagaagaaccgggcattctctccactcatttacatgcggacggccgctacggcgacctgctgacattaccgaataaagatcgcaaagacagcgaaaaaccggcgtacctgacaatggcaggtaacgaggtgttccgtgtggcggtccgtgaattagccaacgtcgttgaagaagcgctggtggcgaacaatattgataaatcagaactcgactggctggtgccgcatcaggcaaacctgcgcattatcagtgccacagcaaaaaaattaaatatgggcatggataaagtggtggttaccctggatcgtcacggcaacacctctgcggcctctgtaccgactgcattcgacgaagcggttcgtgacgggcgcatcaaacgcggtcagctgattctgattgaagccttcggcggcggttttgcctggggttctgcattaattcgtttttaa

SEQ ID NO: 275941 - DNA, 933 bp, Morganella morganii
atgtctgcatatgcaatggtatttccgggacagggttctcagtcagtcggtatgctggcggacctcgcggcaaattttccggtcgttgaggcaacctttgccgaagcatccgctgaactgggctacgatttatgggcactcgttcagaacgggccggaagaagaactgaataaaacctggcagacccagcctgcactgctggcggcctctgtagccatctggcgtgtctggcaggaaaaaaacggcgccatgcctgccatgatggccggtcacagcctgggggaatactccgcgctggtgtgtgccggtgtgatggattttaaagaagctatcaaactggttgaattacgcggccgcctgatgcaggaagccgttccggccggtaccggggcaatgtatgccatcatcggtctggacaatgatgctatcgccagagcctgtgaagaagctgcacagggtcaggtcgtatcaccggttaactttaactcgccgggccaggtggttatcgccggtgagaaagacgccgttgagcgcgccggggcattatgtaaggaagccggggcgaaacgtgcgctgccgttgtcggtcagtgtgccgtcacattgtgcattaatgaagccggctgctgataaattagccgttgcgctaaaaaatatcacatttaatacaccaatcttttctgttgtgaacaatgttgatgttaagatagagacttccgccgatgcaattcgtgatgcattagtccgtcagctttataatccggtgcgctggacagaaactgttgaatttatggccgcgcagggtattgaagatctgctggaagcagggccgggcaaagtactgaccgggctgactaagcgtattgtgaaaacattaacatcatctgctgtcaatgatatgtcatcattggaaacagcacttgaaaatcgctga

SEQ ID NO: 275942 - DNA, 735 bp, Morganella morganii
atgagctttgaaggaaaaattgcccttgtcaccggtgcgagccgcggaatcggccgtgcaattgctgagaaattagcagcacgcggtgcaacagtgattggtactgcaaccagcgaaagcggtgcggctgctatcagtgaatacttaggcgcaaagggtaaaggccttgccctgaacgtgaccgacagcgcatccattgaccatgtattagaaaatattcgtgctgagtttggcgaaattgatattttggttaataatgcaggtatcacacgtgacaacttactgatgcgtatgaaagacgatgagtggcaggatatcctcgacactaacctttcatccgtattccgtctgtccaaagcggttatgcgcgccatgatgaaaaaacgttgcgggcgcatcatcaccatcggttctgttgtcggaacgatggggaacgccggacaggctaactatgcggcggcgaaagccgggctgattggtttcagtaaatcactcgcccgtgaagtcgcgtcgcgcggcatcaccgtcaacgtcgttgccccgggttttatcgaaaccgatatgactcgtgcattgacagacgaccagcgtgcaggcattttatctcaggttcctgctaaccgtttgggtgatgctgaagagattgccagtgctgtagccttcttagcttctgatgaagcggcttacatcacaggcgagacattgcatgtcaatggtggcatgtacatgatttaa

SEQ ID NO: 275943 - DNA, 237 bp, Morganella morganii
atgagcgctatcgaagaacgtgttaagaaaatcatcgttgaacaactgggtgttaaagaggaagaagtaaaaaacgaagcttcattcgttgatgacttaggcgctgattctcttgacacagttgagctggtgatggctctggaagaagagttcgacatcgaaatcccagacgaagaagcagaaaaaatcacaactgtacaggctgctattgactacgttgagaacgcaggcaagtaa

SEQ ID NO: 275944 - DNA, 1245 bp, Morganella morganii
gtgtctgagcgtcgtgtagtcgtgaccggacttggcatgttatctcctgtcggtaatacagtcgattcatcctggaaagctgtgtgtgccgggcagagtggtatcagcctgattgatcattttgacacctctaaccatgcgaccaaattcgcaggtatggtaaaagatttcaatcacgaagattttaatatttcgcgcaaagatgcccggaagatggatctcttcattcaatacggtattgcagccggtatccaggcaattgcggattccggaatcgaagtaacagaagccaatgcaacccgtatcggagctgcgattggttctggtattggtggtctcggactgattgaagaaaactgcagctctctggctgccggcggcccgcgtaaagtgagcccgttctttgttccctcaactatcatcaatatggttgccggacatttaagtattatgtacggcctgcgcggaccaagcatttccattgccactgcctgtacatccggcgtgcataacattggtcatgctgcccggatcatcgcttacggtgatgcggatgtgatggttgccggtggtactgaaaaagccagcacaccattaggtgttgccgggttcggtgctgcgcgtgccttatccaccaataatgacaatcctcagggcgcaagccgtccgtgggataaagatcgtgacgggtttgtgctcggtgacggtgccggtatgctggtgctggaagagtacgaacacgcgaaaaaccgcggtgcgaaaatctacgcggagctggtcggtttcgggatgagcagcgatgcttatcacatgacatcaccaccggaaaacggtgacggtgccgcactggccatggcaaacgcgattcaggatgcaggtattcctgctgacagcatcggctatatcaatgcgcacggtacatccacctctgcgggtgatgtggcggaagcgaaagccgttgaaacggtatttggtgaaggaacaaacgttctggtcagttccaccaaatccatgactggtcacctgctgggtgcggccggtgcagtggaatccattttcaccattctggcactgcgtgatcagattgtaccgccgaccatcaacctggataatcaggatgaagcggtctgcaaactcgactttgtaccgggcaaagcccgcaaagtggaaggtatggaatacgcactctgtaactctttcggcttcggcggaaccaacggttccctgattttccgtaagatctga

SEQ ID NO: 275945 - DNA, 840 bp, Morganella morganii
atgacacaacagacgcattactgggttaatggtgtaccgcagcacaccatcgcgatttctgatcgcagtgtgcagtttggtgacggctgttttaccacgatgcgcattgtgaacagcaaaccgtcgctgctgtcacgccacctgcaccggctgcacagcggttgtgccgggctgggactgacaccgccggatgatgcattgctgacgcaatggataatgcaggccgcagagggtgcagcggatggtgtgctgaaagtgattatttccgccggtgagcaggggcgcggttatctgcgtgctgatgtaccgccgctggtgatcctgatccgctccgcatatccggaaagctatccggcattgcaggagcgcgggttatcggtggtgaaaagcccggtgccgttgtcggtcaatccgtatctggccggtatcaaacacctgaaccggctggagcaggtgctgatccgccgttatacggcagaacagcaggccgatgaagccattgtctgtgatactgacggcattctgaccgaaggatgcagcgccaatctgttctggcgctgcggcgatgatgtgtttaccccgtcactgcacaaatgcggtgtggccggtgtgatgcgcgcgcatatcatggatgtgctgaaaggcagccgttaccgctgttatgaaaccgaacgttttccgcaggtgctggcaaaagcggatgaagtgattatgtgcaacgcgctgatgccggtaatgccggtcaatgatatccacgcggatgcccgtcatcactggcattatacctcccgctcactctttacctggcttttgccgcactgcccggcagcaataccctga

SEQ ID NO: 275946 - DNA, 1023 bp, Morganella morganii
atgaaaaaaacacggattttccttgtgacatttttggtgctgtttgctgttgcgggcggcgtggcgtactggctttatcatcaggtgaacgcattttccggacaaaaaatttctgtcactgaagagaccattttcaccattccgccgggcaccggtcgtgtggcgctggagaaaaaactggcggaaagcgggatcatcccggaatcacacaattatgactggctgctgcaactggagccggatctggcaaaaatcaaagccggtacttaccgactgacgccggatatgacggtcaaaagcatgctgcaattgtttgtcagcgggaaagaggcgcaattcagtatccgttttgttgagggcagtaaattagcggactggcagaaaattttgtcagaagcgccgtatctgaaacagaccctcgcggatttaccggcagataaactgacagaaatactcggactgccggccggcagtcacctggaagggcgtttctacccggatacctatctctatacagcgggaacggaagacactcaaatcctgaagcgggcacatcagcagatggaaaccaaacttgcggcggcctggaagacccgtaacaccgacttaccgtatgcggatccgtatgaaatgctgatcatggcctcgctgattgaaaaagaaaccggcgtggacggcgaacgtaaaaaggtggcgtcggtctttatgaaccggctgaaactgaaaatgcgcctgcaaaccgacccgacggtaatttacggcatgggtgaacgttatcagggcacgatttaccgcagcgacctggcacgggcaacgccgtataatacgtatcagattgacggcatgccgccgacgcctatcgccatgccgggcagtgcctcgctggatgcggcagccaaaccggacaccaccggttacctttactttgtcgcggacggcaaaggcggacatgtatttaccacgaatctgcgggatcacaaccgggcggttgcggattaccgtaacggattaaaaaaacaatga

SEQ ID NO: 275947 - DNA, 639 bp, Morganella morganii
atgacaggcaaatttattgtaattgaagggcttgaaggtgccgggaaaaccacggcacgtcaggtgattgttgatacgctgcgtgaaaacggcatcactgacctggtctatacccgcgaaccgggcggcacaccgctggcagaaaaactgcgtaccctgattaaagacgggatcgacggcgaaacggttactgataaagcggaagtgctgatgttatatgccgcgcgtattcaactggtggataatgttatcaaaccggcactggcgcgcggacaatgggtgatcggcgatcgccatgatctttcctctcaggcttatcagggcggcggacgcggtattgatcgcaaactgatggcgtcactgcgtgataccgtactgggggatttttatcctgacttcactctgtatctcgacctgccgccggaaaccggcctggcccgcgcccgcagccggggcgagctggacagaatcgaacaggaatcactggatttcttccgccgcacccgggcccgttatctggagctggcagagtcggatccgcgtattgtgaccgttgatgcttcgcaatcaatggataacgttcatcaatcaatccgcactgcggtactgaactggctggcacagcagaaagaggtgtaa

SEQ ID NO: 275948 - DNA, 999 bp, Morganella morganii
atgaactggtatccgtggcttaatcctgtttaccgccagctggcaaccgcgtggatgtccggtcagggtcatcatgctttgctgctgtacggcattcccggcaccggtgctgatgagctggcctatgccctgacacggctgcggatgtgtcagcagccgcagggcatcaaaagctgcggggagtgccacagctgtaaactgatgctggcaggcacccatccggatttttatctgttacagccggaaaagggcaaatccgctatcgggattgatgccgtgagagccgtgacagaaaaattgtatgagcacgcccagcagagtggtgccaaactggtgcatattccgcaggcagaactgctgaccgaagcagccgccaacgccttactgaaaaccctggaagagccgacagagaatacctggtttgtgttgcaaagccagggaacggagcagttgctgccgacactgcgcagccgctgttttgcttatcatctggccccgccgtcagcggagaccggtttacagtggctgcaacgcgggcatccgcagtctgatgcggtgtcgcggcagacggcgctgaatctttgccacaatgccccggcggcggcactgtcactgctgaccaccgctgactggcagaaccggctgaatctgtttacccggctggcagagtccgtgcgcagcggggattttctgtcgctgctatctgaactgaatcatcaggatgcggaaaagcgcatcagctggctgaccaccctgtttatggatgcggtaaagtatcagcagaatatggcaccagcctgtctgaatcaggaccagtctgctctgattgcacaactggcagcgcattacagcagtgcacacttactgaatgcggcggaaagctggctgacctgccgccaccggctgatgaccatcaccggcgtgaatcaggaactgctgctgacagaacaattgttacaccaggaaacactgttttctgcatcacctaatttaaaataa

SEQ ID NO: 275949 - DNA, 780 bp, Morganella morganii
atgtttttagtagattcccactgccacctcgattgcctggattatgaaaaaaagcatgaaagtgtggacgatgttatgcaaaaggctgcgcagcgtgatgtgaaatacgcactggcggtggcgacaaccctgccgggttacacaaaaatgcgcgagctgatcggtgagcgcccggatgtggccttttcctgtggtattcatccgctgaatctggatgagccgtatgattttacacagctgcgtgaactggcagcggataaacgggtggtggccctcggcgaaaccgggctggattactactatcagaaagagaatgccgcgcttcagcgtgaggttttccgcgagcatatccgtatcggacgtgagctgaataaaccggtgattgtccatacccgcgatgcccgtgaagataccctggcgattatccgtgaagaacaggccggggagtgcggcggcgtgttacactgctttaccgaagacaaagagacggcctcagcgctgctggatgaaggtttttatatctccttttccggcattgtgacgttccgcaatgcggagcagatccgcgaagccgcccgcattgtcccgctggatcgcatcctggtggaaaccgattcgccgtatctggccccggtaccgtttcgcggtaaagagaaccagcccgcgtatgtgcgtgatgtggcggagtatatggctgtattaaaaggggtgagcgttgaggcgcttgctgagatcaccactgacaatttctgccgtctgtttcaggtgtctgttcggtaa

SEQ ID NO: 275950 - DNA, 351 bp, Morganella morganii
atggccgaagaaactattttcagtaaaattattcgtcgtgaaattccgtctgatatcgtctatcaggatgacagcgtgacggcgttccgtgatatttccccgcaggcaccgacacatattctgattattcccaaccatcttattcctactgtgaatgatgttaccccggaagatgaacaggttctgggtcatatgatcacggttgcggctaaaatcgcgcaacaggaaggtatcgcggatgacggctaccgcctgatcatgaactgtaaccgccacggcggacaggaagtgttccatattcatatgcatctggtcggcggccatcatctggggccgatgctggtgaaataa

SEQ ID NO: 275951 - DNA, 588 bp, Morganella morganii
atgaaacgtcttttatgtgtgatagcgtcagtctggctgctggccgggtgtccttcaacggcaccggtaacacccccggtaccggtgggtaccgtaacaccgccgccggataccacgccgccgccactgccgctgccgccgccggatacggtgccggttccgccgaaaatgaaaaaaatcgagtgggaacaaagtattacaccgctggttaatcagatggttcacagcgacggcgtgaatcagggcagcacgctgctggtgaataaagtcggtaataaaaccaacagcagcctgcagaccagcgttgcgaccggtgcgctgatgaataccatcggaaaaaccggggtactgaatgtgatcccggccggtgcggtcagcagtgccatgtcggtgctggggatgggtgataacgatacactgaccctgcgcagcaaagctatcggtctggcgcgttatctgaatgccgattatgtgctgtacagcgtggtaaccggtacccgtgatgcccgtcagatggagatgcagctgatgtctgtcagcagcggtgaaatcatctggtccggtaagggcgcggtgcttgagcagtaa

SEQ ID NO: 275952 - DNA, 843 bp, Morganella morganii
ttgagcagtaaccgcgcgttactgttatgcctcactgaacactttcccgcattgcctgtctccggctggacaatccgtccgctgaacgggctgacgcgggaaagtgtcagtattgaacaaaaaggtgtgtctctgattggcagagcacagaccgtgcacagtgcggatatcggtgtcagccgtcagaaagaggcgcgtgtcctgcaccggttgcgtgacagcggccttgccccgcgcgtggccggattcagccacggctggctgcttctgtaccgggtggaaggtgaaacactgccgccggaacggatgcagcaaccggactttatcccgcagctggcggcgctggtcagcaatctgcataatcagccgcttaccgggtatcgtctgccgctcaaagcacaggcagaccgccactttcacctgaccgacaaacgtcgccgcaccccgcagctgttgcgtatccaccgccactttatgcgcgaagcagagcctcagcccctgaagctggcacctgcacatatggatatccaccccggcaatattgtgacggcggcgggggagctgcatctgattgactgggaatatgccgctgataccgatatcggtctgtctctcgccacactttttcgtgccaatcactggtcattgacgttaattcacacttttctgcgttattattctgcttatcactgtccgcagcgcgtactggcgcagacttgccgctggcaggcacgggcagattatatgatggttatgtggtttgagagccgctggggacaaaccggcgacccgcagtttctgcaatatccggccgcgctgaaagctgccgccgggctcaggtaa

SEQ ID NO: 275953 - DNA, 1023 bp, Morganella morganii
atgggtcctgtaatgttagatgtcgaagggtatgagctggacagcgaagagcgcgagatcctgcgccacccttcagtcgggggagtgattctctttacccgtaatttccatgacacggcacagctgcgtgaactgacgcggcagatccgtgaagctacccgcgataaccgtgttgtgattgcggttgatcaggaaggcggccgcgtccagcggtttaaagacggctttacccgcctgccggcggcacagtcttttgcacagtttaatgacctgctcaccggctctgcgctggcggaagaggcaggctggctgatggcggcggaaatgatcgccatggatattgatattagtttcgcgccggtactggatctggggcacggcagtgcggctatcggctcacgcgcgttccatgaagacggcgacattgcggcgcagatggcggaacgctttgtgcgcggtatgcgcagcgccgggatgtcgagtaccggtaaacatttcccgggacacggcgcggtcagtgcggattcccacaaggaaacgccgcgtgatgagcgcgacccggcggtgatccgcggcaaagacatggcaattttccgtgagtttatccagcgcggtctgcttgatgctgtgatgcccgcacatgtgatttacacacagattgatgatcgcccggcgagcggttcatcctactggctgaaatcggtgctgcgtcagcaactcgggtttgacggggttattttctctgatgacctgtcaatggaaggggcggcggtgatgggcggctatgcggagcgtggtcaggcatcactggacgcgggctgcgatatgatcctggtttgtaataaccgtaaaggtgctgtgactatccttgataatttgccggttatcacggcacaacgtattgataagttgtatcatcggagtaaaggttatgatctggctgaactgcagcgcagtgagcgctggcagcaggcgaacaaaaccctatccgtattacacgaacaatggcaggagcgagcatga

SEQ ID NO: 275954 - DNA, 549 bp, Morganella morganii
atgattatttatcttcatggatttgattcaaccagcccgggcaatcatgaaaaagtgatgcagctgaaatttgcggacccggatgtccgttttatcagttacagcacgcttcatccgcgttatgacatgaaatatctgctgactgaagtggataaagcggtaaaacagagcgaaggaccggccattgtgctgggcgtgggtctggggggcttctgggctgagcgtgtcggatatctgtgcgggatccgccaggtaatggtaaacccgaacctgttcccgtatgaaaatatggaaggcaaaatcgaccgcccggaagagtatctggatatcatgaccaagtgtatctcggatttccgcgaactgaaccggaagaactgcctggtgctgttgtcccgcaatgacgaggcgctggataaccagcgtgcgcatgacaccctgtcaccgtattatcaggttatctgggatgaagaacagacccacaaatttaaggatctgtcccgtcatctgcaggaaatcaaagggtttaaaaccgcgtttaaaaaagcctga

SEQ ID NO: 275955 - DNA, 1305 bp, Morganella morganii
atgactacaccgaatacgaagattgtgattatcggcggtggcgcaggcgggctggaactggcaacgcaactcggccacaaattaggtaagaagaaaaaagcggaaatcactctggtcgatcgcaacagcagccacctgtggaaaccgctgttacacgaagtggcgaccggttctctggatgacggcgtggatgccctgagctacctggcgcatgcccgcaatcactatttcaatttccagctgggttcaatgaccggactggatcgcgacagtaaaaatatcaccctggcagaaatccgtgacaacaacggtgacctgctggtaccggagcgtgagctggattatgacatcctggtgatggcgctgggcagcacctccaacgatttcggcacccccgggatcaaagaaaactgcatcttcctcgacagcccgtcacaggcaaaccgcttccataatgagatgctgaacctgttcctgaaatactccgccagccacggcgaaggcgacaaagtgaatatcgcgattgtcggcggcggggcgaccggggtggaactgtcagcagaactgtataatgccgttgagcagcttcacagctacggttttaaaggcctgaataccgatgcactgaatgtgacgctggtggaggcgggtgagcgtattctgcctgctctgccgccgaaaattgccggtgccgctcaccaggagctcaccaaactgggtgtgcgtgtgatgacgcagaccatggtcaccagcgccgatgaatccggtctgaacaccaaagacggcgagcatatcaccgcaagtctgatggtctgggcggcaggtatcaaagcgcctgatttcctgaaagagattggcgggctggaaaccaaccgtattaatcagctggtggtcaaaccaacactccagaccacccgtgatgacgcaattttcgctatcggtgactgctcatcctgtccgaaaaaagagggcggatttgttccgccgcgcgcgcagtcagcacatcagatggcgacccgctgctatcacaacatccttgcggtactcaatgataagccgctgaaggattatgtgtttaaagatcacggctcactggtttccctctcccggttcagtacggtcgggagcctgatgggtaacctgatgcgcggtaatatgatgattgaagggcgtatagcccgtataatgtatatttcactgtatcgtatgcatcagattgcgctgcacggttatattaaaaccgggctgatgatgctggttggcggtataaaccggattatccgtccgcggctgaaattacattaa

SEQ ID NO: 275956 - DNA, 438 bp, Morganella morganii
gtgcttctgtttgttatttttgcagtaatcatttcttttgctgtgacaaagaataaacatcccgctgttgctgaggttctctcatccgaacctatcatggcaacggtgccggtacgccatgaatactgtgacctgacaaccatgccgggtccgtacaagcgtgaactcctggatattgtccacccgactgagcaggtctgcaccccgtatctgctgtatgaaaccctgctgcacgcaccgaaggtgtacggcggtccgacataccgctcctgtacgacggcatacacctatgagcaccggattgtcggctatgatgtggtgtatagaatcaatgacaccgtcggtaaggtcagaatcaattataatccgggtgatgtcatgccggtggataataccgggcggctgatcattttacccggactgaatacagtgaaataa

SEQ ID NO: 275957 - DNA, 1170 bp, Morganella morganii
atggatcgtcgttcgtttctgaaatcaacagggatcgcgctcggcggattaaccgccgcctctctggtcaccaccggtcaggccgccaccggtactgtctcacccgctgccaaagcagcgccgctcagcgcggaaaatccgctgctgctgaacttcaatgaaaactcactggggatgtctccgaaagcccgtcaggcgattattgacgcccttcccggcgcattccgctatccggatgctgcccgcgaagcgctgattgagcagattgccgcgcatttctcactgacaccggaacacatcagcctcggaaatggttcctcagaaaccattcaggcggctgtgcagatgctggtggcgaatgcacagaaaaaacagcagccggtgcagctgattgtaccggatccgacattcaattatgccgaactgtatgctgaaccgctgggcgtgaatattgtcaaagtgcctctgaaagccgatctctcttttgacctcgcggcaatgcaggcgatcgccgataactttgccggtcattccgttatctatatctgtaacccgaataacccgaccgctatgatcaccccggcatcacaactcgcacagtgggtaaaccaggcaccgccgcagcagaattttattattgatgaggcatatgcggaattcgtgtctgatccgcaatttaaaagtgcggttgaatgggtggctgccggaaaatccaatattatcgtgacacgcactttctcgaaaatatttgccctggccgggcttcgtgtcggttacggtatttccgcaccggcagtaacggaacaggtaaatattttcaattctatcgataatactaatatagcaggtgcagtttccgcactggcatccctgaatgataaaccgtttattgattacagccgccattcaacggatgtttcacgggaaattgtggttgccgcactgaaggaattaaatctgccttatgcgccctcacaggctaatttcatcttccataaggtgaccggagatgtaaaaacctatcagcagcggatgaaagaaaaccatataatggtcggccgtgaatttccgccggtgaccggctggagccgcctgacattaggcacgccggaagagatgcagcaatttgtggcggtattaaagcagtttcgtcagaagggctgggtttaa

SEQ ID NO: 275958 - DNA, 3441 bp, Morganella morganii
atgtcgctgaaaacacgctatgaactcccggcccgtgccgcagacacccgccagctcggtgaaatgaccggtgcagcctgtgcggtggaaaccgcgtcgataattgaacaacacgacggccccgtcatcctggtgacccgcgatatgcagaatgccctgcggctgcgggatgagatccgccagtttaccgcgctcccggcagaaacccttgccgactgggaaactctgccgtatgacagcttttcgccgcaccaggagattatctccaaccggttatccacgttataccgtctgccgaccctggaaaaaggcgcactgattctgccggtcaatacactgatgcagaaagtgtgtccgcctgaatttctcaccagtcatgcactggtgatggccaaaggggaaaaattgtcacgggacaagctgcgtgaagagctggttcagggcggttaccgcagtgtcgaacaagtactggagcacggcgagttcgccattcgcggcgcattgctggatctgtttccgatgggcagcgaactgccgttccggattgatttctttgatgatgaaatcgacagcctgcgcacctttgatgtcgacacccagcgcaccctcgatgaagtgaatgcgatcaatctgctgcccgcccatgaattcccgacggataaagacgccatcgagctgttccgcagccagtggcgggaaacctttgaggtgcgccgcgacccggaacatgtttatcagcaggtcagcaaaggcaccctgcccgccggtatcgagtactggcagccgctgtttttcaccgcgccgctggtaccgctgtttgactatctgccggataacaccctgctggtgacccaggacttacaggagtccgctgaccgcttccgccgggatgtgcaacagcgttttgagagccggggggtggatccgatgcgcccgttactgccgccgtcacagctgtggctgacgccggaagaactcaatcagcagatgaaaacgctgccgcgtgtgcagctcaataatgacaaactgccgcgcaaagccgctaataccaacctcgggtataccgcgctgccggatctgaaagtcaacccgcagctgaaatccccgcttgacccgctgcgccgtttcctggaaagcacagacgctgccgtgattttctcggtggaaagtgaaggacggcgcgaaagcgtgcaggaactactggcacgcatcaaaatcaaaccggcggaaatccgcagtctgacggatgctaccatgccgggtatttatgtcatgatcggtgccgccgagcacggttttgttgataacgaccgtcagcgcgtcctgatctgtgaaagcgatatgctgggtgagcgcgtggtgcgccgccgtcaggacacccgccgcacgattaacaccgataccctgatccgcaaccttgcggaactgcgcccgggtcagccggtggtgcatctggagcacggagtcggccgctatcagggattaaccactctggaagccggagggatcaaggcagaatacctgatcctcacctacgccggagaagataaactgtatgtcccggtgtcatcgctgcatctgatcagccgctatgccggaggggcagatgaaagcgctccgctgcataaactcggcggtgaagcctggagcaaagcgcgtcagaaagcagcggaaaaagtccgcgatgtggcggctcagttactggatatttatgcacagcgggccgtcaaacccggctttgcctttaaacatgaccgtgaacagtaccgcgagttttgccagtccttcccgtttgaaaccactccggatcaggagcaggctattaatgccgtgctgagtgatatgtgtcagccggtggcgatggacagactggtgtgcggtgatgtcggtttcggtaaaaccgaggtcgcaatgcgggcggccttcctcgctgtccataaccacaagcaggttgccgtgctggtgccgaccactctgctcgcgcagcagcactatgataacttccgtgaccgtttcgccaactggccggtgcggattgaagttttgtcccgtttccgcagcgccaaagaacagcagcaggtgctggatgataccagagaaggaaaagtggatatcattatcggcacacacaagctgttgcagagcgatgtgcactggcatgatctcggcctgctggtggtggatgaagagcaccgcttcggtgtccgccataaagagcgcatcaaggcgatgcgtgccaatgtggatatcctgaccctcaccgccaccccgatcccgcgtaccctgaatatggccatgagcggcatgcgggatctttctattatcgccaccccgccggcaagacggctggcggtgaaaacctttgtccgtcagtatgatgagctggtggtgcgggaggcgattctgcgtgaggtactgcgcggcggtcaggtttattacctttacaatgatgtggaaaatattgaaaaagcccgcaaccgtattgcggagctggtgccggaagcccgtgtggcagtcggccacggacagatgcgtgagcgcgagctggaacgggtcatgaccgatttccaccatcagcgttttaatgtgctggtatgcaccacgattattgaaaccggtatcgatattcccagcgccaataccattatcatcgaacgggccgatcatttcgggctggcacagctgcatcagctgcgcggccgtgtcgggcgttcacaccatcaggcctatgcatatctgctgacgccacacccgaaagccatgaccaccgatgcccataaacgcctggaagcaattgcttctctggaagatttaggagccggatttgctctcgccactcatgacctggaaatccgtggtgcgggtgagctgctgggcgaggatcagagcggccagatggccagcgttggtttcacactctatatggaaatgctggaaagtgcggtcgactcactgaaaagcggcaaagagccgtcactggaagatctcacgcagagccagaccgaagtggagctgcgtatgccggccctgctgccggaagattacctgccggatgtaaacatgcgcctctccttctacaaacggattgccagcgcgcgcagcgataccgaactgaccgagctgaaaattgagctgattgaccgcttcggtctgctgccggatgccggtcgtcacctgctggcggcagcgggtctgcgcctgcaggcacaggacctggggatccgccggattgaggcgcaggagaaaggcggttttgttgagttcagtgagaaaaaccatgtcgacccggcgtatcttatcgggcttttgcaaaataacccgaaacagtaccggctggacggcccgtcaaaactgaagtttatctgtgacctgaccgaccgcaccaaacgcattgagtttgtcgctgatttactgaccgcgtttgccgcccacccggtataa

SEQ ID NO: 275959 - DNA, 1203 bp, Morganella morganii
atgtttcagtctgtctcatttttaatcggtctgcgttacatgcggggacgcggcacggatcgctttgcccgttttgtctcgctgctttccgccatcggcatcacgctgggggtgacagcacttatcaccgtgacatccgtaatgaacggttttgaacgctcattgcagcagagtatcctcgattttatgccgcaggcggtaatcaccaccggaaacggtgtgctggatccgcagacacatccggtctcacaattagccgggctgcgtgatgtggtaaaaaccgctccgattgtgaccggtgatgtggtattgcagagcaccggcaatgtggggatcgcctccgtgaccggaattgatccgctgggggatgaaccgctgatgaattatctggtgaatacccggccgtctgagctggcggcaggtcagtatcatgtggtggtcggcgagggcgtggcgaaacgcatggggcttaaacgcggggatagtgtccgtatcctggtgccgaatgtgtcgcagctgacgccgatgggacgcatcccgagccagcgcctgttcatcgtggcgggctttttttcctccggcagtgaatccgataacacccaggtgctgatgaatcaggaggatgcggcgcgtctgatgcgctatccggcgggtaatattaccggctggcgtctctatctgtcacagccgttgcaggtggacagtctcagtcagcagacattaccggaagggctggtctggacagactggcgcgtgcagaaaggtgagtttttccaggcggtgcgtatggagaaaaatatgatggggctgctgctcagcctgattatcgccgtggccgcgtttaatatcattacctcactggccttgctggtgatggaaaaacagaccgaagtggctattctgaaaaccctgggaatgacacgcggcaaaattatgctgatctttatgattcagggcgcgggggcggggatcctcggctcggtgatcggcgttctgctgggtacgctgctttcgtcacaactgaatattctgatgccgctgctggggctgatcccgaaaggaatagcgctgccgacggtcattgagccgctgcgcgtcatcactatcggcgcggctgccatgcttatctctttattatccacactctggcctgcgtggcgggcggcagcggtgcaacccgcggaggctttacgttatgagtga

SEQ ID NO: 275960 - DNA, 696 bp, Morganella morganii
atgagtgagttattactggcatgtcgtcagttatgcaaatcctatcacgagggcacagtggaaactgatgtcctgaaacaggttaattttgaactccgtcgcggggatatgctggcgattgtcggcagttccggctcggggaaaagtacgctgctgcatctgctcggcggactggattccccgacctccggtgaggtgattttcaacggcacggcactttccgccatgagccagaacgccctgtcggcgctgcgcaatcaggaaatgggctttatttatcagttccaccatctgttgcccgattttacggcggcggaaaacgtggcgatgccgctgctgatcggcggtatggcgcgggataaagcactggcacaggcgggggaaatgctggagcgtgttggtgtggccgcgcgcgctcatcatcgtccgtctgagctttccggcggggaacgtcagcgggtggcgattgcccgtgcgctggtgaataaaccgtcactggttctggcggatgaaccaaccggtaacctggatcagcgcaatgcgcagagcatttttgatttgttatccgaactgaataaaactctcggcaccgctttcctggtggttacccatgacctcgccctggcggcgaaaatggggcggcagatggaaatgcgcgacggtattctgaatgcacagccggagacggcgctatga

SEQ ID NO: 275961 - DNA, 1248 bp, Morganella morganii
atgaatgcactaccgctgtcattactgactgcgctgcgtttcagcaaagggcggaaacgggcggggatggtctcgctgatttccgtcatttccactctggggatcacgctcggggtggcggtactgattatcgggctgagtgccatgaacggcttcgagcgtgagctggagaaccgggtgctttccgtggtgccgcaggggcagatttccactgttgagcagccgtttgatacctgggcgcagagtctgctgcggatcaaaaatactccgggtgtggtggccgccagcccgtatattgaatttaccggactggcggaaaaaggcagtaaattacaggccatgcaactgatgggcgtggatccggtcactcagaagtcggtaagcggtctgccggaatttgtggcggataatgcctgggcggattttcaggccgggaaaaaccagataatccttggcgacggcgcggcgaaatctctcggtgttgcgcagggtgactggctcaccattatgatcccgaatcacgacagcacggagcgcctgttacagccgaaacgcatccgtttgcaggtcgcggggatttttcgcttaagcggcatgctggatcaccggctggcgctgctgccgctggaagatgcacagcagtatctggattacggtgagggtgtcaccggtatcgaaatccgcacggataatgttttcaacgccaatgacgtggtgctgcgggcggcggaagccagccgtgagcatgtcttctataaaagctggatcaacgaatacggctatatgtacagcgacattcagttagtgcgcagtattatgtacctggccatgattctggtgattggtgtggcgtgcttcaatatcgtttccaccctgattattgccgtgaaagacaaaagcggggatatcgccattctgcgtacccttggtgcgaaagatagcctgatccgtgccattttcctctggtacgggttgctgaccggtatggtcggctgtatcagcggggcggttctcggcacactggcggccctgaatctgacgccgcttatccgtggcattgaatttcttatcgggcacaaactgttgtccggcgatgtctattttattgattttctgccgtcggagctgcggctgacggatctgctgtatgtggttctgaccaccattgtgctgagcctgctggcaagctggtatcctgcgagacgcgcctgccgccttgaaccggcacgtattctgagcgggcagtaa

SEQ ID NO: 275962 - DNA, 867 bp, Morganella morganii
atgaacaaaggccggattatgcgcagaacgcaccgattaagaaagttacgcaaacagcggcggatcctgcgccagcgttttcacttacgctttttctatcgcgataaatggatggccggaaaaatggatcagtttaaacctaaaattgttgtgctgaccggtgcgggtatctccgccgagtccgggatccggacattccgttcggaagacgggctgtgggaagagcacaacatcgaagatgtggcgacgccggaaggctatgcccgcaatccgcgtctggtgcagcagttttacaatgaccgccgccgtcagttacagtcccctgatgtgcagccgaacccggcacatctcgccctggcggagctggaacaggtgctgggggataacttcctgctggtcacccagaatattgataacctgcacgaacgggcaggcagtcagcggattattcatatgcacggcgagttgctgaaaatccgctgtgcgatgtccggacaggttcagtcgtgcaccggcgacctgtctgccgatgagcgctgccactgctgtcagttcccgtcaccgctgcggccgcatattgtctggttcggtgaaatgccgttcggcatggatgaaatctatcaggcactgaatgatgcggatatctttatcgccatcggtacctccggacatgtctatccggcggccgggtttgtccatgaggcacggctgtgcggggcacatacggtggaactcaatctggaaccgagtaaggtgcagagtgagtttgaggagtgtcactacggtcctgccgggcaggtggtgccggagtatgtccgtcagctgctggcgcagattaacaacactaaatctgatttgacgcaataa

SEQ ID NO: 275963 - DNA, 1233 bp, Morganella morganii
atggataagttattagagcgctttttcggttatgtctcttttgacacgcagtcgaagccgtcagccaagctgacaccaagcagcgacggtcagttaaggctggcgcgtgctctggaaaaagagctgaaaacgctggggttatcagatgtctcgctggatgataacggctgcgtgatggcaacgttaccggcgaatgttgactggccggtgccggttatcggttttatttctcaccttgatacctcaccggatttctccgggcgtaatgtgaatcctcaggttctggaaaattaccgtggtggtgatatcgcactcggcatcggtgacgaagtgctgtcgccggtcatgttcccggtgctgcacaccatgctgggtaaaaccctgattatgaccgacggtaaaaccctgctgggagcggatgataaagccggtatcgcagaaatcatcactgctatggtacgtctgaaaaacagtgatattccgcacggtgatatccgcattgccttcacgccggatgaagaaatcggccgtggcgcgcagtatgtggatctgaaaaaattcggtgcgcagtgggcttataccgttgatggtggtggtgtcggtgagctggaatatgagaactttaacgcagctgcggttgccatccgtattgagggcaataatgtgcatccgggcagtgccaaaggcgtgatggtgaacgcgctgtcactggcaacccgcatccacagcgaattaccgccggaagaaacgccggaaaataccgaagggtatgaggggttctatcatctgcaaagcatcaaaggtacggtggaacgcgcggaaatgaactatatcatccgtgattttgaccgtaataattttgaaaaacgcaaaagcaacatgatcgcgattgccgagaaagtcggtaaaggtctgcatccggactgctatatcgagctgacgattgatgacagctattacaatatgcgcgaccatgtggtgaaacacccgcatgtgattgaactggccaaacaggcaatgattgactgcgatattgagccggatatcaaacctatccgcggcggtactgacggtgcgcaactctcttaccgtggtctgccgtgcccgaacctgtttaccggcggctataacttccacagtaaacacgagtttatctcactggaaggcatggaacaggctgtttctgtgattatgcggattgcagaattaaccgcactggatatgaagaaataa

SEQ ID NO: 275964 - DNA, 570 bp, Morganella morganii
atgtctttattaaaaagagaattaattatttcatcgttacttttattttcctttaatgcattctctgcggatggtgatattcatgaggtcgttccggaaatcgatgccgataccaaagaaataacaggaaatatcagatttacaggaaaaatcactgactcaagctgtgatattacacaaaaagataaagatgtttatctgggcgagcattcagccgctaaactgaaaaaaaatgatgacagaacagaagaaaaggcttttgatatttctttgattaactgttcattagcaatgacatcgctgagaatcaaaatggaaggcacggcgcatgcagacaatgcaacgctgtatgcattggatgccaatcaaaaaagtgccggaaaagtggggatcagcattgcgactgcagaggggcagcaggtaacgccggcaggtgattatagtaacattcctctgcaggcggattcccgtgattatactcttaattataccgcagcgtatcaggctaccggcctggcaacaccgggtgaaggcaatgcaacggtgaattacactgtttcttatgagtaa

SEQ ID NO: 275965 - DNA, 672 bp, Morganella morganii
atgaaaatcggtttcactttccttattattattttttttctgaccatgagccgggcaactgccggagtggttgtcggcggcacccggtttatttatccgcaggataaaaaaatgatcacaatccctgttgataatactgataaaaaatcagcttatttaattcatggctgggttgaaaaagaagatggtatgacaaaaagtaaggattttattctcacaccggttattttccagctggatgccgggaaaaaagggattttgcgtgttatgctgaaaaaaacagaattcccggatgacagagaaacactgctctggctgaatataaaaggcattccggaaacagatgaaaacagagagaataaacttcagatcgttattaattcaaagtttaaattattctatcgccctgagggattaactgagcctgattataataaactgaggtatgaacgaaaaggaaacagaataaaggtcattaatgacttaccctttcatatcactgtcagaaatattttagttaataataaggaatatactgtttcggagatgattgttcccttcgaatcattaacggtaccggtaacaactattcatagtaatgataaaataaccataagctacatctctgattttggcgggattatttcgaaacctgttgtttttgataaataa

SEQ ID NO: 275966 - DNA, 2403 bp, Morganella morganii
atgcaattgaaagcaccttatttttttcttctgtctgtggtgatcgtttttcccccggtaactgtttttgccgcgccttattttaatccggcagcgcttggcctgaacggagatgatccggtgatggataccgcacagtttcagtatttgcgggagcggcaatttcaggaagagggccgctattttgtggcagtcactgtcaatcagcaggcagccagcagtcaatggctggagtttcgttatcatccgcagcaaaaaacattgctgccggtggtaacccgtaagcaatggttggtatggggactgcgccccggtgcatcgtctgcatttgctgaaacggaaagcacagcacagattacagatattaccgcgctggtcagcggggtttcgctgaattttgataccgcgcggcagtcgctggatattacgatcccgcaacgtttttttttgacagaagcgcagcggaccgcagatgcttcgttatgggaaccgggcattactgcatttatgctcaattatgattatcgcttttcccggcagagcagcagattcagtgatcacaccgggcataccctgttactgcaaagtggttttaataccggattctggcggcttcgccatcacagcagagcagaataccggaaccggaaaatgatatggcagtcagaacggctgtggatgtaccgcgctatagcgcctctgcgcagtgagttacagctgggggagttgttcagcggggatgtgctgtttgacagccgtgcgttcagggggatccggctggcttcacaaagtgatatgtatccgctgaatcagcagggatatgcgccggttatccggggaataaccggtcagagtgcggaactgactatcaggcagcagggaatgattatccgccgtgaaacattacctgccggtgaatttgtgattgatgatctgaatacgtcttttcagggaacggaactggatgtcaccattgaggaagcggatggcaccgtacagcgttttatacagccgggagcctcagtcccggttatgcagcgggaaggccgtctcagttacacactggatgcaggaaaatacagcggtaacagaaataataacaaagacctgtttgtgaagagtacggcagcatacggcattaattcagtcatcacactgtatggtggcggctatgcagcacaacacgccctgagcagcggtgtgggggcaggtatcaatatgggagcagcaggcggagtgtccgctgatattctgatgcggcatacaacggcaaagcattatccgcgttaccggctgaattatcagaaattttttccgctgaccgggacattggtgaatacaggggctgcacatgagcaacaatcaaggcagtggcaggtccggttgctgcaaccattgccgggggataacggtacgctgtcggcaggatatcactataaccgcaccggccatgacgggcgcggataccggccggtgattagcagggatgccggctattccggccatattggccgggtacattacggtgtgaatgcacagtaccgtacaggcgggtattttcggaagacagataaacgggtatctgttgcgttgtcggtgccgctggattttgccggacaacaagcccgcagccattttcactaccaccagcgggcaggaaaagcgtctctgcaaacatccgttaatggttttcccggggaagagcagcgtttcgggtactcggttactcacagttatcagcagcagagtacagcacattaccgcggggcggagctgcgctggcgtcacgacctggccgatatccggggacgaatcaatcacagtcagggacacaataccctgagcggggatattcagggcgggctgattattcacggtgacggtatcacactgtcacgtccgctgggtgaaaccaacggactggcagataccggcggtgccggggggatccgtgtggcctcacgggcagtggcgcagactgacagtgcggggttcagtgttattccgcagatgagccattatcatcagaatgttatccgtatcgacccggaaaccctgccggataatgcggatgcggatgatcctgtcgtacaggtgatcccgtcaaaaggggcgctggtgccggttcgttttgcagtgaataccggttatcgcgtgatttatgcactgcggactgtacagggcccggtgccgttcgccgcccgggtgaaggtgaaaaaagcagatggcagcagcgtcagcggtattaccggtgaggacggggaagtgtatctcagcgggttaccggctcaggggcatttacaggctgtctgggggaaaggaatgcatgagcagtgcggggcggatttcactgtcccggaagatcagcagggactgataaccctccctctgatatgccggtaa

SEQ ID NO: 275967 - DNA, 1053 bp, Morganella morganii
atgtttactcagaccagaacactatgccgggcaggttttctcttgtggctgacagccggatatattccggccgctgccgccggggaaacctgtgcacttatcacaccggaaacgactctccgcataccggccggttatatcacggctgcgtataatgtaccggttggcggtattatcggggagacagtattttcggatagtattgatgtctctcagtgccggctcgacagcggtaaagaaattgaatttgtgctggttggcggaatgccgggtaacagaacacaaaatgcatcgggacacactatctatgaactctccggtggtatcggctacagtctcggggcggtggcggaacatccggaatgcatgaggtcgttacgctatgtggacggtcatgattcaccggacaacaacaccgccaataaacgactgtgtacgatcagcagcggcatggatccgtctcagccatatcgggtacgggcagtggtgacactctataaactgaaaccggaaatagctgctcatcatcagggaggctatctgggtgaaatcgctatgcgggtggacgggcactgggccgcaggattatatggtataccggaaaccaaaatccatctggacggatttactgtccggcaacattcctgtgatcttgatccgcaaacagaaacagaggtggatttaggagtcgtatcgcggactgatttcagcggcaaagggtctgttgcaccgggaagcattcgtaacctgactattggactgcagtgcagcaatctggcaatggcggatatcctgttaaccggtaatgcatttaccaccagaaacagccccggaacactgaagttacagcggagaaacggcagtgcatcaggtgtgggagtccggctgacacataacggcagaccggtaactttcggtgaaccgcttttgtttgatgaagtcactgcccggcgggctgtattgcggttacaggcggcttttatacagacgagggatactattgagccgggcgcggcggaaacaattctgaattacaccattcgttaccagtaa

SEQ ID NO: 275968 - DNA, 1122 bp, Morganella morganii
atggattatgaactgaatatagactggcagacctttatggaaagccactggcaaaaacgtccgttactgatcaaaggtggtttccgcaatttccgcgacaccatttcccccgatgaactggcggggctggcaatggaagatgaagtcgacagccgcatagtcacccgtttcagcggaaaatgggatgtgcgccacgggccgtttcaggagtttgacgggctgggtgaaaaagactggtctatcctggttcaggccgttgatcactggcactttccgtccgccgcactgatgaagccgttccgctgcctgtctgactggcggatggatgatctgatgatctcatattctgtgccgggtggcggtgtgggcccgcatctggatcagtacgatgtgtttattattcagggccagggccgccgccgctggcgtgtcggggaaaaaatcccggtgaaacagcacgcgccgcatccggatctgttacaggtggacccgtttgatgccattattgatgatgaaatggtgccgggcgatatcctgtatattccgccgggattcccgcacgaaggctatgccattgaggaatcactgaactattctgtcggtttccgcgccccgaatgcccgcgaactgttcagcggctttgccgattatgtgattgccaatgaactcggcagttaccgctacagcgacccggatctggcgttccgtgataatccggcgctgattcagcagggcgaactgaccaagctgcatggtatgatgcaggatctgcttgaccagccggatgtgttccgcaagtggttcggtgaatttatttcccagtcccgccatgaactggatctggcaccgcctgagccggcgtacagcccggatgaaatacaggaactgctgtcacagggggaatctctgttccgcctgaatggacttcgggtactgcgtgtcggtgatacctgttttgttaacggcgaagccctgaaaaccccgcatattgaagcagcggatgtgctctgccagtatgatgaaatcactgccgaaatgctgggggatgctttcagtgatccggaatttgtgaccctgctgacagtgctgattaataacggttactggtattttgatgattaa

SEQ ID NO: 275969 - DNA, 1470 bp, Morganella morganii
atgaccaggcggacaacgcgccctttctctctgcggacccggtttttactggcaacgtttgccgtgatcctcgccatgacgctctcttacggcgccgtggcgctggtcggttacctggtcagctttgataaaaccacctacaccatgctgcgcagccagagcaatctgttttacagcctgtcgcagtgggatgacggaaaactcaatatccgttttccgccgaatttctccctgaatgccccgtctgtggtgctgatttatgatgataatcagaatctgctctggcggcagtatcatattgacgcgctggagagagccattccggccaaatggctgaccaaagaggggttgtatgatctgaatacctcgctggaagccaccaaatccctgctggtcaatactccgctctttgccacggaagatatccggattaatgacctcgatgatgatcacgacggacggatgatccactccgtgtctgtcagccgttacggcaaaaccgataccctgccgccgctgacgattgtggtggtggataccatcccgcaaaatctgcagaagaccttccgtgtctgggaatggttcggttacgtggtgctcgctaacctgtttctgctcacaccgctgatctggctggcggcacactggagcctgcggccgattaatgctctcagcgggcagatcagcgcccttgaaaaaggcgagcgggaagatctggatgaaacgccgcccagcgaactgcgcggtttggtgcgtaacctgaacctgctgctgcacagtgagcgggagcgctatacccgctatcagcgcacgctttctgatctgacccacagcctgaaaaccccgctggcggtgctgcagagtaccctgcgctcactgcgcggtggtaaagatatgaccattgaaaccgccgagccggtcatgcttgagcagatcggacggatttcccagcaggtcggctattatctgcaccgcgccagtatcggcggtgacaatactgtactgatgcgggacatttcctccgttccggcgctgattgacagtctcgccagtgcgctgtcaaaagtgtatcagcgcaagggcgtggatattaccgtcgatattccgccggatatcacctggctgggacagcagaatgactttatggaagtcatgggcaacattatggaaaatgcctgcaaatactgtctggagtttgtcgaggtgacggcgcagtggcagcatgatgcggttattctgattgtcgatgatgatggtccgggtgtgccggaggagaaacgggaactgattttcagccgcggtcagcgggttgataccctgcggccgggtcagggactggggctggcaattgtcaccgatattctggagcagtatgacggcggcgcggttgtcactgaaagcccgctgggcggtgcccgtattactgtgacattccggcgtcagactgttcacgacgaagacacagactga

SEQ ID NO: 275970 - DNA, 675 bp, Morganella morganii
atgcgcgtgctcatcgtggaagataacaatttactccgccatcatctgacggttcagatccgcgagctcggccatcaggttgatgcggcggaagattcaaaagaagcagattattttcttcaggaaagtcagccggatatcgcggtggttgacctcggtctgcccggcgaggacggtatggtgatgattgcccgctggcgtcagcagcaggtcaaaatcccgattatggtactgaccgcccgtgaaagctggcaggaaaaagtcgccgcgctgaatgccggggcggatgattatgttaccaaacctttccagctggaagagattgttgcccgtatgcaggcactgatgcgccgtaacagcggcctcgcctcccagacactggaactgggcatttttgttatcgatctttcccgcaaagaattcctcgttgacggtaacgccgtcaaactaaccgcatttgaatacactattattgaaaccctgatgcggaataatggtaaagtcgtcagtaaagattccctgatgcgccagctctatccggatgccgaactgcgtgaaagccacaccattgatgtgctgatgggccgtctgcgcaagaaaatccagacatttaccgatattgatgccatcgtcactgtccgcggacagggctaccgcttcgacgcagggaagtaa

SEQ ID NO: 275971 - DNA, 1368 bp, Morganella morganii
atggaattatcctcacttaccgccgtttcccctgtcgatggccgttatggtgacaaaacacgcgcactgcgcgatattttcagtgaatacggtttactgaaattccgtgtacaggtcgaagtgcgttggttacaaaaactggcggcgtgtgcagacatccccgaagttccggcttttgatgatgacgcaatcgcttacctggatgcaattgtcgcgaatttcggcgaaaaagacgcaatgcggatcaaagagattgagcgcaccaccaaccacgatgtgaaagcggtggagtacttcctcaaagaaaaagctgaagccgtgcctgccctgcacgcggtgtctgaatttatccatttcgcctgcacatccgaagatatcaataacctctctcacgccctgatgctcagcaccgcccgtgaaaccgtgctgctgccggcatggcgtcagatgatcgatactgtccgagccatggcggcggactaccgcgacctgccgctgctctcccgtacccacgggcagcctgcaaccccgagcaccgtcggtaaagagtttgccaacgtcgcttaccggatggagcgccagtaccgccagttacagcagaccgaaatcctcggtaaaatcaacggcgcggtcggtaactataacgcgcacttgtctgcctatccggatattgactggcataaattcagcggtgactttgtgacctcgctgggtattcagtggaacccgtacaccacacaaattgagccgcacgattatattgctgagttttttgactgcgtggcgcgttttaacaccattctgatcgatttcgaccgtgatatctggggttacattgccctcaatcactttaaacagaagacgattgccggtgaaatcggttcatccaccatgccgcacaaagtcaacccgattgattttgaaaactcagaaggtaacctgggtctggctaacgcggtgctcggccacctggcaaccaaactgccggtatcccgctggcagcgcgacctgacggactccactgtgctgcgtaacctgggtgttgggatcggttactcgctgatcgcttatcagtccacgcaaaaaggtctgagcaagctggaagtgaacgaaaaacacctgcgtgatgaattggatcagaattgggaagtactggcagagccgattcagacagttatgcgccgctacggtatcgaaaaaccgtatgaaaaactcaaagagctgacacgcggcaagcgtgttgatgcacaggcgatgcaggtctttatcgacggactggatctgcctgacgcagaaaaagcccggctgaaaaccctgaccccgcaaaactatctcggggacgccatccgtctggcagatgagttgtaa

SEQ ID NO: 275972 - DNA, 630 bp, Morganella morganii
atggctaaaaattacgaagacataaccctcgccctggcagggatctgccaggccgcgcgcctggtgcagcaactggcgcatgaaggtcagacagataatgatgcggttgatgtgatgatcaacagcatcatcaataataatccgtcttctgtcctgaatgtctacggcgacaatgtgcagaacctgcataccggcctgtccgcgttcgccgggatgttcaatatgaccggttctcaggggctgaatgccgagctgacccgctatatgctgggtgtgatgctgctggagcgccgcctgaacaaagcgccgggcgcgatggacgagctcggccgccgtattgataatcttgaacaccagcgcgaccattttggtctgtcacaggaagcgatgctcaatactatcgccggtatctatgtggacaacatcagcagcctcggcccgcgcatccaggtgaccggctcgccggagatcctgcgtaacacactgattcaggctaaagtccgctcgctgttactgagcgggatccgcagcgccgtgctctggcgccaggtcggcggcaaccgtttacagctgctgttttcccgttcacgcctggtggacaccgccaaatatcttctcgctcaacactaa

SEQ ID NO: 275973 - DNA, 1104 bp, Morganella morganii
atgtcagataacagccagaaaaaagtcatcgtcggaatgtccggcggtgtggattcctccgtctcagcctatttactgcaacagcagggttatcaggtgaccgggctgtttatgaagaactgggaagaggacgatgataccgaatactgctccgccgccgcagatcttgcggatgcacaggccgtctgcgataaactcggcattgaactgctgaccatcaacttcgcggcggaatactgggataatgtgttcgagcatttcctggaagaatataaagcgggacgcacgccgaacccggatattctgtgcaacaaagaaatcaaattcaaagccttcctggaatatgccgcagaagatctcggggcggattatatcgccaccggacattatgtgcgccgccgtgatatcaacggtaccacgcagttactgcgcggcctggacagcaataaagatcagagctatttcctgtatacactgagccacgaccaggtggcacagagcctgttcccggtcggtgaactggaaaaaccggaagtccgccggattgcggaacaattagggcttatcaccgcgaagaaaaaagattccaccgggatctgctttatcggtgagcgcaagttccgtgatttcctcgcccgctatctgcccgccaaaccgggtccgattatgacggttgatggtcaggaaatcggtcagcatgacgggctgatgtaccataccctcggccagcgtaaagggctgaaaatcggcggaacccgtgaaggttccgacgagccgtggtatgttgtcgataaagacgttgaaaacaatattctgattgtcgcacagggccatgaacacccgcgtctgatgtctgccgggcttatcgcgcagcagctggactgggtatcgcgggagccgctgacgcaaccgatgcgctgtgtggtgaaaacccgttaccgtcaggaagatattccctgtactgtcaccccgctcggtgatgacaaaatcagtgtccggtttgataacccggttgctgcggtcacaccgggtcagtccgctgtcttttatcaggatgaagtctgcctgggcggcggagtcattgaagcgcgtattacggagtga

SEQ ID NO: 275974 - DNA, 468 bp, Morganella morganii
atgatattcagacctcatgtgacagtggcctgcctggtcagcgccggtgaaaaatttctggtggtggaagaaaccgttaacggcaaagccacctggaatcagcccgccgggcatctggaagccggggaaaccctgcttgccgccgcagagcgcgagctgtatgaagaaaccgggatccgtgctgctcccgatgccctgctgaaaattcatcagtgggttgcaccggacggcacaccgtttatccgttttctgttccgtgtgctgctggagagtgaatgtgagacacacccgcaggacagcgatatcgaccgctgccactgggtcagtgcggatgagattattcacagcccgattctgcgctccccgctggtaaaagaaagtatgtttgcctggtttgccgccgaaccgctgccgctctctctgctgggaacgttcggggatgcgttcggggaaccggtttccccgtaa

SEQ ID NO: 275975 - DNA, 690 bp, Morganella morganii
atgacaggtaaaaccacgaactcccgcatctcccgaaagccgcaatcccgtccggcaggcactcatccgcgtcagaaagctgcccgcaagccccggccgcgcggtccgcaaaaaattattctgttcaataaaccgtttgatgtactgccgcagtttaccgacgaagccgggcgcagcacgctgaaagattacattccggttacagatgtgtatgccgccgggcggttggatcgcgacagcgaagggttacttatcctgactaacgacggcgcactgcaggcagcgctgacacagccggagaacaaagccccgaaagtgtattatgctcaggtggaaggtgtgccggacgaaaacgcgctgaatcagttgcgtaatggtatcaccctgaatgatggtccgacccgccctgccggtgccgagctggtggatgagccggactggttgtggccgcgtaatccgcctatccgcgagcggaaatcggtaccggtcagttggctgaaactgacactgcgggaaggccgtaaccgccaggtacgccggatgaccgcccataccggccacccgaccctgcgtctgatccgcgtgcggattggtgattttgcccttgatacccttgcccccggcgaatggagagaagtgaatgatattcagacctcatgtgacagtggcctgcctggtcagcgccggtga

SEQ ID NO: 275976 - DNA, 1254 bp, Morganella morganii
atggaaagcaaagtagttgttccggcgaaaggcgctaaaattaccattgacgcaaaaggcaaattaatcgttccggacaatccggttatcccgtttattgaaggggacggaatcggggctgatgtaacgccagtaatgattaaagttgttgatgccgctgtaaaaaaagcctacggcggtaagcgtgaaatctcctggatggaaatctacaccggtgagaaatccacaaaactgtatggcagtgatgtctggctgccggatgaaaccctcgattttatccgtgactaccgcgtggctatcaaaggccctctgaccactccggtcggcggcggtatccgctccctgaacgtggcactgcgccagattctggatctgtatgtttgtctgcgcccggtgcgttactacgccggtacaccaagcccggtaaaacaacctgaactgactgatatggtgattttccgtgaaaacgcggaagacatctacgccggtatcgagtggaaagccggttctgcggaagctgataaagtgattaagttcctgcaggacgaaatgggtgtgaccaaaatccgcttcccgcaggattgcggtatcggtatcaagccgtgctctgaagaagggacaaaacgcctggtccgcgcagcgattaactacgccattgataacgaccgtgattccgtcaccctggttcataaaggcaacattatgaagttcaccgaaggtgccttcaaagactggggatatgaactggcacgcgaagagttcggcggcgagttactggacggcggcccgtggttaagcctgaaaaacccgaaaaccggcaaacagatcattatcaaagacgtgatcgcggatgcgttcctgcaacaaatcctgctgcgtccggcagaatatgacgttatcgcctgtatgaacctcaacggcgactacatttctgacgcccttgcggcacaggttggcggtatcggtatcgcaccgggcgcgaacatcggtgatgaatgcgcgctgttcgaagccacccacggcaccgcaccaaaatacgccggtcaggacaaagtcaacccgggctcagaaatcctctccgctgagatgatgctgcgccacatgggctggtttgaagccgctgacttaatcgttaaaggaatggaaggggcaatcgctgccaagaccgtcacttacgatttcgagcgtctgatggaaggcgctaagctcctgaaatgctcagagtttggtgatgcaatcatcaaacacatgtaa

SEQ ID NO: 275977 - DNA, 1044 bp, Morganella morganii
atgcggatgcgccccgaatcttttgtattaaaaaccaaaggactaaacatggccacgacagtaatagctgcctttaacgaatttatgaaagacactgtgaatctcagaaaggtagataccgatgacgcgcgtgcaagtcgcgactggcttatcggtaagataagcgattttgagaaggatgatacatttccggtgagttatcccgctatccatattgcctttggatcgtttgccagaagaaccaaaatccgtcccctagatgatatcgatctaatgttcggtttatctgcgcagggagccacctataactctctgagtgaccggatcacactgacctcttccggagatggatcgcggctacacaggtatcgacactcgggagctgacactatctgctccgtcagaattttgaatgcctttaaagaccacctgcaggatattgcccagtacgcccaagctgatatcaggcgtaaccaggaagctgtcacgctgaagctgatcagcaaggactggaattttgatatcgtgccctgtttcattacgaaggaagatgtctttggaaagactaactacctgattcccgacggcaatggacactggaagtttaccgatccccgcaaagatagggacagagtaacaactatcaacgtgcagaataacagcaatgtgctcaatgtcataagagctgtcaagtactggcagcgacgagcgactatgcccaccatgagctcctacttgctggagacgctgattctggactattacgctaagattacatcctgctcacagtttgtcgatatggagttagaagcgcttttccgccatattggtttcttcgtgcagttccccgtcaatgatcccaaaggcatacagggaaatatcaactctctttctgccgaggagcgccgggcgatttcagacagatgtgacctcgatgctcagaaggcttcggaggcgaggcggtttgaagagggtaaagagtatgaaaaatccatcaacaaatggcgcgatgtgttcgggccttcttttcctgtttacgggtaa

SEQ ID NO: 275978 - DNA, 933 bp, Morganella morganii
atgaataccatttatacaaaccaatcgactagggaaaaccttgatttactttatgcgcaggcctgcatttacgacagtgtgaaaaactggaataagttaaatttcaccttcagtattatcatatcattcctgcttgcggtcgtggcggtttgcaaccaaaaccttaaatttgttgatacagaactgctatcttccttgctgggactgtacgggttgcttgtgttcatgttgaacattgccgtcagtagccatattgcggcactgcgcagaaaggctgcgtcagttcaggatatgtacgattgtcgggtgcttggcatacggcgtaatgaactgaaaatggaggagatcccttgggacgagattagcaaggaggctgaacgtttcaaaaataatcaggcaaaagcaaataggcgatttggtgacgagggatggtacgtcagtaaggtgtatgacgcgccgcaaagtgtgatggcgctcctgtgtcatgggaaaaatctcggttgggacaggtcgcttagggaagtaatgcataagttttatctgttagctttcattatcgctcccgtggctatgcttatttacggtatagtcatgaaattaagaatgaatgagatcctcttatatatagtgtttacgatgccggttatccgctattttttgcttcagtttctggataaccgcagtagcatgaagagaagcgaaaaactgaaaaagtatgttgagaaggaaatattcagtatcagggtgtctggccgcgtggaagaggagaaacttgggtatacactcaggaatattcaggatgaaatttttgcctttcgagcctcatgtccacccgttccgaactgtattcagagactgatgaagggcaaaaatgaacggatttatgacgattatttcgagtcaaatctgaaaacaatgcacttgtctgactga

SEQ ID NO: 275979 - DNA, 1134 bp, Morganella morganii
atggctgcgagaccacgatctcataatattattgtccctaatttgtactgcaaacttgataagcgaaacgacaagacatactggcagtataaacatccgttgacaggtaaatttcacagcctgggtaccgatgagaaagaagcaaaagaagtcgctatccaggcaaatatgataattgctgaacaacaaacaaaacaaatactgagtattaatgatcgcctgtcaggaattaaaaacgccagacacgggatcagtgtcagcgtgtggcttgataaatatctggaaattcagaacgaacgagtacgtgaaggtgaactaaaacctaattcactgaagcagaaaaacaaaccggtaaatttattccgggaacactgcggcatgctgaaacttaaagatattaccgcactggaaatagctgaaatcacagatcaggttaaagcggccggccataaccgaatggctcaggttgtcagaatggtgctgatcgacgttttcaaagaagcccagcatgcgggtcatgttcctccgggatataacccggcgcaggcaaccaaacagccacgaaacagaataaagcgcgaacggctttcactggaagaatggcagacgatattcagccaggcggagcattacccccactatctgagatgcggaatgctgttggctgtcgttacaggacaacgtctgggagatatttctgatatgaagttttcggatgtatgggacgacatgctacacatcgaacaggaaaagactggcgtaaaattggctatccctctctcactgagatgccaggcgataggtatgtcattacgcgaagttattgctttctgccgggatcgtgttgtcagtaaatatctggttcattatcagcacaccacatcacaggcgcaaaaaggggaaaaagtaacagccaatacgctgactacaactttccggaaagccagagataaatgcgggattaaatgggatgaaggagcggcgccaacatttcatgaaatgcggtcattatcggagcgtttatatcggcaacagggaattaataccaaaaatctgttgggccataaaagccagcaacaaaccgataaatatcatgatgatcgtggcaaagattggataaaggtattgatataa

SEQ ID NO: 275980 - DNA, 252 bp, Morganella morganii
atgtcaagaatggtagatcttgaagcgtgggcagaatatgagtttggtgatgaggctccgagcaggcgaacattatataaatatgcgaaatcccacatgatggtaccaccagctttaaaagtcggtaaaaaatggatggtagatcgtgacgctcgttatgtcggaattatttcgaaacctcaattaccgggcaattctggcgatatgttaagaaggattttgtctgatggctgcgagaccacgatctcataa

SEQ ID NO: 275981 - DNA, 645 bp, Morganella morganii
atggaaatacacgaaagaatacggcaaaaacgccgggaattaggactgacgcaacaggcactggctgataaggctggtgtaaatcgcgttaccgtcacaggatgggaaaaaggcgactaccaaccaaacggagtcaacctgcaacaacttgcggaagcactggaaactgatgcgagatggctcactgacggcgtgatgagcacagaagcaaatgtccgtttttctaaacttaatagtccacgcggtgaataccccttaatttcatgggtcagcgctggaaattggtgcgaggctctcgagccatatcacagaaaatcaatcgataaatggtatgaaacgacggtgcattgctccgaagattctttttggttagaggtaaaaggcgattcaatgacagcaccttctggtctgagtatcccggaaggaatggttatcttggtcgatccggagattgaaccgtcatcaggtaagcttgtcgttgcaaaaattgataccgacaacgaggcaacattcaagcaatatattgttgatgcaggtaatcactatcttaagcccctgaatccgcaataccgtatgacagctataaatggcaactgccgaattatcggtgttgttgttgatgcgaaaatagcccgcctgccataa

SEQ ID NO: 275982 - DNA, 201 bp, Morganella morganii
atgaaaaaagaagatgtcattaactatttcggcggtatctgcaaaacagcagatgcccttggaataaaacatccgtccgtatccggctgggatgaggttattcctaaaggcagggcgtatgaaatcgagaagatcacaaacggaaaactcaaatacaaccctgcactttataagcatagcagcactgaaaaacacggttaa

SEQ ID NO: 275983 - DNA, 480 bp, Morganella morganii
atgaaaaacgaatcactgaaagaagtcgtaaaaaagatgtgctgcgccatgccgggtggacgggaagcgctggccggggcgctggggatgtcactgacgacattcaacaacaatctgtatgagaagaacggctgccggtttttcgacaatgacgagctggaagcaatggaagatctgaccaaaacccgttacctggtcgaataccacatggaccggcacgacattacgccgatggaaacgatagagcctgagaatatcgacgaagtggaattattcaagatacagacaaacctcagtgcgcatcaggggcagctttccgagttaatcaaaaaaagcctggaagatgacgttctgacggaagaagaaatgacagccatccacaaaaagatgaacaaagtattcgcatacgcccgcgggtttattgcgtcactgaatgtggtttacggggtcggaaatgattcaggtaaccagaaagggtga

SEQ ID NO: 275984 - DNA, 192 bp, Morganella morganii
atgaaagaaacagctgacaatctggatcggtattacaccgacagccgcgggcggaaagttcatgttgtccggtttgaccggcaaaacagccgggtgattttcatgcgtgacggctatgagcatccgtgctttgaacctctgaaaacctttcaggagcggtatacacgcgtggatgaggtgaaccatgagtaa

SEQ ID NO: 275985 - DNA, 1032 bp, Morganella morganii
atgagtaatttactactgaaaagccgtccgctggtaatcattcctgagctggccgtccggcttggtgtgagtgaagcgatagtacttcagcaggttcagtactggcttaacgatactgcctcaggtgttgaaattgatggtcgccgctggatttacaatacgatagatcagtggaaagagcagtttccgttttactcagaaaaaaccatcaaacgggcgtttactaacctgaaaaccctgggtgttctgaacgttgagcaacttaaaaaagcatctcatgaccgaacgaattactactcaataaaccatgaacacccgcttctttccgatggggtcaaaatgtcctcaccgaacgggtcaaaatgtcctcatcgagctggtcaaaatgaccatgtcgaagaggtcagcatgaactcatcgaacgggtcagattgtcccgatcttacagagactacaacagagattactacagagaatacaacagagaattcttgtccggttcctgcggaacaggacccggcgaaagaggttcttgattattttaatctcacgaccaattcaaattaccgtgacggaaaaactacgatgggacatatccgcgcaagactggctgagaattatctcccatctgacctgaacctgatcaccgactaccttactgaaaaatggcaaaacgacagcaggatgcgggattacctgcgccctaagacgctgttcagccctgagaactgcgaagaatattttgccaaagcacagaaatggcatgaatccggccgccctgcgtgtgttaacggccactggctgaagcctggcgaggtgcatgtggaaattgatccgctggaacgtgacgaggcattcgctcgcctgattagcagcgggtcaaagccgcgtaaccgcatcgaggaaatcgcactaaaaatggccggtaaaactggtatccggaggcagacagaattcatgggtcgcaaaacatggatttatatctggaaacaggccacagagcaggccgcaaaagaacaggaggcagcatga

SEQ ID NO: 275986 - DNA, 249 bp, Morganella morganii
atgatcatgcgttcggaaagcaaagagatttacggtgtgagtgtggttcctgtgatggcggttctgcaccggtttattcggtggtgggtactgcgcgacctgaaccgcgcctggtcagatgatcgcttttttgaaaagcacattcagcgccgcggctggctgcatattgcggacgcgttcacattccacaaccggtatcagcgactgcgtgaagtggtgaaagcatatcaggggaagggcgctatctga

SEQ ID NO: 275987 - DNA, 1017 bp, Morganella morganii
atgaattacctgttaaccggctttgtccaggaagatgcccggatcctgatgtttaatccgggcgcggagatcggcaatttccggaatggcgcccgttatgttgtcagtgctgctccccgttcaatggatggtattccgtccggtcgcgttccggcagatacgcagccgctgctgacggatgctcgggtattacgtttcctggacaatcccgcagtggtaaaagctgccggcggtttacaggggtttcggcattacgttaaatcgatgggtcactgccagattaacgatccggaaaacccttatcaccaccacgaactgaccatgacccggcgcaaggacggattcatccggacgtgctggcaccatgacaacatcttgcgggcgcgtaatgtccaccagcagcaggcggatgaaattctgttatgcaaccaacgggcatttgtggcgagaagtatttttaccgatcttcggctgccggccggccactttctgaatccctccgatttgttcacctggtcggtgatgcgccgtgtcagtgatcatcttccgccctttatctgttcatacatcctgatgcagccaccggaagaagagataaccggcaccatgacggagcattccattgttcaccggacacgctcacacagccggattgttcaggacatcgtagagcagataaaaccggtcgttgttcctgagatagagccggagccaccagcaagttttatgcggatcccgaagttaaagcgctgggagtgtccgaagtacctgcaatgggtgaagagtcagccgtgttgcgtatgtggtcagcaggcagatgacccgcatcacatcatcgggcacggcaccggcggtaccggtacaaaggcacacgacattttcaccatcccgctgtgccgtattcaccatgacgaattacaccgggacccggcagcatgggaagcaaagcatggtagccagctggcgttgttatttaagtttatgaaccggtcatacgggatcggtgtttttggttaa

SEQ ID NO: 275988 - DNA, 789 bp, Morganella morganii
atgaaattagaatcagcactgaaacagttttacccgaaatcccccgcactcagtgatgtatcacactcaacatcccccgacaggcttgaaggcatggatactgccgcagcactcggaatgacacagaaaaatgccggattcgggatgcatgcgtttttggcgaagaatgatgtcagcgcggaagataaatttaaaaccgttgaagcactgacgcagtatgcccttcgtactgtgccaaagttggtggcaaaatctgcaggaaatcgtgttgctcagtgcatgagaattctggccgtcatggcatttgaggattacgcccgttcagcgggttcggtttgtcagtgtcagaactgcggcggaaaagggctggtttatcgtcgtaaggatgtagtaaagcatccgggtataactaatatggaaggtaaagtgattgttgagccggtagtccgtaatgagctggtgggtgaactgtgtaagacctgtaatgggagaggacaattgacctaccggtgccgctgcaaaggccggggtaaggtatacgacgaagagcagagtgaattacggggtgtgccggtattcaaagactgtccgaaatgttcgggtcgcgggtataagcgggtgccgtcatcagtagcttatcaggctataaaacgtctcgtgccggatttaaatgagaggacatggcgcaggaactggaaactattttatgaaaaattaacgagtaagtgttttattgaagaaagccaggcagaagaatcatttgtaaaagcggtggatagttataaatag

SEQ ID NO: 275989 - DNA, 558 bp, Morganella morganii
atgtcagtgtggaaagataaaacaaatttaaaaatacttgtttggggtacgcttattgggggatttataagcgcgcttgttaagtggggctctgaagtaaatatgccaccaagggtggctggtgaaatatcaccaccggcagcgaatattgatgcctggttaggttggctgggtgtgaactctcattcactggattatttttaccagggaacattggtgagtggtgctgtaaccttgtatcactggttgttcagttttgtattttctttcatttatgttttgttatcggcctacacacctaaaatcagaatattttacggtgcagtatatggggtcattgtaacaatatttgctcatggaataatgatacctttattcggctttcgtcacccctcttataatgaaggggtagttggttggttatggaatttaaatggttatgagctttggagtgaaattttaggacatatttattggtcggtatctatagagatttgcttgattgcagtcctggcttcattctcacgacctatccgtggttgctggattaataaataa

SEQ ID NO: 275990 - DNA, 210 bp, Morganella morganii
atggattattttttgacgttaccgggcagcgatactcgttctgttctgcataaaaaggcatgtccgaaactagaacgggcgaaaagtacagtgtatgttggatactactggggagagcacgctgcggttcagcaggctatcgttgtggcaagaggagcagtggttttatgtccgttatgcataaaccagcatgatgaagagaatcagtga

SEQ ID NO: 275991 - DNA, 240 bp, Morganella morganii
atgaccagtaaagagcttaatgaccggatatctgatgctgacaaaaatgaatcacaagagatgttaaagccagtcagggggctgtggttgatagtcagtattgtgatgtttaatttgattccagtgcttattcatggtggagtattgccactaactaattttttgatttttaatgcatttgctattcctgcagttgtattgttatatcgtaagaaaaccagaggaaaaaatacgtattag

SEQ ID NO: 275992 - DNA, 276 bp, Morganella morganii
atgcttaaatctcttctgactttcgaccagatgataactcctaaacttattactgtactttactggcttggcctgattggtgttctgttttccggtattgcaactatttttgtcagtaatgcctacggtggcggttttttcagcggacttatcagcggactggctactatcatcttcggcggactaggtgtccgtatttcctgcgaactgattattctgtctttcaacatttacggaaaactcaaagagatcgcggaaaacacaaaaccacaataa

SEQ ID NO: 275993 - DNA, 192 bp, Morganella morganii
atgcgcatgtctgacaaatattccagccctacagcatatgcctgggggcttataacctctgcctttggcattttatctctggatcagtgggccattgttgccgggatcatctgtaccgtcggtacgttcctggttaactggtattacaaacggaaggaattccagttgaaagcaggtgaacatcatgaataa

SEQ ID NO: 275994 - DNA, 420 bp, Morganella morganii
atgaatttatcccgcactgctgtaatattgggtatcgccggtctgagcatcagcttttccgctgtaacggtggcgaaagagaaaggattaagtccgctggagcaatgctatcagtctgccggggatgcaccacggacaaaaattgcaggctgcctggatgcaaaactgaatgccgcaaatacccggctgaatacgattcaggcacagaaaaaacaggaaattgcatcactccattcagccggaagtgaaaaagctattcagtcactgaatctgtcacactccgcctttatcactttccgcgatgctgagtgccggtatcgctatgatgcaacactcggcggtagtggtgccggcgatatcatgaaagcctgccaaattgatctgacaaattggcggataaaacaactacaggaaaattaa

SEQ ID NO: 275995 - DNA, 1878 bp, Morganella morganii
atgaaaaaaacattgctgttatttatattattcagttttcaaattatcgcagcaccactgactccttcagatatcgatgcactgaaaaaagaaccggaaagggcagcagaaaacattgttgcatccatgactcagacagaaaaaattggtcagctgatgatgcttgactttcgctattgggatatattccggagtccggttcctgttcctgtgatcaatataaataacgatatcagagatattatctatcgttaccagttaggtggcgttgtattattcagagaaaatttaattgacacaccacaaacagtaaaactgatcaatgatattcagtcttcccgttaccgtcttccgttatttatcagcactgaccaggaaggtggttatataacccggctgcgggttggtacagaaatgcccggaaatatggctctcggagctacccgtgatccgaattcagcaagattaaccggtgaaattcatggcagtgagttatctgcactggggtttaatatgaattttggcccggttgtggatatcaataataatcaaaataatccggtcattggtgtacgggcgtattctgacagaaaagagctgacagaaatcctgtcagccgcctatatcagtggtattcatcagtacgggcttatcactgctcttaaacatttcccaggacacggcaatgtttctgcagattcacatgtcgcccttccggttgtcgcatcagatgaaaaaacctggcggcaaactgaactgccgccatttatttatgcgctgcaacatggtgcagatgcggttatgactgcacatattattgtcccggcactggatgacacaaaaataaaaacccgtgacggttcagaagcaggtacgccagccacattatccaaacctgtcctgacaggcatattacgcaaagaacttcactttcaggggctgataattacggatgccatggatatgaaagctatcactgataattttgagatcaattttgccgttgaacacgctctgtctgcaggcgcagatattatcctgatgccggtaaaaatgtgggataaagaagcggttaagcgccttgataatttatatcgttatctggatgaacaggcacagaaaaacccggaactgcagcaacgtattgatgaatccgcaaaacgggtggttctgatgaaactgaataaagccatcagcggagcaccggcagatccggtgaaggcacaaaaaattgtcgcctcagcacagcataaaaaccaggaaaataaaatttcagaacaggctgttactattataaaaaatgacggcatcctgccttatcaactgaaaccggagaataaaattctggtaatctccgatgaatatccccgtaatcagttaattaaaaaacatctgaatgatattgcacgggaaacggaaacccgtattcatgtcactgcacaaaaaataaaaaccgataagaaaatgctctccgaaaagaaagtcagcaccatgatcagcgggcaggatattattttactggtcacttacaacctgcgggaacgtgatacaaatgcacaatttatcatcaactccgccaatgatgcaggcattcccttagtcgtaatatcttcacgggatccatacgatattgcgagtctgagtaatgtaaaagccaatattgctatctatggtattaccggatttgatattacaaatggtcagcgtaacgcactggaaaccaatatccggagcggcttacggacattattctctggtaaaaatgcccgcccgcttaattatcccgccggacggttacccgcagacattaaagacccggaaagtggtattattttatacccttatggcacaggggaaacctatgataagcaggattag

SEQ ID NO: 275996 - DNA, 2145 bp, Morganella morganii
atgatgcaaaaaacagtactggcaaatgcaatctgcggtgtatttttagtgaactcaatgacagcgtcagcggcgagaacctatcagtatgaaaaggaagttactaaccggacagtagccgataaccaggtcggtattaaaccgggctcaggtgatgccgggaagcagactattggccaggacgggaaatcagtcaacagctggatatttgacctcggaactgttgatgtgaatgatggcggtatactggataaagctaaagtgggatctcccagaacggcttctgagctgaatagcggaagtcgtcagaatttatatcttcctgctgggcgtgacggcgaagttaatgtgttcgccggcggaaaagcggtggatacacaaattatcggtaaaggaaatgtgaatgttcatgaagacggaattgtcagtaatacatccgtaaaagaaatgggtgttttacgttttcacaccggcggaaaaagcaccggtgatatgaatgttgaacgacaggcatttgttattctggataatgatgatttttatggcagtggtaaaaataccataatagaacatatgaatcttgccggaaatctttttattcaggatatgtcgacagagaatgcaaatgaattttctaatttccaatgggaaaatcgggagattaccgttgatccggcaagctattttcaggtcgtcaatattgatgatctttatttagatcatggctcagtcagcctgaaaccaaaaatagacggtacgaatgcaatatttaatgagctagtcgtaaaaaacctcagtggtcagggggtgttttcatttcactctcagattgccgatgatatcagtgataaattagtggtgacaaataatacaaccggtgattttaaggttaatgtttatgataccggaaaaaatatcattgacccggatgaaaccgtagagctgattgaaattaatcagggaaatgctgaatttaaactcgccggaaataatggtgtggtcgatctgggactttataaataccgtttaatcaaaggtataaaaagtaacggaaaatcaacctggtatttggcaaccaaagcagatcatataccctatccggatatcgatcctgatggagagatacaagatgaacctgaaatagataaagacgataaatatgttcaggaaattgatacggaaaccggaaaagatgttactaatgataccagtacgcctgagctccgggatgtgctgtccaacagtgcactggccgggttatcaatggcatcggtgaatcgtcagatattgcgcagtgagaatatatcaggcccgtcacgtcgtcatattacagacagtttgtcagataaaaaatacgggatgtgggcaaattaccgttatgacaatgcaaagttcagtgacagtaaaagccgtgcattcagaaatcacctgaatattctggaaatcggttacgataaagtcaataaagcgcgttacggtgatattgcattcggtttatttaccagcgcagggaaaacccgatcgacatttgattatgcgcctgggcagggaaatacggacagttttgctatcggcggatatacccactggcaatatcaggcttggtatatcgccggtatgctgaaaggctcgcattttaaaaatcgtgttagtactcaaagctgtggtggcggagcagttgacggctcatttaagcaaaatgcgctgaccgtcagtgcggaagccggaaagaaactgcatattacaccggaaattagtctgacaccttacgggcggatcgattacagccgtttcagtgaggcaaaatatcagttatcaaacggaatggatattcatgcgcataacagtgacagtgtgaacggtgaaataggttcacacctcagtatggatacacacattgatgatattaaaatcagtccttttgtgaatatcggtgtttcacatgagtttgtgaaaaacaataaagtgacactaaataaaaaagatttttcagccagaaatgaaactacaacaggtaaatatcaggtgggtgcaactattgcgttaacgccggataccaggataaccggcagcctgggttatcgccatggtgataaaaatgaatcacctattaatgcttatatcggattgaaagtcagtttttaa

SEQ ID NO: 275997 - DNA, 444 bp, Morganella morganii
atgcagggtttaaaacgaaaactggtctttatcaccgcttatgagctcatcggctgggtcatttcatcagttgcgctggccatactctctggtaattcagccggtgtgaccgggccgctggcgctggcaattaccaccatcgccgtcagctggaattttatctttaatacattgtttgaattctgggaatcccgccagatttcccgtatccggacattccgccgcagattcgtacacgccattctgtttcagctgacactggtggttttccttattccgctgattgcatggtggttatcggtcagtttaatacaggctttcctgctggattttgccctgattatttttatcccgatctacacatttttctttaactgggcgtttgacaaactcttcggagttccggcctccgcattaccccgggaaaaaagtaccacgcattaa

SEQ ID NO: 275998 - DNA, 897 bp, Morganella morganii
atgccgtttaacagtgataatttgcagctttttctgacggtgctggagaaaggatcattttcagccgccgcaagagcgctgcaccgcgtgccgtcagcggtcagtatggcggtcagtaatctggaagctgaactgggttttgcactgtttgaacgttcgggcagggcaccggtaccgacagaaagagccctggcgctggcaccgtatgccagagagataacggataaaatttatcagctgaatgtgtttacccgcgaactgacgcaggatgtggagagtacactggcggtgggggttgcaacctgtgtgaatccgcaggacctgttttctgcactgcagatactgaatcagcgttatccgctgctgaaaacggaaattttatccgggtcacaggatgacattctgccgctgctgcatcaggggcggatccagctggcactggttttcggcgggctgtatgtggatccgcgcgagcagtttcactgtatcggtcatgaagccctggtggccaccatttcagccacgcatccttctttatcacaacaacagtctgtttatattgaagatttggtacaggcaaaacaaatcgttattgccagtcttcatcattctctcactgatgtgcgttcacagatggcgacgaaaacctggcagaccgataatttttcggtggcgctgggactggttaaagcgggtatcggctgggggaatctgccggaatcgatgatccgggcggaagtggcgtccgggacactgaaagtcctgtcattccgcaatacccgtaacggtctggtgctgccggtgcatattgtcagccggaaaggggatgtgcttaaacgtggtgctcaggagtgcatcgggctgctgacggaaagccgtgtgtctgagggaaattag

SEQ ID NO: 275999 - DNA, 627 bp, Morganella morganii
atgtttgaaatccgcgatttacaggttatccagggcggaaaaacattgtgggacggcctttctttccggttgaatgccggtgagcgtctggggatctccgcacccagcgggttcgggaaaacaacgctggggcgggtcctggcacagtggcagcaaccgcatgccggggaactgctgcttgacggcaagccggtaccgaaaaccggctattgtccggtgcagctggtaccgcagcatcctgagaagtgttttaatccgtaccgcacgaccggtgccgggttatatgatgcctggaaaccggatgcggaatggctggaaaagctcagcattgagcctcactggctggaacgtcgtccggatgagttgtccggcggggaactggcgagaatcgcactgttgcgggcgttagatccgcgtacccgtttcctgatcgctgatgaggtgacggcgcagctggatgcacatattcaggcgcagatctggcatgtactgattgaagaatcagagaaacggccgctcgggctggtggtattcagtcacaataaggcgctgctggaaaaggtctgcacatcggtatggattgccggggagccggaagagagcctgctgtctgatgtggcagtttga

SEQ ID NO: 276000 - DNA, 1581 bp, Morganella morganii
gtgaaaaaaactttgctttgctgcgcggcattttctgcattttccgcgcaggcctcttcttcctgtcagtcactttccgccccggatgaaaaacagacgatgacgattaccggcatatttgatcacaacggacaggcctgtgtgcagttgccgttgtcagaaaaacaggtggtgatcgcggaaagtgagaatatccgtgatttgtcactctatgacagtcagatgacaccccgccggacgctgcttaccgacaatcctgtcacagaaatgcaatctgtgacattcacattaccgtttgatgacacctggacactgacctcacagggagtaccgggctctgaatggaagttggcacttactaactatccgtatcagccgctggttgaaaacacctccctgccggtggacagtgtgcggttgcagcaactgataacgctggttaaagggcgtgatacctcggctttctggcaggaggtgacagaaaccccgctggttgaggagtatgacgagcaccacaagcggatcacgtttctctggcgtggtgcgaaagtgaatgcttacatacttggtgcgccttccgggcagcatgatccgatggccagactgaatgataccgatatctggtatcgctcctacattgttcccgcagagactgtcagtcagtataaaattgccccggatattccgcagcttgaccgttccgttgaaggcgcccgccgcaaagcgctgctgagtactgcacaggcggacccgcgtaacccgctgagtgcgggtgcagacggggcggatgaattcaatcgccatgccattattgctttagataacaacagagtgtgtgatttccgggcgcccggacaacaaccggtttttggtacggtgacgttgcatcagctgcatagcgatatcctgaataaccagcgggaaattgcagtgtataccccgccggagccgggggaggagccctggttgctggtgctctttgacgggcagatataccgcaaaaactatcatatcgtcacatttattgatcagtgggtgaagcgcggagaaatcccgccgctgtatgtggtgatggtggacagtatcagcagtgagcagcgcggcaaagagctgccgccgaatgagcaattcccgcagtttctggataaagagctgatgccgtggctggcacagcagggtattaatattccggcggggcggaccattatttccggcagcagttacggcggccttgcatcttcctggaatgcgatgaaattacctcaccgctttggcaatgtgctgagtatgtccggctcttactggtggtcaccggagggagagccgccggaatggctgattcgcgagtttgcaggtactcacaaacttccgctgcggtttttccttgaggccggtgtgtttgaaacccgtgccggtgccggcgggattttgcataacaaccgggcgctgtatcaggttttacaggaaaaaggttacgaggttacccgtgaggagcgcccgggtgggcatgactatgtctcatggtgcgaaaccctgcattccgggctgatgtatctgactgacacaaagaggtcacaatag

SEQ ID NO: 276001 - DNA, 1437 bp, Morganella morganii
atgcttcatgcgacgatgaaaacacgggttgcagctgccgttctggcactgctgacaggctctgcattaccggcagttgcagcggggaatgcagatgccattctggcacaggagcgcgccgccaaaggcaatatcacggagttcggcggtgcgcgccgtctgtcatccgatcagactgaggcgctgaaagcggctatcggtcagaccaaagcaaaaaatgtgattctgtttatcggcgacggtatgggtgattccgaaattaccgtggcgcgtaactatgcggaaggcgcgggtggcgtgtttaaagggattgatgccctgccgctgaccggtcagtacaccacgtatgcgctcgataagaaaacacagaaaccgaattatgttactgactccgctgcctctgcgactgcctgggcttccggggtgaaaacctataacggtgcgctgggcatcgatgttaccggcaaaccgcacaccaccattctcgagctggcaaagaaaaacggcaaagcgaccgggaatgtcaccacatctgaaattcaggatgccacaccagccgcactgatctcgcatatcagccagcgtaaatgctatggcccggaagaaaccgcagagcgctgcagtgcggatgcgctggaaaacggcggattaggctctatcagtgagcaactgctgaatgcccgtgcggatgtcacgctcggcggcggtgcgaagagtttccgtcagacagccaaagccggggactatgcagggaaaactctggaagagcaggcagcggcacgcggctatctggttgtgaaagatgccaaatcgctggcggatgtgaaagcggtaaatcaggataaaccggtgctcggattattcagtgacggcaatatggaagtggcgtgggaaggcccgaaagcgtcctaccgcggcaacctcgacaaacctgtcgtggagtgtaaaccaagttcaaaactggatccgaatgccccgacactggctcagatgactgaaaaagccattgatctgcttaaagatcatgaaaacggcttcttcttacaggtggaaagcgcctctatcgataaacaggatcacgcggcaaacgcctgcggccagatcggcgaaactgtcgcgctggatgaagcggtacaaatcggtatggaatacgcgaaaaaacatggtgatacactggtgattgtgaccgctgaccatgctcattccagccagattattgaagcggatgtggtctcaccgggtctgactcaggcactgctgaccaaagacggcagcgtgatggcagttaactacggtaactcggaatcagattcgcaggagcataccggtgcccagttgcgtgtggcggcatatggtccgggtgcggcgaatgtggtgggtctgacggatcagacagatttgttcttcaccatgcgggacgcgatggagctgaagtaa

SEQ ID NO: 276002 - DNA, 1581 bp, Morganella morganii
atgcgtgttttcggtgcggatctgcggcggctgctcggaaagagcatccggaaaacatcacgggcatttctcgccggtctgggggtaactgcgcttgtgcagagcagtaatgccaccgcattgctggtgatctcgtttgtggcgcagggcatgatagcgctgccgcccgcactggtgattatgctgggggcggatgtcgggacggcgctgatggcacgggtgctgacgtttgatctctcctggctctcacctctgctgattctggcgggggtcactacgtttctcagtcagaaaaagagccggaccgggcaactggggcgggtcggtatcgggctggggctgattatcctggcgcttcagctgattgtggcttccgcagagccgattacacaggcctctgcggttcaggctatttttacgtcactgagcggggatgcggtgctggcgctgctggtgggcgcactgtttgccatggtcagctactccagcctggcggcggttcttttgacggccacactgagtgccaccggcctggtgccgctgcatatcagtctggcgatcgtcatcggctccaatctcggcagcgggttcctggccatgctgagcagccgcggccagaatgcggttgcgcgtcaggtggtgctcggcagtatgctgttcaaactgattggctgtgtgctggtgctgccgtgggtgaaaccgctggcgctctgggtcggccagtacaatctgtcggcggcggaagtcgttatttatttccatgtggtctataacctgctccgctgtgtgctgatgctggcactggtgaaaccgatggcgcggctgtgtcagcggctgatcgccgaaccggaagcggaagaggacagcgcagcgccccgttatctggatcagagcgcgctggatactccgtctcttgcactggctaacgcggtgcgggaaacgctgcggctgggggatgtgattgaacagatgcttcagcgttttgacagccagctggcgggtaaaggtgagcagaaacggctgataagccacctggaagaagaagcagagatgctgcacagcagtatcaagctctatctggcgcagttacagcaaaccgagctgggagagagtgattcccggcgctgggcggaggtgattgataccgcgatgtcacttcagcagtcctccctgattatcgggcggatgtctcacgatgtggcgaatcagacggcggatccgcagcgtatcttctcgaaggacggctacggtgaactgactaccatgatgtcgcggttgcagaataacctgaatctggcgatgtcagtgtttgtgtccggggatgtggataatgcgcggcggctgcgccgggcaaaacaccggttccgtctgctgaatcagcgttactcttttgctcatgtggagcggctgcatgtcaataatctgcagagcatcggcagcagccggttacatatcgggctgctgggggatatgaagcgcctgaactctctgttttgctctgtggcctatcatgtgttagaaggtgtcgcagatataaaaacagagacaacaaatgatgacacttctcacgagacagcttga

SEQ ID NO: 276003 - DNA, 261 bp, Morganella morganii
atgcaaattaaacacccgctttcatcgtttttctggcagcagttaaccggggtcggtggcatgatgctggcgctgataccggtcgtgttgtttttatcacaggggcatgaacaggatgctgcccgtattgcattagcggtggtgattctgctgacaatgccgatgctgtataaccgcgtattgcgtcatttcctgctgattccagcagggattgcattcgttctgggaagtctgctctggttcgagcatctgaggatgtga

SEQ ID NO: 276004 - DNA, 1014 bp, Morganella morganii
atgtccatgcttaccccggccagtgaagtgattttacgtcatgcagacgaatttaccgggagccgtgtcctgcttgccggagacattcaggactccctcgctgcacaactttccgcgcagtcagtgtatgtcagcaccagccagtatcatcagtggcaggctctgcgtgcaccgctgggtgatcgcgccgcatttgcgctgaccgtcagtccggaagccgccgcacaatgcgatacactgatctatttctggccgaagagtaaacaggaagcactgttccagctgacacagattttttcctgcctgccggttggcagcaatatttttattgtcggtgaaaaccgcagtggtgtccgcagcgcggaaaaaatgacagagccgttcacagcactccgtaaaattgacagcgcacgccgctgcggcctttattacggcgaactgaccaccccggcacactttgccctgaaagagtggatcggcagttataccgctgaagggacgcaaatcgtgacgctgccgggtgtattcagccaggacaatattgatgtcggcagcgcactgctgctggaatcactgaaccagccggtgaccggctctctgctggatattgcctgcggcagtggtgttatcgcgaccgtactggcaaaacgtaacccggggctgaccctgacgctcagtgatgtctcagcggccgcccttgaagccggacgcgaaactctggcgcggaaccagctggaaggccgtgtaatcgccagtgatgtgtattcggatatcagtgaccgctatgactggattgttgccaacccgccgttccatgatggtctgaacaccagctacagtgccgcacagcgccttatctccggtgcaaaagcccgtctgaaccgcggcggaaaactgtgtatcgtggccaacgcctttttaccgtatccggatctgctggacagcacatttggtcagcataaggttctggcgcaaaccggtaaatttaaggtctatctggctacaaatgcctaa

SEQ ID NO: 276005 - DNA, 393 bp, Morganella morganii
atgctggctcagatggggatcacccaatggacgctgcgtcagccgcagcgcctgaaaggggaactgtctgtacagatcccggcttcggcacgtttgctgatcataaccgatgagcaggcagatctcacctgtgatttactcagcgatatattccgcagcctgaatatcacagcggatgatgtttactgcatcacgccggataacgttcagagtatcccggcgcagacaaactgcctgtgctggctgccgggaacggaagctgaactgccggattcactgccttcattacactccccccgtcttgccgacctgtatcaggatgcacaggcaaaacgcggattatggacacaaatttatcattatgatcagactgtcaccgctgcttcccgctga

SEQ ID NO: 276006 - DNA, 453 bp, Morganella morganii
atgatcagactgtcaccgctgcttcccgctgattttgccgccgcattccgtattgaacaggctgctcacgcttatccctggagtgaaaccacattccgcagcaatcacggcgaacgttaccataacctgaaactggaagcagacggggaactggccggattcgccatcaatcagacggtactggatgaagcaactctgtttaatattgcggtttcgcctgaccatcagggaaaaggttatggccgtcagttactggaaaaagtgattgaagacctgacagcaaaagggattgcgacactctggctggaagtcagggcatccaacagcccggcgattgcgctgtatgaatcactcggttttaatgaggtcactgtgcggaagaattattatccggcggcacagggtaaagaggatgcagtgattatggcgctttatctgagtttcggaatgtaa

SEQ ID NO: 276007 - DNA, 1233 bp, Morganella morganii
atgtttattcataaaattatcacaccgatgtttatccggcgctttgaatgcgtcggttctgaatgcctgtcgcactgctgccaggactggtttatcagtattgataagaaaacctataaaaaatatcacaatgctgacagcattgaaattaaacagatttctcaggaacatgtccttaaatcggagcgtgccggtacttatgcgtatatccggctgacggaagaaaaacagtgtccgtttctgacagaaaagcggctgtgtggtgtttacagcaagctcgggccttcggcaatgagtgatacctgccgtgagtatccgcgcagtgaaataaaatatcagaatgcgacgtttaagcgcttgtcactctcctgcccggaggttgtccgtcagttgctgttttccgccgatgccatgcagttaacggaagaagagcagtatctgaaaaaagcaccgcaggatgcggcactgactgatccgcaatacctgatgtacctctggtgcctgaatctggtgcaggctccgtcgccggagtttgaggataacctctatgccgtcatgcagttactgacgtttatcagtaagctcaattatgacattgaagtgaattttgatcgtattcagggcgtgtatgagtttctgctcaatgcagcggaaaacggggaactgacggcagagcgcagagcactgccgcacccggtcagttttcagacggcagtattaagtgtttacggcaaatttattccgaccctgtcccgcagcggcagttttttactttccacttatatcaacacgctcacacagctggggctggatgagcaacagaccacagaacgcacggaagaaaacatggcgcgtctgcggtcagaatggaaagcacagcagcagagcagttgtctgaatcaaccgtacacactgcgcaatctgttttcctatctgctgtatcacagccagtttccgcatgcggctaatttcgccggtgatgttaccggttcccgcaatgccttgtctcacttcagcctgctggtcatggattatttctatctgcgcaccaatctggcggcgctggcggtaacggaggaacgggtactgaaagagagtgatgttcagcttttactgggcgcctatttctcactgaaaatgcatgtgagtgatattaacgcagatttactggcactgatggaacgttgtcagatgagtgatgcaatcgcttgtatctgcctgctggataactga

SEQ ID NO: 276008 - DNA, 1590 bp, Morganella morganii
atgtcaaataatgcatttttacaggaagtggccaagcgccgcacttttgcgatcatttcgcaccccgatgccggtaaaaccaccattaccgaaaaagtcctgctgttcggacaggctatccagaaagccggtaccgtcaaaggccgcggctcgaatcagcatgccaaatctgactggatggagatggaaaaacagcgcgggatctctatcaccacatccgtgatgcaattcccgtatcacgatgccctggtgaacctgctggacacccccgggcacgaagacttctccgaagatacctaccgcaccctgacggcggtggactgctgcctgatggtgatcgatgcggcaaaaggggttgaggatcgtacccgtaagctgatggaagttacccgtctgcgtgatacgccgatcctgacctttatgaacaaacttgaccgcgatatccgtgacccgatggagttactggatgaagtggaaaacgagctgaagattgcctgctcgccaatcacctggcctatcggctgcggtaagctgttcaaaggggtttatcacctgtaccgcgatgaaacttatctgtatcagaccgggcaggggcataccatccaggaagtccgtaccgtaaaagggctgaataacccggatctggatgccgctgtcggcgaagaactggcaaaacagctgcgtgatgagctggaactggtacagggcgcatcccatgaatttgatgaggagctgttcctcgccggtgaactgacgccggtcttcttcggtaccgcgctggggaacttcggggtggatcatatgctggacggcctggtttcctgggcaccggcaccgatgccgcgtcagactgatgtccgtgaagtgactgcaaaagaagataaattcaccgggtttgtctttaaaattcaggcgaatatggatcctaaacatcgtgaccgcgtggcgttcctgcgcattgtctccggtgtgtatgaaaaaggcatgaaactgcatcaggtgcgtctcaaaaaagacgtggtgatttctgatgcgctgacctttatggccggtgatcgtgcgcatgtggattgcgcctatcccggcgatattatcgggctgcataaccacggcactattcagattggtgataccttcactcagggtgagattctgaaattcaccggtatcccgaactttgcaccggaactgttccgccgtatccgtctgcgcgatccgctgaaacagaaacagctgctcaaagggctggttcagctgtccgaagagggcgcggtgcaggtcttccgtccgctggccaacaacgacctgattgtcggggcggtgggtgtgcttcagtttgatgtggtggttgcccgtctgaaaagcgagtacaacgtcgaagcgatttatgaggcggttaacgtctccaccgcccgctgggtggagtgtgacgatgtgaagaaactggaagagttcaaacgtaaaaacgaactgcatctggcactcgacggcggcgataacctctcgtatatcgcaccgaccatggtgaacctgaatctcaccgcggaacgttatccggatgtgagtttccacaaaacccgcgaacactga

SEQ ID NO: 276009 - DNA, 405 bp, Morganella morganii
atgcgcaataccatgaaatcactggctgtcctgctggtcagcggcacactgttcagtgcatccgccatggcggaagaatctctgagccagaaagccggccaggcgtgggacagtgcttctcagtctgcggaagatttgggtaagcaggcggagcagaaatttgacggcgcggtaaaagatgcctcactgctggtggatgacagtacgatcaccgcaaaaatccgcggtcagctgctgagtgcggatgatattgacagcaatgatatcgctgtgaaaaccattaacggtactgtgtatctctccggatttgtcaccacagatgcgcagcgtacaaaaatcatcgatattgccaaaggcgttcccggtgttcgtgccgtggaagtcagtatcgggcagtataaataa

SEQ ID NO: 276010 - DNA, 1065 bp, Morganella morganii
atgggaacgtatatcccggtaacgcccgggaaaatcgcaccgctggcctggttgcctgatccgcttcaggcgaccggtaaactggcgctggtctgtgaaggtggcggccagcgcgggatttttacggccggagtgctggatgagtttctcaaagccgggtttaacccgtttgatttgctgataggcacctctgccggtgcgcagaacctgtcggcgtatctgtgcggtcagcgcggctacgcccgtcatgtcattacccgctacaccaccgacaaacaattctttaatccgctgcgttttatccgcggcggaaatcttattgatctcgactggcttatttcttcaacctctgcggaatgtccgctgaatattgcgcatgcactgcggcgctttgagcaggggcaggaattttatatgtgcgccagccgggcggataatctgagcgccgcgtatttcagcccgcaggcagaagactggctggaatatatcaaagcttccagcgctatcccgggattctaccgtgaaggggtggaaattgacggcatcacatatcacgacggcggtatcagtgatgcagtaccggttattgaggcatggcggcggggggcgacccggattgtggtgatccggactgtgccttcacagctctattacaccccggaatgggtgaaaaggatggaacgctggctggaaaaaagccatctgaaacggatggttgctatgatgaaacagcacgccaaaagctattaccggacacaaaagtttattcagtcaccgccgcccggggttgaaattgctgaaatttatccgaatgcaccgctggcaagtaatgcgctcggcagccgggtcaaaacactgatgcaggattaccggctgggccgccgcagcgggcgctattttctggcaacactcggcgaacgctgggcgtcatatgagcctgtacgaagttccgtactgagggttccccccgcatccaacgacaacgactcacaactgccggtcaccgacggtacagcggcggtattacattcaccggaacgctcaccggaaaagccggcggactga

SEQ ID NO: 276011 - DNA, 795 bp, Morganella morganii
atgcaatttattgatacccactgccatttcgatttcccgttttttacggatgatcttatccgccacaaagccgctgcggcacaggccgggctgaccgatattattatcccggcggtcagcaatcggaacctcagcacagtcgccgggctgtgccggtcatccggcgatggatttccccggctgcacgcggcatttggtctgcatccgctttatattgccgaacacacccctgaacatctggaacagcttgagtcgctgatcaccggaagcgggacagaatgcgtggcggtgggggagatcgggctggatcgctatatggccgagccgcagtgggataagcagctggatttttttattgctcagctgaaactggccgcacggacagataaaccggttattctgcactcccgcaaaacccatgacacgctcgctgctgttctgcgccgtcacccggtgccccgccgtggtgtgattcacggattttcaggtagttttgcccaggcggacgcctttgtgaaactgggttattacatcggggtcggcgggacaattacctacgaccgggctcagaagacccggcgggcaatcgcgcaggtcccgctctctgcattactgctggaaacggatgccccggatatgccgctcagcggttttcagggcgagccgaaccggccggagcggattgtccgtacatttgaagtgctctgttcactgcgcagtgagtctccggaagagattgctgctcagatttatcgcaacagctgtacacttttttcgctgcaatcacctgattaa

SEQ ID NO: 276012 - DNA, 1278 bp, Morganella morganii
atgcaactccttatgagtctggtcgggatggcagcgctgatctttatcgcagtgctgttttcaagtgatcgccgggcaatcaaactgcggactgtcaccggtgcctttattattcaggtactgatcggtgcgctggttctttatgtcccggtgggacgcaaaatcctcctggcaatgtctgacggtgtcgccagtgttatcggctatggccagaaagggatggactttattttcggcggcctggtatccgacaaaatgttcgaggtattcggcggcggcggtttcgtctttgctctgcgcgttctgccggttatcgtcttcttctcctcgctgattgccgttctgtattacctcggcattatgcagcttgtgattaaaattctcggcggcggtttacagaaactgctgggcacctcccgtaccgaatccctgtccgcgacagccaacatctttgtgggacaaactgaagccccgctggtggtacgtccgtatatctccgggatgaccaactcagaactgtttgcggtgatgtgtggtggtctggcatccgtggccggttctgttctcgccgggtatgcgcagatgggggtaccgctggagtacctgatcgctgcatcctttatggcggcgccgggcggcctgctttttgcaaaactgatggtaccggaaaccgagcatttcgatgatcgtcgtgaagccatggccggtatggcagaagaagaacgccctgccaacatcattgatgcggcggcaagcggtgcgtcttccggtatgcagctggcactgaacgtgggtgcaatgctgctggcgtttatcgcactgatcgctttaatcaacgggatcttaagcggtgtcggtggctggttcgattatccgcagctgtcactggaactgctcctcggctggatcttctcaccaatcgccttcctgatcggtgttccgtggagtgaagccatgaccgccggttcctttatcggccagaaaattgtggtcaacgagtttgtcgcctatatgaatttcggtgaatacctgaagccggatgcacaggtgattgctgccggtttacagccgttgtctgatcacaccaaagcgattatctcctttgccctgtgcggctttgccaacctgtcctctgttgctatcctgctgggtggcctgggcggtatggcacctaaccgccgtaaagacgtggcacgtctgggtatgaaagctgtgatggccggtactctctccaacctgatgagtgcaaccatcgccggtttcttcctggcactgtaa

SEQ ID NO: 276013 - DNA, 780 bp, Morganella morganii
atgaccgatttaaccgccgcagcgcagcgcgcgctgtccttaatggatttaaccaccctgaatgatgatgatactgacgcgaaagtcaccgcgctgtgtcatcaggcgaaaagcccggccggccagactgcggccatctgcatttacccgcgttttatcccgctggcccgtaaagttctgcgtgagcaggggacgccggaagtgcgtatcgcgactgtcaccaacttcccgcacggtaatgatgacattgagattgcactggctgaaaccaatgctgcgatcgcttacggcgcagatgatgtggatgtggtgttcccgtaccgcgcgctgatggccggtaatacacaggttggttttgatatggtgaaagcctgcaaagaagcctgtgcgaaacacaatgtgctgctgaaagtgattatcgaaagcggtgagctgaaagatcctgcgttaattcgtcaggcatctgaaatcgccatcaaagccggtgctgattttattaaaacctccaccggtaaagtgcctgtcaacgccacgccggaaacagcggaaatcatgatgaccgtgatccgtgatatgggcgtcggtaaaaccgttggtttcaaaccggccggtggtgtccgcactgcggaagaagccgcgcagtatctggcgatggctgaccgtatcatgggcgaaggctgggctgactcccgtcacttccgctttggcgcatccagcctgttagccagcctgcttaacgcactgggctacgcagacgccaaatctgacagcaagtattaa

SEQ ID NO: 276014 - DNA, 1323 bp, Morganella morganii
gtgtttctggctcaggaaatcattcgcaaaaaacgggacggacacccgctctctgatgaagaaatccgcttctttattaacggcgtgcgtgataactctgtctctgagggacaaattgccgcgctggcgatgactatctggttccatgatatgaacccgcaggaacgcgtctcgctgacactggcgatgcgggattccggctcggtgctggactggaaaaaccttgatttaccgggcccggttgtggataaacactccaccggcggcgtgggggatgtgacctccctgatgctcgggccgatggtggctgcctgcggcggctatatcccgatgatctccggccgcggcctgggacataccggcggcacgctcgacaagctggaagcgattccgggctttgatattttcccggatgatgaaaccttccgccgtatcatcaaagagaccggtgtggcgattatcggccagaccaactcactggcaccggctgacaagcgtttctatgcgacccgcgacattacggcaaccgtggattccattccgctgatcaccgcctctatcctcggcaaaaaactggccgaaggactggatgcactggtgatggatgtgaaagtcggttccggggcctttatgccgacctatgaattatcagagcagctggcgcaggcgatcgtacaggttgccaatggcgcgggctgccggaccactgcactgctgactgacatgaaccaggtgctggcatccagcgccggtaatgcggtggaagtgcgtgaagcggtgcgtttcctgacaggtgaataccgcaatccgcgcctgtatgaagtcactatggcgctgtgcaaagagatgctggtttccggcgggctggcggctgatcgcacagaggcggaagcaaaattacagcaggtgctggataatggcaaagcggcggaaatcttcggccggatggttgccgcgcagcacggaccggctgattttatcgaacgctattcgcactatctgccatcggcagtactcagtaaaccggtctatgctgagacagaagggattgtgaccgcaatggatacccgcgcactgggtatggcggttgtttctctgggcggcggacgccgtaaggccagcgacccgattgactacagtgtcgggttaagtgatatcgcgccgatcaacagtgttgctgacggacagatgccgctggcgatgatccacgccaataatgaagatgcgtggaatgaagctgctcaggccgtgcgccgggcagtcacactcagtgagagcccggttacagataccccgctgatttaccgccgggtcagcgaataa

SEQ ID NO: 276015 - DNA, 1224 bp, Morganella morganii
atgaaacgtacatttattatggtgctggattcattcggtatcggcgcagcacatgatgccgctgatttcggcgacaccggcgctgacacgttaggtcatatcgcacaggcctgtgcccgcggtgaagcagataaaggccgtaaaggtccgctgcatctgcctaatctgtcccgtctggggctgggtaaagcagcggaggaatccaccggacatttcccggaaggtctggataagaatgcggaaataatcggtgcatacggctatgccggggaattatcttccggtaaagataccccgtccggccactgggaaattgccggagttccggttctgtttgactggggctatttcagcgatcatgaaaacagcttcccgcaggaattactggacatcctcgttaaacgcgccaacctgccgggatacctcggtaactgccactcatccggtactgtgattctggatcaactcggcgaagagcatatgaaaaccggcaaaccgattttctatacctctgcggactccgttttccagattgcctgccacgaagaaacgtacggcctcgaaaaactgtatgagctgtgtgaaatcgcccgcgaagaactgaccaaaggcggttacaacatcggccgtgtgattgcgcgtccgtttaccggtgaaaaagccggttcatttgaacgtaccggtaaccgtcacgactacgcggtagagccgccgtcagccaccatgctgcagaagctggtggaggagaagcagggcgaagtggtatctatcggtaaaattgcggatatttatgcccatgtcggtatcactaaaaaagtgaaagcgaccggtattgatgcgctgtttgatgcatcactggaagagatgaaactggcgggtgataacaccatcgtgtttaccaactttgttgatttcgactcctcgtacggccaccgccgtgatgtggcgggttatgctgcggcactggagctgtttgaccgccgtctgccggaaatgctgaagctggtgaaagaggacgatattctgatcctgaccgcagaccacgggtgtgacccgacctggccgggtaccgatcacacccgcgaacatatccctgtgctggtgtacgggccaaaagtcaaaccgggctctctgggctaccgtgaaaccttcgcggacatcgggcagactgttgcatcctattttaatttatccccgatggattacggcaaaaacatgctgtaa

SEQ ID NO: 276016 - DNA, 720 bp, Morganella morganii
atggctacccctcacattaatgccgaacgcggtgattttgctgatgttgttctgatgcccggcgacccgctgcgtgcgaaatatattgcagaaaattttctggaagacattaaacaagtcaacaatgtgcgtggcatgctgggttttaccggaacctataaaggccgccgtatctccgtgatgggccacggtatggggatcccgtcctgctctatttatgccaaagagctgatcactgagtttgacgtgaaaaccattatccgcgtcggttcctgcggggctatcagccgtgatgtcaaactgcgtgatgtggttatcggcatgggcgcgagcacggattccaaagtgaaccgcctgcgtttcaaagataacgatttcgcggctatcgcggatttcggactggtacgtaatgcggttgaagcggcagaaaccgccgggatcccggcgcgtgtcggtaatatcttctctgcggatttattctatacaccggatccacaaatgtttgacgtgatggaaaaatacggcattctgggcgtggaaatggaagctgccggtatttatggcgtagctgctgaattcggtgcgaaagcactgactatctgcaccgtttctgaccatatccgtaccggtgaaaatttaccggcagaagagcgtcagactacttttaatgaaatgatcactatcgcgctggaatctgttttactgggcgataagaagtaa

SEQ ID NO: 276017 - DNA, 171 bp, Morganella morganii
atgaccagaagatcaataacaacattagctatagttgcagtggtattaataactgctcttacaatttctgatgttgtaaattcgttactcaataatcatcgggtatccgatttttcattgaaaggcggagatatgctggttgacgcaacattgtcctgtaacgataaatga

SEQ ID NO: 276018 - DNA, 2787 bp, Morganella morganii
atgcattataaactgacctttgccggtgtggtgctaatcctcaccggttgtaccgctgtcagcacaacaggcacagataaccgtccgctgccgcagcgcagtgatttacagcacatccgtctggcaaacggtatgaatgtgtatcttctgtcacgcccgcagcccggcgcagagctgcggctgctggtggaaagcggttcattacaggaaacagaagagcagcgcggtctcgcgcatttcaccgaacatatggcctttaaaggcaccacgcatttcccggacacacagagttttaaacagctggaaaaacaggggctgaatctcggcagccatgtgaatgccgccaccagcctcaattccactgtctataaactgtcactgccgcaggccaccccggaacagattcagaccggtttgcaggtactcgccgactgggcacagggcatgacctttgaccctgttgcatttgataaagaacgttccgtgattattgaggagtggcggctgcgtcagggcatcggcttccgcatcaataatgcccttgagcagctgcgctatgcgggcagtctctatgcggagcgtgacccgatcgggttattggatgtgatccgccatgcgccggtcagcacggcaaaagactattatcagacctggtatcagccgcagcggatgagtctggtggttatcggacagtttaaccgccacgacgtcagcaatctggctgaggcgtattttaatcagcccgccaaagaagatgccgcacaggatgatccggcccgtcagcgctttgccccgcaaccgggactgctggtaaaacccatcttcgataaagagcaggggcagcgcatcatgcaattcgcactgcagcgggatatccgcgcaccgctcaatacccgtgacgggcagtatgatgacctgctggataatctctgggtaactatcctcaatcagcgcctgaccgcgctggtggataacggacagttacctgctgccagtatcaacccgcagggcgccatgctggacagccgccgtcttcagcaactgatgatagtgcatccgcagggcggggattacctcggcagtatcaccttattgtggacagaaattcagcgcctggcgacacaacccgtcacacagacagagctggacgatgcccggcagagtctgctggcaaaactcagtcagcaggccgccggtgaatcccgctacggtaatgattatctcgctgataccatcaccaccgcactggaataccggatgccggttcaggataaacgtcagcagctcaccacggcatgggaactgctcaaaccggtcacaccggatacgctgaaaacccatgtgagcggattcctgaatcaggcatcaccacggctggcactgctcggaccggacagcgaacaggcccgttttgatgagaaagcgttcactgaccgctggcagcagatccggcagtccgcccccgggccgttttccctgactgtgcggcaggtcgcgctgaatgtcactccggcagcggccggtagcattgttcaggagcaggcactgcctctgccgtccacagaatcgtggcagttatccaacggtctgcgggtaattgtgcatcaggataaaagcctgaaagataatattcagatcaatctgcgcattccgggcgggcgctcactggagccggccggacaggaaggactgaccgactgggcactgaaactgccggaaagcagcggctacggtgagctgagtgcccgtgaactgaccttattcagcaaacagcacagtctcagcctgcggccgtacagtgagctgctgaatcacggattccggggtgaagccccgccggaagaactggataccctgctgaaactgctgtatctgaagatcacacagccgcagttcagcggcgaaaaattactccgcaatcagcagctgacactggaaagcctgagcagcaccccggtggagcgccgcttcctggatgccattaaccgcgaaagccatactcacggcgaacgtctggtgataaatgaaaacggcggctggcgtcagtttactgccgcgcagttacagcagaaccaccgtctcctgctcagcccggtacaggacatgacactggtgatcagcggtgcggcagataaaaaacagataaaacaggctgttgagaaatggatcgccacccttcccgcttccgggcagcgcctgcagtggcgggatccggctatcgcacccaaaatgcaatccttcagccggacttacccgatagccagctctgataaaaccatggtgagtattcagtatgccgccccggcacagtggtcactgaaagaaagcctgacactgcaactggccgacagcatcatcagcaaacagttgcgcagcgcattgcgggaacaggcgggcggtatttacgccctgagtttctcctctatgctggcaaaactgccgtcaccgtactacagcgcccggctgaatttcaccaccgatcctcagcgcgccgcagagatgacagcactgagccggaatgtgctgaaaaccctgaaaacagacggtgtgagtgacaatgccctgaaagaagccagagccaactggttactggaaaaacagcaggtttaccagagtgcggctttctggacagaatcactggctcagattgccggggacgataatgagtttacgcggataaccgcagaagaggcgttagttaatcagattaccgcagaggatataaaccgggcattatcccgctacagcggtgagaatgaaaaattatttatgctcaccccgccataa

SEQ ID NO: 276019 - DNA, 1701 bp, Morganella morganii
atgaaaacaataaaacaatttttctggctggtgaagccgttctgggggcggcgtgccgccctgttttgctggttcttactgttgttgtctctcgggctgacactctcctccgtctggttcaatatccgcatgaaccagtggaacggggatttttataatgcactgcaaaagctggacggcgcggcgctgtatcagctgatcaaatttttcgtcgtgctggtcagcgggctgattctggtggtggtgctcggcacgtatttccggcagaaactggctatccgttggcgggaggggatgacagaacagatcctcagccgctggctgtcgccgcagagccgccattacctgctgcgcctgaccgcccgcgagccggataacccggatcagcggattgccgaggatgtccgcctgctggtggaatccaccctcagtctgctgatcaccttcctgcattcgctgctgaccctgatttcctttgccgctatcctctggcagctttccggcagtattctgctctctgtcgccggtactgactggcgcatcgacggctatatgttctgggcctgtatcgcctacaccttagtgggtatcgcgctgacacagcttatcggcgggccgctgcgcaaactgaatatggaaaaacagcagcgcgaggcggattaccgtgcggcactgatcacccgcagacagcacggtgatgccattgccggacagcggggggagttgcaggataaacagcagttactggcccgctttgcccgggtggcggccaactggaatcagttgatccgctgcgagcggaatttgtctttttatacagtcggttatcaacaggtgaccgcgctggcgccgatcctgttcgctctgccgaaattcctcgccggggaactgatgctgggcggcttaatgcagctgcgtcaggcatttagcagcgtcgcgacatcactcggctggtttatttttgcctataaagagatagcggcctggcaggcgacggtaacccgtctgtaccatttcgtccgcctgctggaaaatgacgcggtgtctgatgtcaccgaaacccgtcagtcggcagtgcgcctggatgtttgcgccgatattctgctgccggataaccgtccgctgctggagaatgtctcactctctctgcacgccggggaatttaccattatcagcggccgctccggactgggtaaatcgaccctgctgcgcgcgctcagcggccactggccttattaccggggcaatatcagccgtgaacaggatgtaatgtgggtgccgcaatcactctatctgccttccgggacactgaaatccctgcttgcctatccgcatgctgcggcacagttcacgccggaagcttaccgcgaagtactggatgccaccgggcttaccgcactgataccacagctggataccgatgccgactggcgtcagcgcctgtccggcggtgaacagcagcggttgctgatcgcccgtctgctgctcagtcagccgaagctgatgctgctcgatgaaattacctccgcactggatgatgacaatgcggtccgcatgatccgtctgctccgtcagcgtctgccggacagcacgcttctgctggtcagccaccagcgttttcttcagcaggaggcagatcgcgtgatcaccctgtccgcccctgccgccacctgcacatcaggagtccgatatgcattataa

SEQ ID NO: 276020 - DNA, 2787 bp, Morganella morganii
atgacacttccggaaatgataaaaatgacaataaaaccatcaccattcagcatcagggcggccggttctgccattgtgctggcactcgggctgacagcggcaccggcaggggcggcagatctcacgcttgatctgccggaacaggcactgagccggtcactgaacaccatcgcgcagcagggacaaatccagttactgtatgatgccggacaactcggcgcactgcgggcaccggctctgcacggcagctattccgcacagaccgccatccagacactgctggcaggctccggcctgacactggtacagcagggcagcagctatgtgatccgcccgctgacaaccgaagcggaaaccattttaatcccggaaacccgggttcagggcgaactggcttaccatccggccacggatgtcatgtctgctccgcaatacattactgcggaggagatccgtcagcgcaataccggtgacggcaacgtcacggaactgctgcgcaccaacccggcggtgcaattcgctggtaatgatagctcgtccctcaaccagggcgaaatcaaaccatcacggatttccattcacggcgcatccagtttccagaacgcctataaactcgacggcatcagttttaacaacgatttcgatccggcaaaagataccctgggtgaaacctccacccgtctggacagcggcgaccagggcatgtacatcgacagccgtctgatcgacagtgtgacggtttacgataacaacatcccggtagaattcggcggctttaccggcggcagtgtggatgtcaccagccgccgctggaacggcgaaaacagcggccatatgtattaccgcaccacccgctcctcctggaatcatctgtttgaggattcctcacagccgattgattcatcaaaaaatgatatcagtcacccggcccgtttccagaatgaatataacaaacacgatttcggcggctggtttgaagtcggtgtaacagaaaacagcggcctgaccgtgtccgcctcccgccgtacctcgaccatcccggccaatacctcggtactgatggcggtgatggaaggtgaagaactggtcggttatgagtttgataagcgcaaacgcaaccagaaacgcacctcagataacctgtttgtgaagtatgcaatggatctctcgccggtcaccaccgcggatatttccctgaattattctgactacaaggcgcgtttattcgcctccaatattgccaactccggttatgacaataatcacaaagggttaggtgtaaccggtgttctgaaacaccaaaccagcctggctgatctggaattcaccctgggttatcagaaactgaaagataaccgtgtgaatgacgagcagaatttctatgaaatgaaggataaattgccggacggcaaaaccattattaacaccaaaatgggcgggctgggcgatctgcagaccgagcaggacaatatcaccaccaaagccgttgcccgtttcctgccgtcagaaggcttcggtataacacaccgcccgacactcgggatggaatccacccataccaaaggccgctatatccgcgataagtcgcactatcacaccagcgaggactatgtcagctacgcggaatggggtattgaggatccggtggtcaacgtgcaccgcttcctgccgggaaccgcctctgtcagttataacaactactccctgtttgccgatgacaatattgatattggccgtctgacactgcgcccgggtgtccgtgtggaccgtgatgattttgtccggcaaaccaatatcgcgccgcgcctggccgccacttacgacctgttcggtaataaagaaacattgctgatcgccggtgccaaccgttattacggccgctccatgctgacttatgccctgtacggcgcgcagaatgccgggctggaaaaatgttatatgtgcggctttatgggcatggatccgacctgggataaaaccaatgattatgaaggtctggattcactgaaaaccccgtataacgatgagatttctctcggcctgcaacaggaaatcctcagcacaacctggcgtctgacctatgtccaccgtgaaggttacgatgaagtccgcagccgcaccaaatacaacaacctcaccgggtcggataaatactccgataaaggaaaaatccgtacctttgataatgccggacgcagcaaacatgactccgtcaccctggcggtcagtaacagtcagccgtgggaatggggacaggcaacccatgtctttacctcctcaatcgtctggcaggataccaaaaccaacttcccgtctgaccagggctatgccttctttgaaccgggtactgccattaactccgacaaagtgatgtacggcggcaaagtgatcgatgtcagtgatttgcctgccagtaactttaactcgccgctgaagctgaacgttgagctgaccagtgactgggataactacaacatttcctggtacaaccgcctgcaatggtggggcgcgcgtaatcaggctgtccgtcatgacaacgaagtgatccgtgatccgcagtacggcgagttacgtgtctatcagaaagagcatttcgcatccaaattcacctgggatacccgcgtgaactggaaaccggagtttgcttacggcgcgtctgtctcgctggaagtgaataacgttctgaataacaaaaatgtcgcggatacctttatctacgccggtaacaaggtgattgcctatgatccgggccgtcagttctggttacagctgaattacgatttttaa

SEQ ID NO: 276021 - DNA, 963 bp, Morganella morganii
atgacagaccggcgggagcaggacgaacgggaagacgccgccgcactatggtttacgcgctggcacagccagagcatgacggcacagcagcagcgggaattacaggcatggctggcggcttccccggaaaaccggcaggcgtttgatgatatggcgctgctgtggcgggagatgtcggccctgccacgcccggaaatcacagagcaggcacccgcccgggcttttccgcttctgcgcccgctgcgccataccctcgccggactgtttatcctggtgatgctgtttctgccctacagccagttacccgctctgctgatggataacctgacgctcgccacagccgcggaaagcaaatctatgatcctgccggacggcagccgtatttttctcagccgtgacagcgaagcggatattgcctatgaacagacacaccgccgcatttccctggtgcgcggtaccgccttttttcaggtgaaatccaacccgtggcggccgtttgtcatccgtgcggacggcagagagataaccgttgtcggcacggaatttgatgtcagccgccggggaacggaagtggcggtctctgtggcaaacgggattgtcgccctgcgggatgcgccggatgaaaaaccggtgtatctgcgtgccggggataaagccgtcagccccgcacagggatcggcactgctgctcagccatatcccgccggaacaggccggggagtggcgcaacggacaaatcaccctcaccgataccccgctgcgtgatgttgttgaccgcctcgcaccttacagcagccaccccgtctcacttgccgccaatgcggcggatctgaccgtctccggccgggtcaccctttccgaaacagatgcctttttcaccgcactgccgctgctgttaccggttgaagtcaccgaactgcatgacggcagcctgttgattgtgaagaaaaataaaaataaatga

SEQ ID NO: 276022 - DNA, 543 bp, Morganella morganii
atgacgactgaaaaatcggtaagcaggcttattgccggagcttatcactcaacctaccatcagcttgtccgcttcttccataagcggctgggcaacagtcaggatgcacgggatttgtcgcaggatgtgtttgcccgctggctcaaaggcggtaacgagacatctgtgcaggaaacccgcgcgttcctgtttaagatcgccaacaatgtgctgaccgaccactggcgtcacagccggcggaaaggccgtgatcaggtcagtgagtgggatgattcactgacagaggaagtggcacaggcacacgccgatccacagatacagctcgaacaccggcagcggctggaccggttgtatcaggtgctgaatgaactgccgccccgtcagcgggaagcctttgtgctttaccggtttgacggactttcgcaaagtgacattgccgaacagatggatatttctgtcagtatggtggaaaagcatatcgcccgcgccctgctgcaatgtaaacgcgccatgaatgccgcagaacagaaggacggggaatga

SEQ ID NO: 276023 - DNA, 777 bp, Morganella morganii
atgttgaatgtggctgcggcctgttatcagaacaggcgatattcagtcggcggcacagctgccagtgtgggtgctcacgcgctgctgctggcactgtttctgggctggctgggtttttcagcggacgagccgaaaggcatgctgcccccggcgtttgtgctgatgccgggagtttatcagctggaaagtgcaccgccggaaaaggcggaaggtgtcagacaggtgatgtcacaaccggcaccacagccggcggctgagccggagcgggagtctgctgtcgataaactggcggtttctgatcagggcacctggacgcggaaagcggagaaaccaaagaaaaaagcagacaaaaaatcggtaacagagatcaaaatgccggaaacggataacccgtccccggtaccggcagagagcacttccgcgccgcgtcagggcgacagttccgcgagccgtgcggattttaccagccatgcaccgcagccggtcagcggcagtaccggctgggaaagctcggtacattcgcatctggcgaaatacaaacgctatccgcgcgcactgctgcgctataaatccaccggtgtttctcatgtgaaagtgactctgaacatgcagggaaatgttgtctctgcggagctggttaattcatccggcacaaaattgctcgataaagaagcgcttgccaccgtacaacgggcatcacctttcccgctgccgccacaggaacgcggcagaaacggtcatattgagatagtcactcccatcggtttttacctgtaa

SEQ ID NO: 276024 - DNA, 1596 bp, Morganella morganii
atgactaaaaagtcagtttttgcaagaacactcgtctctctgctgttaggtacagcaatcagtgcttcagcgctggctgcggcagaaaataccggtcatacattgcggctggccatcggcgcagaaccgacagaagggtttgacccgatgctcggctggagccacggcagttatctgttactgcacagcccgctgctcaaacaaaaggccgatctttcctggcacagctacctgctggacagctacgaccacaatgccgacggcaaagagtggacactgaagctgaaaaaagatctgaaattctctgacggctccccgctgactgccaaagatgtggcgttcacctataacaatgcggctgccggcggcggcaaaatcgatatgggtaactttgccaaagcggaagaaattgatccgctgacagtgaaaatcaccctgtccgaacctcagagtacctttatcaacgtgctcggttctctcgggattgtatccgctgataaatatgatgccagacagtatgcccaaaaaccggtgggtgccgggccgtaccgcctggtggctttccagccgggccagcagttgattgttgaggctaacccgtattacgcggggccgaaaaatgactttaacaagctggtgtttgtcttcctggatgaagatgccgcctttgctgccgcacagagccgccagcttgaggttgtccgcattccgccggtgattgccgcaactgccggtgatgtcaaagggatgaaactggtggagcgcgccagcgtggaaaaccgcggtattgtcttccctatcccgaaagccggtgaaaaagatgcacagggttacccgatcggtaacgatatcacctctgatgttgccatccgtaaagccatcaactatgcgattgaccgcaaactgctgtctgagcaggtgatggaagggtacgctgtaccggcctttaccggtgttcacggcctgccgtggaacaacccggaagcggcctttaaagatggtgatgcggaaaaagcaaaacagatcctggaagaagcaggctggaaactcaataaagacgggctgcgtgagaaagacggcaaagtcgccaaactgacactgtggtacaccagcggggacactacccgtcgtgacctggcacaggctatccgcgccttcctgaaaccaatcggcattgaactggatttacagtccggcagctgggaaaccgtcgaacgccatatgcacgccaacccgacgctgttcggctggggcagcctggatccgatggagttagtccatcactacagcagcaaagcggcgggcgtggaattctacaacccgggctattacaaaaatccgcaggtggatgccatccttgagaaagccatgagtgcgccggatcaggaagccgccattccgatctggcagcaggtggactggaacggcaaaaccggtaccgggattaaaggggatgccgcctgggcgtggctgctgaatgtgcagcatacctatgtggtgagtgattgtgttgatttgggcaagggtgcaccggagatccacggatcatggtcactgctcaacagcgtggatgactgggcctggacctgtaaataa

SEQ ID NO: 276025 - DNA, 969 bp, Morganella morganii
atgcgcagtgccctgttccttttcgtgcggtttgtttgtctgctgacggtcacggcggcgggggtgtttatcctcctgagctattcgccaattgacccgatcagagcctatatcggaaatgatctgctgcatgtgccgccggagcagtatccggcgattgccgcccgctggggactggatcagccgctgtggcagcggttctggatctggttctcacagatgctgcggggcgatctcggctactctatgctgtataacgcgccggtgtcagaggtgatttcggcgcggctcgggccgtcactggcactccttatcagcgcctggctgctctcgggcattgccgggctgctgctggggctggtggccggacgttatctgaaccgctggccggacaaaattatttcggcactgtcgtatctgctggcttcgataccgacgttctggatagggttgctgctgctgtcactgtttgcggtcaccctgaactgggcaccaatctgctgtgcctggccgatgggcgaggatgcggatacagcaaccttcgggcagaaaattcatcacctgattctgccggtgctggcgctgggcttactcggtgtcggtaacattgccctgcacacacgggcaaaagtggcggaagtgatggggactgaatttatccgttatgcgaaagcgcagggggataaaggctggccgatgattaaatttcatgtgctgcgtcacgctattaccccggcactctgtttacagtttgcctctgtgggggaactgctgagcggctcactgctggcggagaaagtgttcgcctatcccggactgggacaggcgacgatagatgcggggctgcggggggatatcccgctgctgatgggtattgtgatgttttgcgcgatcctgatttttattggtaacagcacggcggatattttgctgcgccgtgtgaatcagggagtgatccgcgaatcatga

SEQ ID NO: 276026 - DNA, 807 bp, Morganella morganii
atgacgtataacccgaaccgtgcgctgttaaaactgacgggcacattactgatgctgatcctgctgggcgtctatgccatctggatcacacacactgatattgatatggatttcctggcgcggcggcaggcaccgtctgtcacgcactggttcggcactgacagcctggggcgtgatctgtgggatcgcacctttcagggcatggcaaccagtctgcagatcggactgatttccgccttcaccagcgggctggtggcgctgacaatggccgggttatctacaattaacaaaggaacagattatctggtgcgcggggtgattgatgcactgctggcgctgccgcacctgctgctgctgattttaatctgtttcaccctgggcggcggaaaatccggcgtgatctgggcgatagcgctgacacactggccgaaactgacgctgatcctgcgctcggaaatcctgcgggtgcgggaaacggattatgtgatgctggcacaacgcatgggaaattcgcgattgtattgctggcgtcatcattatctgccaatgttattaccgcagtggtttgtcggcacactgctgatgttcccgcattcggtactgcacagtgcggcgctcagttttctgggcttcgggcttgcgccgcatgaggcatcactggggatcctgctgtcagatgcactgcgctatctcagtaccggtgcctggtggctggcatttttcccgggactggtgctggtcggactggtgttactgtttgatcagtttgcgaaagccttacaacagctctggctgaggatcgcataa

SEQ ID NO: 276027 - DNA, 786 bp, Morganella morganii
atgctgaaatttgaccggcttgccattgatgtcgcgcagttcagctggctgcggaaaaaacgctggcagccgctgctgacggatatttccctggcggttcagcccggtgagctggtggcgctggtcggcagcagcggggaaggcaaaagcctgctgctgcagagtgcgctggggctgctgccggataatatgcgctgccggggcgctatctcactggcgggggaaaccctgacggaagagagcaaacagctgcaccgcggcaataccctgtgttacgtaccgcagggggtgagtgcgcttaacccgctggtgcgggttggtccgcagctggaacgcgcggccacgctcagcggtatgcatgtgaagatgcacgacgtggcgcgccagctgcaacgttataacctccggcctgagctgacggatgcgtttccgaaccggctctccggcgggatggcaaaacgggtactgacctgcggcgcaacgctgaccggggcgcagtatatcctggcggatgaaattacgtcctggctggatgacgaacacgcggggcagatactcgcgcacctgaaagtgctgtgtgcggacggacgcggcgtgttgtgggtcacgcatgatctggcgatggccgcccgctttgctgaccggattgccgtgctgcgtcacggggttttacaggaaacactgacatcgcaggcattactgaacggggaaggcagcccgtggctgcagtcactgtgggatgcactgccggagcaccgttttctggcgggccggatgaggcgataa

SEQ ID NO: 276028 - DNA, 303 bp, Morganella morganii
atgcaattaaccccgagagaagttgaaaagctgatggtatataccctggcggatgtcgcgcagcgacgccgtgccagaggggtaaaactgaattacccggaagcggtcgcgattattaccgtgacagcactggaaggcgcccgtgacggcaaaacagtggaagatgtgatgaaagaagctgccaccgttctgaccaaagccgacgtgatggaaggggtggatgatttaatcccgaatgtgcaggttgaggcgattttcacagacggcagccgtctggtgacggttcataacccaatcaaataa

SEQ ID NO: 276029 - DNA, 423 bp, Morganella morganii
atgagtaatacaaaacaacccacgccgttaggcggagtcatttttgcggatactccgattgaatttaataccggcaagccggaaaccaaaattaaagtccgtaacaccggggatcgcccgattcaggtcggttcgcattttcacttctttgaagtgaaccatgccctggaatttgatcgcgaagcggcttacggcaaacgcctgaatatttcatccaccaccgcaatccgttttgagccgggtgatgaaaccgaagtttctcttattccttacggcggcaaacagacagtttacgggtttaacaacctggtggacggctgggccggtaataatgtggccaccagcgaacgtccggcaaaagcgattgccctgaacgaggcaattgcccgcggtttcagccataaagcagaagcgaagaagtaa

SEQ ID NO: 276030 - DNA, 1719 bp, Morganella morganii
atgccacagatttccagacaagaatattgcggcctgttcgggccgaccaccggagacaaaatccgtctcggtgataccgatctctatatcgaaattgaaaaagacttacgcggttacggcgaagaatctgtttacggcggcgggaaatccctccgtgacgggatgggcgcgaacaacacgctgaccagcgacaacggcgtgctcgacctggttatcaccaacgtcactatcctggatgccaaattaggcgtcatcaaagcggacgtgggtgtgaaggacggtaaaattgtcggtatcggcaagagcggtaacccgaacctgcaggacggtatcaccccgggaatggtcgccggtgtggccaccgatgctatctccggtgagcatctgatcctgacagcggcgggtatcgatacccacattcacctgatctcaccacagcaggcttatgcggcgctgtctaacggtgtcaccaccttcttcggcggcggtatcgggccgacagacggcaccaacgggacaacggttaccgccggtccgtggaacatccgcgcgatgctgcgttcactggaaggtttaccggttaacgtcggtatgctcgggaaaggtaactcttttgcccgcgatccgctggttgaacagatcattgccggtgttgccggtctgaaagtccacgaagactggggtgcaacctccaacgccatccgtcatgccctgcgtgtggcagatgattatgatatccaggttgcggtacatactgacagtctgaacgaaggcgggtatgtggaagataccatcgaagcctttgaaggccgtactatccatacttaccacaccgaaggtgcgggcggtggtcatgcgccggacatcatcaaagtggtcagccagccgaacgtgctgccgagctccactaacccgacactgccgtacggcatcaacagccaggcagaactgttcgacatgatcatggtatgtcacaacctgaacccgaatgtcccggctgacgtttccttcgcggaaagccgtgtgcgtccggaaaccatcgcagcggaaaacgtgctgcatgatatgggtgctatctccatgttctccagtgactcccaggcgatgggccgtgtcggtgagaactggctgcgtgtgatccagaccgctaacgcgatgaaagcggcacgcggcaagctgccggaagatgcggcgggtaacgataacttccgtgttctgcgttacgtggcaaaaatcaccatcaacccggcgattgcccagggtatcagccatgtgctcggctcagtcgaagtcggcaaaatggcggacctggtcctgtgggatccgcgtttcttcggcgcgaaaccaaaactggttatcaaaggcggcatgatcaactgggcagcgatgggtgaccctaacgcgtccctgccgactccgcagccggtcttctatcgtccgatgtttggtgcgatgggtaaaaccctgcaggatacctgtgtgactttcgtttcccaggcagcactggaagatggcgtgaaagagaaagcgggtctggagcgcgaagttgtcgcggttcagggcatgcgcaccactaccaaacgcgacctggtccgtaacggcgaaaccccggatatcgaagtggatccggaaaccttcgcggtgaaagttaacggggaacatgcgacctgccagccaatctcggtggcggcgatgaaccagcgttatttcttcggctga

SEQ ID NO: 276031 - DNA, 678 bp, Morganella morganii
atgatcctcattgagcacattctcggcaacgtcagaaaagatcaggcgtgggctgataaagcgaacgaaatgacggtggatatgctgatcctcgatcagcgtgaagcccagaaaagccgctgccgtaaacacacccaaaacgggctggatatcgggatcgcgctggatcgcaacgtgctgttgtctgacggagatgtgatccacaccgatgacaccactaatacgatggttgttgtccagatcgatctgcgtgatgtcatggttgttgatcttaaacgtcttcagggcagcacgccggaagagcagatccgcatcagttttgaactgggccatgcgctcggtaaccagcactggaaagccgttatcaaagaaaacaaggtgtatgtcccgctgaccgtcagtgaaaaagtgatggaatcggtgatgcgcacccacggcttcggcaatgatacgtttgccttcgtcaaaggcgaaactattctgccgatcctgaccaactcagaatcccgtctgctgttcggcggcgcggaagagacagatactcacgtgcatgtggcacataaccacgggcactcacattcacacggccacgatcacgggcacagccatgatcatgaccacagtcacgaccacggccatgatcatcaccacgatcacgaccatgaccacaaacactga

SEQ ID NO: 276032 - DNA, 687 bp, Morganella morganii
atgaaagcggctgatcttatccggatcatgcagtttggtgattcggcacttcccgtcggcgcctttactttctcaaacggtgtggaatcggcgattcagacgggtgtggtacatgatgccgaaaccctgaaaggctttgtccgcaccgcgctgaaacaggcggcgagcggtgacggtattgctgttgtcgcggcacaccgcgcagtgcttgccggtgataacgacgccattctgcgggtcgaccgggcggtgaataaccgcaaactgaatgaagaagcccgcctgatggcaacgcggatggggaaaaaactggcggaaatttctgtccatatttttgacgatccgctcgtggcatggtggctggcacagattaaaagcggggacaccccgggcacccagcctgtcactcaggctattgtgatggcggtacagggtatcggcgaacgcgaagtggtggttatgcatcagtacgggatcgcaatgacgatcctcagcgccgccatgcgcctgatgcggatcacgcactttgaaacacagcacattttatttgagctgaacaacgacattgaaaccttctgcgatattgcagcctgcggcgacattgaacagatgtcttcctatgtgccggtgatcgacgtccttgcggcagttcataccaaatcttttgtccgcctgtttatgaactga

SEQ ID NO: 276033 - DNA, 636 bp, Morganella morganii
atgaaaaaaatgacacggatcggcatcggcggacctgttggctcaggtaaaacggcgattattgaagtgatcaccccgatcctgatcgaacgcgggatcaagccgttaatcatcactaatgacatcgtgaccaccgaagatgcgaagcaggtcaaacgtaccctgaaagggatcctcgacgaagagaaaatcctcggcgttgaaaccggtgcctgcccgcacaccgcagtgcgcgaagacccgagtatgaacattgcagccgtggaagatatggaagagcgcttcccggacagcgacgtcatcatgattgaaagcggcggcgataacctgacgctgactttcagcccggcactcgctgacttctacatctatgttatcgatgtggcggaaggggaaaaaatcccgcgtaaaaacggcccgggcctggtgcaggcggatatcctggtcatcaacaaaatcgacctcgcgccgtatgttggtgccagcctggaagtgatggaaagtgacaccaaagtggtgcgcggcaaccgtccgtatgtcatgaccaactgcaaaaccggtgaaggcgtggtggagctggtggatatgatcatggataaattcctgttcacccaccaggcgggagcaaaagcatga

SEQ ID NO: 276034 - DNA, 966 bp, Morganella morganii
atgacacaactgagggctgagattgcggggacgccgacacgtctccgggctcatctcttaggggaaaaggcgccggaaatggcgccttaccaggatgagccaaagcagatgcaaagtggtgccatcgggaaaagcggctatctgaaactgcggtttgccaaacgggaataccgcagtgaaatggtggaaatggagcgccgtgtgccttctctggtgcagcgcgcgctgtactgggatgaaatgatgccgcagatgccgtgtgtcactatgatttccacctccggctgcctgttacagggcgaccgccaggcgctggatctgattgtggaagagggggcgtgcgcccatgtcaccacacaatccgccaccaaaattcacatgatggaggcgaactacgccacgcagtaccagaatgtggtggtggaagccggcggttatctggagtttatgccggatccgattattccgcaccgtaatgcccgttttttaacggacactcagatcacggttgatccgacggcaacggtgatctattccgagatcctgatgtcggggcggaaatatcaccatccggacgaacagttcgggtttgatattttttcctcaaagatcagggcgcaggacagtgagggaaaagaattatttgttgaaaaatacattctggaaccgaaaaaagaagcactgaatgtggtcggcgtgatggggggttttgatgttttcggtaacgtgattttactgacaccgaaagagcatcatgcccgtatcctggagcgcctggaagcccgttatgacacggatgaagaggttgcattcggggcgacgcagttgccgaacgagtgcggtctggtcttcaaagtgctgggaatcgacagcccgaaaaccaaagaggctgtccgttatttctggcaaatcgcccgggaagagatcctcggcatcacattgcagaaaccgttcctgtggcgctga

SEQ ID NO: 276035 - DNA, 993 bp, Morganella morganii
atggcaacttcaacagtcagtcagaacggctggaataaactggccggatccaatcctgtcatacattttattgatatcacgctgcgtggttgtgcgcaggtgatgtttcagaacaacccgctgaccgggctgttcttttttgccgctatttttatcggtgcatacagtgaaggtattccggcggtcggctggggctgtctgctcggtactgtggtgtccacgctgacggcgtatgtcagcaaaatggatgtcacctcactgcgcgccggcctgtacggctataacggctgcctggtcggtgtggcgttgccgaccttcctggataactcgccgtttatgtgggcggccattgtgctcggcagtatcgtggcagtgatcgccaccatttcactgaccgatttcctgaaaaactggaaagtggcggcgctgaccgcacctttcgtgctggtgacctggactatcctgctggccagttacagtttcttcggtatcaaaggcgtcagcctgccggggccggcactgccggatcagtatgtggcaccgatcgccgggatcccgtattccgatctgatcccggatattttccgtggtgtgtcagaggtctttctgctgagcagcattaccgtggggatcctgtttgtgatcggtctggcagtcagctcggtgtgggcggcggtctttgcggtctttggctcactgctggcttttggtgtggcatctttcctgaaagcggacttcggtagtgtgcataccgggctgtattcattcagcgccgtgttaactgcgatcgcgctgggttccacatttaataaaccgagcttcaaagtgctggtgtataccgtagtgggtgtgatttttacggtgtttgtccagggcgcgctggatgtggtggtctcgccgttcggtattccgacactgaccatgccgttcgttctggcctcctggctgttcctggtgccgaatcaggacatcatgccggaacaccgtcagtaa

SEQ ID NO: 276036 - DNA, 1167 bp, Morganella morganii
atgcagagtaatctactgaagacagggttacataaattactgagtctgcgggtgatcctgtcggtactgctgtttattgacggggtgatgatcctgtcgccggtgctgttttcctatagcggggatattgcctggcaggacggcggtttcaccgcgtggttacagtcactcgggtttataaaactgctggatattccccgttttatgctggggttactgctggcactgctggcgctgctgatgctgaccggcgcacgcatcgcctggctgttctctctgtttatcctgctcacgatggtactgatggatctgggactggcccgtgaatactcgctgcaggggctgttctcgctggcgctgctgattgcgtccggctgtctgtggcggcagttcccgcatcacagcctgaccagtgcgggagtggtggcgatcagcagtattatcctgctggtggtctattccgtcttcggcaccctgtatctcggcaatgagttccagccacatgtcacggatatctcagcggccttctactttgccctggtctgtatgaccacggtcggcttcggggacatcatcccaatcagcgtggaagcgcggatgtttaccctgacggtggtggtgttcggtatcacgattttcaccacatccattgtgtacattgtgggtgtcgtcctgcgcggcacacgcgagattgtcaaaaagaggttgttacacatgaaagagcattatgttgttatcggcgcgaatccgctggcggtcaatatctataagggactgaaaaaacgcggtttgcaggtggtggtgatctgttctgatgaggacaaaaagcacttccctgacggcaccgtgaccgtggccggtgacagtgcggatgccgtgaccctgaatgaagccaatgtcaaagatgcccgctgtgtgatggccatcagtgatagtgattcagataacacttttgcgctgctggcggtaaaacagctggccggtgaaggcgtgaaaaccgtgactgtggtgaatcaggaagagaacagcgacaaaatgcgcctgctgcatgcggatatgaccttctccctgtcacagctcggcagtgaagtgctgatgaaaatgctgtgcggcgagagcatcaataacagcgttatggctgacatcttattagccaaagcgccataa

SEQ ID NO: 276037 - DNA, 1083 bp, Morganella morganii
gtgaagcataaagaaaaaaaaataaatctgagccacgggatctcccgggctcagtcattcttctattcccggtttaaacagctgcacggcatccgcattgcgctggcatttacactgacgtttctggtgttccgggaattacacagcgataagctcgattatatcattatgacacttatctctatcctgatgccgatgccgtactggggaaatgtgctgatccgctctatgcagcgcaccctcggcaccgttatcggctcactgatagggatgctgctgctgtatacggaaacccactctttcccgctgatgctggcgctggcgaccattgcgatgtttgtctgcggcctgattgcgctgggcaaaaatatgtatgtcgggatgctgatcgggatgaccatcagtatcgttgccaccgcacctgtcggggacatggactctgcgcttatccgttcggcgcagacggtgggcggctcgattctggcactggtgttctcggcgatcctgccgctgaaagggtttgtgttctggcggatgaatatcagcactattctgcgcgatattgccagattatatgatgagcacatcatgaaactgagcagtaccgacccggaacggtgggataatcagctgaaagacacgttatccacactgctgacctgcaatacctacattgcaccggctgtcaaagagacccatgttccggctgccacctttacggccattcacgggcgtatccggcggctggtggcgatactggaactgctgaccgataccttcagtaaaaactacttcgctcatgcgctgaacaccgagaatccctacattgtgcagttgcagaaaagcaacagtgaaatcatgaaactgctctctgatatctttgtgcaggggaaagatgatgacaccatggataagctccaggcactgcgtgccagcacacatgagctgcatcagaagatcaatgcacagccggaaagtaactcagcggatgccatgatggtcgggatgagtgtggaagtgatcaagctgctggatgaagtatgcggactggttcagattgacattttaaagaaatgcgcataa

SEQ ID NO: 276038 - DNA, 384 bp, Morganella morganii
atgttaaatgtgatcctcagcatttccgcaggatcagtgctcggcggcctcggccgctgggtgttgagtaataaattcaacccggtactggcaatgatgccgctggggacgtatctcgccaatattattgccggttatattatcgggctggcggtggcgtttttctcctctcacccgacactcccggcggaatggcggctgtttattgtcaccgggttctgcggcgcgttatcgacattctcgaccttctcacttgagattgtgcaggctttccaggccgggcgcatccaccacggtatggcagaaatcgccctgcatgtactcagctccctgctgatgacctggcttggcctgctgacctggcaggtgttgcagcaccggtaa

SEQ ID NO: 276039 - DNA, 669 bp, Morganella morganii
atggccaaaacgaagttaacattccggctgcataaaacagccattattctgatttgtctcgccctgatggtgtgtctgttacagggtgtgtcttatttcagccgcgtccaccagcagtcgtcaatggatcagtttaatgaattggcctattcgctggcacaacaggtggcgtttaacctttccgatgctatagacgataacgggaaagtgctcaataagaaacaaattacggcaaatttagcgcagctgaccaccaacagccgcattctcgatgccacagtatatcaggatgacggggtacagatagcgggcagcggcgagagtatcactgtccgcgaccgcctggcgctggacgggcaaaaagccggcagttattttaatcatcagattgtcgccgccatccccggaaaaaaaggcccgaaaggctttctgcgcctgaccatcgatacccaccgtctggccacagaatccacccaggtggataacaccaccaacctgctgcgggtgatgttacttctcgctctcggtatcggctttgtgctcgccaataacctgctgcaactgaccccgagccgctggcagcaatctctgtatctgctgaccgccaatctgaaaaatgaagatgagaagccggggaagaaaacggaagagaaagaaaaaggggaataa

SEQ ID NO: 276040 - DNA, 978 bp, Morganella morganii
atgtcgacgagtctgacctactgttatttgccgaatgaaatccataagtggccgggccttcctctttctctgagcggtgatgaagtgatgccgctggactaccgggcgggtgacagcggctggctgctgtacggacgcgggctggataaggcgcggatcagcgatttccagcaccgtctgggtgcggcaattgtggtggtctcgtcatggcggatcgatgattatcaggtggtgcggatcgcgggcagcctgaccgggcgcatcaaacgggtggcggatgagtttcagatggatgtcgtgccgctgggtaatatcccgaaactgcgctcccccggattactgatgatggatatggattccactgcgatccaaatcgaatgtatcgatgaaatcgccagattagccggcgtcggtgatgaagtcgcagaggtgacggaaagagcgatgcagggtgagctggatttcagcgaaagcctgaaagcgcgtgtcggcctgctggccggggcggatgctgccattttacagcaggtgctggatacgctgccgctgatgccggggctgaccagcctggtacgcaaactccaggcgatggactggcatgtcgcgattgcttccggcggatttactttctacgccaatcatttaaaagattctctgcgcctgatcgccgtctatgccaatcagctggaaatcaaagacggcaaactgaccggcaaagtcaaaggcccggtggtggatgccaaatacaaagcgcaggcgctggtgaaactggcggaatttctcaatattcctttagagcagactgtagcgatcggtgatggtgccaatgacctgaaaatgctgaaaaaagccggtctcggtattgctttccacgccaaaccgaaagtgtatgcacgggcaaaagtggctatccgccacgccgacctgatgggagtgatgtgcaccctcagcggtggtctgaaacacgaagaacgttaa

SEQ ID NO: 276041 - DNA, 1389 bp, Morganella morganii
gtggcaaaaccagcaaaacgcgcctttgtctgtaacgagtgcggggcggattatccccgctggcaggggcagtgcaccgcgtgtcaggcgtggaatacaataacagaagtccggctggcttctgtctcatcatcagcggcacgcaatgatcgcctcagtggctatgcggggcagagtggtgtcagcaaagttcagaagctgtcggaaatcagtcttgaggaactgccgcgtttctccaccggtttcaaagaatttgaccgtgtgctgggcggcggcgtggtaccgggcagtgccattctgatcggcggtaatccgggcgccgggaaaagtaccctgctgttacagaccatgtgccagctcgccgcacagatgaaaaccctgtatgtcacgggggaggaatccttacagcaggtggcgatgcgggcacaccgcctcggactgccgatggataatctcaatatgctgtcggaaacggcgattgagcagatttgcctgatcgcagagcaggaacagccgaagctgatggtgattgactccatccaggtgatgcacatggcggatattcagtcttcgccgggcagtgtggcacaggtgcgcgaaactgccgcctatctgacccgctttgccaaaacccggggtgtggcgatcattatggtcggccacgtcaccaaagacggctctctggcagggccgaaggtactcgagcactgtattgactgctcggtcatgctcgacggtgaggccgattcccgtttccgcacactgcgcagccataaaaaccgcttcggtgcagtgaatgagctgggcgtgtttgccatgacggagcaggggctgcgcgaggtgagcaacccgtccgccattttcctgagccgcggggatgaaattacgtccggcagttcggtgatggtggtctgggaaggcacacgtccgctgctggtggaaatccaagcgctggtggatcactcgatgatgtcgaatccgcgtcgtgtggcggtcgggctggagcagaaccggctggctatcctgctggcggtactgcatcgccacggcggattgcagatgtcggatcaggatgtgttcgtcaacgtggtcggcggggtgaaagtcaccgaaaccagtgcggatctggcgctgctgctctcgctggtctccagtttccgtgaccggccgatcccgcgtgatgtggtgatctttggcgaagtcgggctggcgggggagatccgtccggtgccgagtggccaggagcggatctcggaagcggccaaacacggttttaaacgggcgattgtgccgaatgccaaccgcccgaaaaacccgccgccgggtatgcaggtgttcggggtgaaaaaactgtcggatgccctgtctgtgctggatgaactggaataa

SEQ ID NO: 276042 - DNA, 1263 bp, Morganella morganii
atgaccgatttttcctatctgaaacaagccattaaacaggcgggtgtcacactccagcaactggcggatcagtgcggggtgaccaaagggtatctcagccagctgattaacaacaaaatcaaaagtcccggcggccagaagctggccgggctgcacagtgcgctggggctcgattacccgctgaagcagaaaattaccggggtggtgttcgggaaattttacccgctgcacaccggccatatttacctgatccagagggcgtgcagccaggtggatgagctgcatgtgatcctctgtcacgacgaaccgcgtgataaggcgttgtttatcaacagttcaatgtctcagcagccgaccgtcagtgatcgtctgcgctggcttctgcaaacctttaagtatcagaaaaatatccgcattcactcatttgatgagcacgcttatgatccgtatccgcacggctgggagcactggagtcagggtgtgtgccagtttatgcgggaaaaagggatcacgccggattttatctattcgggcgaaaaagcggatgtaccgcgttaccgtgaatcgttcggcatcgaaacggtgcttatcgacccggaacgtacttttatgaatatcagcgggcggcagatccgtcaggcaccattccgctactgggactacattccgacagaggttaaacccttctttgtgcgcactgtggcggtgctcggcggggagtccagcggcaaatccaccctcgtcaataaactggcaaatatgttcaataccaccagtgcctgggaatacggacgtgattacgtattttcccacctgggcggtgatgaaatggcgctgcaatattccgactatgacaaaatcgcgctggggcatgctcagtatattgattttgcagtgaaatatgccaacaaagtcgcgtttgtggatacggattttgtcacgacccaggccttctgcaaacggtatgagggtaaagaacacccgtttgtacaggcactgattgcggagtaccgctttgacctggtgatcctgctggaaaataacacgccgtgggtggctgacggactgcgcagcctcggcagtgacaatgaccgcaaagcgtttcaggatctgctgatcgatatgttgcgggaaaacggcattaagtttgtccatgtgacatcggcggattacgacacccgttttctcgagtgcgttgagctggttcagcgtctgctgatgctggatacccctgaaattcgtgacggggatcagcaaaaataa

SEQ ID NO: 276043 - DNA, 252 bp, Morganella morganii
atgaagatattaaaatacagtgaagtgcaccaaaatctcaccgctgagatgaataaaaccgtggatgatcgcatccctgttttgatcacccggcagaaagctactgcatgcgtattattatcacttgatgaatatcagtctccggaagagaccgcctatctgatgcgttcaccgaataacgcacggcgtttaatggattccattgatgaattaaatgccggaaaggggctcaaaaaggaaatcaatgaatga

SEQ ID NO: 276044 - DNA, 1647 bp, Morganella morganii
atgcaccgtgtcggcaaaattgtgccgccgaagcgtcatatactgaaagatatctctctgagtttcttcccgggcgccaaaatcggtgttctcggcctgaatggtgccggtaaatcaaccctgctgcgcatcatggcaggtgtggataccgatattgagggcgaagcacgtccgcagcccggcctgaacatcggctatctgccgcaggaaccgaaactgaatccggaacacactgtccgtgaagcggttgaagaagcggttgcggaagtgaaaaatgccctgacccgtctggatgaagtgtacgcgctgtatgccgatccggatgcagattttgacaaactcgccaaagaacagggtgaactggaagcgattatccagtctcatgacggccataatctggataaccagctggaacgtgcggcagatgccctgcgtttaccggcctgggatgccaaaatcggtaatctgtccgggggtgagcgccgccgtgtggctatctgccgcctgctgctggaaaaaccggatatgctgctgctcgacgaaccgaccaaccacctggatgcggaatctgtcgcttggctggaacgcttcctgcacgactacgagggcaccgttgtggcgatcacccacgaccgttacttccttgataacgtcgccggctggatcctcgaacttgaccgcggtgaaggtattccgtgggaagggaactactccagctggctggagcagaaagatgcccgtctggcacaggaggcttcctctgaagcagcccgccgcaagtctatcgagaaagagctggagtggatccgtcagaatccgaagggccgtcagtccaaaggcaaggcccgtctggcccgctttgaggaactgaacagtgtcgagtaccagaaacgtaatgagaccaacgaactctttattccgcctggtccgcgtctgggtgacaaagtgctggaagtggaaaacctgacaaaatcctatgatggccgtaccctgatcgataacctgagtttctcgctgccgaaaggggcgattgtcgggattatcgggccgaacggtgcgggtaaatccaccctgttccgtatgatcagcggcaaagaacagccggattccggtactatcactctcggtgataccgtaactatcgcgtctgttgatcaattccgtgatgccatggatgataagaaaaccgtctgggaagaagtgtccggcgggcaggatatcatgcgtatcggtaccactgagatcccgagccgtgcttatgtcggacgttttaacttcaaaggcgttgaccagggcaaacgtgtcggtgagttatccggtggtgagcgcggccgtctgcatctggccaaactgctgcaggtcggcggcaacatgctgctgctcgatgaaccgaccaacgacctggatatcgaaaccctgcgcgcactggaaaacgccctgctggaattcccgggctgcgccatggtcatttcccatgaccgctggttccttgaccgtatcgccacccatatcatcgactatcaggatgagggcaaagtggagttcttcgaaggtaacttcagtgaatatgaagattacaagaaacggactctcggcgaggccgcactggagccgcaccgcatcaagtacaaacgtatgaccaaatag

SEQ ID NO: 276045 - DNA, 426 bp, Morganella morganii
atgaataatataaaaaacataataaccatctctgcattatttgccctgacagcatgtgcatcacagcagaccgcctatgagaaaatcacccgtcactatgtctaccagcaggccgcacaggattctgaccctaattttcagactcatataaatgactccgttaaacttatgacgccgttttttaaacagttttatgatgccggtatcaaagataaaaaagacggaataacaccgcaacaatataaagaacgaattagttatttcaaaagtaacgaatttttgagccgtatgaccgggacaacacagtttatttcaccaaaagtacatactgagaaagtaaatgaaagtgaccgcacagaccggcagaaaaaaatactgacagacaatattattgctgcttatgaggccggttacagcggccgttag

SEQ ID NO: 276046 - DNA, 1926 bp, Morganella morganii
atgaggaaatgtatatggccgggcgtggcagccctcagcatgctgatgttttcagcactggcgtcagcggattcactgagtgagcagcgtcagcgctatcaggatgtcaaatctgcctgggatgccaataatatggcggaagtggaacgcctgatgccgtcactgcgggattatccgctctatccttatctggaataccgtgaactgacacaggacatgagcctgctgacagccggtcaggtgaaaaattttacggatactcatccgaatctgccgtcagcggcaagtctgaaaaataaatttatcagtgaactggccaaacgtaatgactggcaggggctggtcagctacagcacgactgtaccaaaaccggtcagtgcgaagtgtgactattactatgccaactggcagaccggaaaccgtcaggtggcgctggacggggcgaaatcagtctggctggcgggaaattccctgccatcctcctgcgataagttatttgatgtctgggatcagtccggcggactgacaccggaacgtgtccttgaacgtatcagtctggcgctgaaaaacggtaacgcctctctggtcagttatctggcaaaacgcctgcccgcttcttatcagactatcagcaatggcctgattaacttacagaaaaacccggcatcggtggtgacatttgcccaactgagcccgacggatttcacccgccaggccacaatctccgctttctccgcctatgcccgcaaatcaccggatgcggcacgggctgacctgaacagtgtggcgcgcgcccagaaaatgaatgacagcgagcgtcagcaactgaaagatgctgtcgcgtggcagtatatggggagcgacgtgacagatgagcaggctgcctggcgtgacgaagtgattcaggaaaccgattctgtcaccctgcgcgagcgccgcgtgcgtctggcgctgagtaacgcggatgaccgtgatctggatcgctggctgacccggttaccggcggacgctcagcagaaagaggaatggcagtactggcgcgcggtattgctggaaaaaggcggcaataaagcggcagcagatgccattctggaaaaaatcactcagggtcgcgggttctatccgatggtggcggcacagcgtctgggtaaaccgtacgtcatgatgatcaatgcagcggataaaccggacaacagcatcagcaatctgccggaaattcagcgtatccgtgagctgctgtactggcagatggaagggctggcccgcactgagtggctgaatctggtggacagtcagacaccggcgcgcaaagcacagctggcgcgttatgcgctggagcagggttgggcggatctgagtgtgcaggcgacgatcaacggcaagctgtgggatcatctggaagagcgcttcccgctggcctggcagagtgagtttgatgagttcacgcagaataaaaatatcagcaaaagctatgcgatggcgatagcccgtcaggaaagtgcctggaacccgcaggcacgttcgccggtcggggcgaccgggctgatgcagctgatgccggcaacggcaacccagacggtccgcgacaacggtattgcggattacagcaacagtgcgcaactggttaatccgcgcaaaaatattgagataggcaccgcgtatctcaacggcgtatataaccagttcggtcagaaccggatcctggcgagtgccgcgtataacgcaggccctaaccgggtcacccgctggctgagcaacagcggcggacggctcgatgcggttgccttcgtggaaaccattccgttcgcggaaacccggggttatgtgaagaatgtgctggcatttgatgtcttttatcagaacttcctgaaagggcagcgcccggcggatgtgctgacaccttccgaacaatcaatgcgttactga

SEQ ID NO: 276047 - DNA, 306 bp, Morganella morganii
atgacgacagaccaacttcaggacagcgactggcagcgctttgtcagcctgctgcgcaatgcttattcgcaggatattgaatcccacctttttcagctgctttttaccccggatgagcgcacagcgctgggtacacgcgtgcggatcgtcgaggagctgctgcgcggtaagatgagccagcgtgagctgaaaagtgagctgggggtcggcattgcgaccatcacccgcggctccaacagcctgaaatatgccccggaagaggtgaaagcctggctggagcaggaactcctcagcggcaaaaaataa

SEQ ID NO: 276048 - DNA, 864 bp, Morganella morganii
atggcaacttacgatattaagctgacagaccagattccgttgctgacggaagaaacggacacattactgacaggggaaagcacactggccgatcacaacggcgtgccgctgaccttcggaagtgcgtatctcactctgatgatctgccgggcgggatacgcacatatgtcactgaattttaaacctcagcctgtacgggcgggggatattctggtgctggcggaagatacgatcgcgctgctgaaaaagcactcgcggggattccgtgtgtttttttgcctgatcccggcctccttttctgccgaaatcgcctatgtcctgccgaacccgctgtttctgtttctgcatgaatatccccgctgcattccgctgccggaagaaaaaccgctgctgacaatgtggctggcacaaatgcaggatatcacccgcaacagtccggtttaccggcatattatgcagcgtaatcatttacagaacctgtttttgcggatagcggaaagaatgccgccgtatgccccggccgccacacagaagtacagccggaaagagacactgtgctggcagttctgggaacttatctgccgccacagccgggaacacagggatgtgcagtactatgcgcggcagttaaatatcacaccgttttatctgtcacagctgaccggaacgtttttcaatcactctcccaaatcactgatcaaccgccgggttatccccgaaatcaagacactcctgcgttacagcacgctgtcagtggagcagatcgcagataaactgcactttgatgatccgtcctacctgtgccgctatttcagacgggaaaccggcatttccctgacaacgtaccggcggcagaacagctga

SEQ ID NO: 276049 - DNA, 543 bp, Morganella morganii
atgaaattagaaacagaacgtatgattctgcgcccgtgggcagaaaccgatgccgccgatttatatgaagtggcgaaagatgaccgcgtcggcccgattgccggctggccgccgcacagctgcattgcggaaagcgccgatattatccgcaccgtttttaaccccgatgaggtttatgccactgaactgaaagcgaacgggcgggcggtgggctgtatcgggattttgatcggtgaaaacagcaactttgatatcagtcagagggaaggtgagatagcttactggattggtgtaccgtattggggacaggggctgatcccggaagcagtcagggaagtgatgcgccatgcatttgaaaccctggagctggatgctctgtggtgcggctattttgaaaacaatgaacagtcacaccgcgctcaggctaagtgcgggttccgccatcatcataccgaagagaataaattcaatcagttcctgaatgattaccggactgaacatatcagccgcattacgcgggaagagtggctggcacagcagtaa

SEQ ID NO: 276050 - DNA, 537 bp, Morganella morganii
atgtttcatattatcgcagcaacgactaatccggccaaaattcaggctatccgttccgcttttgaagtggttctgggtaacggcaattttgatattgaagatgtgaatgtggacagcagcgtgccgcagcagcctatcgggaataccgaaacccgtaccggtgcccgccagcgcgtcaatgcggcccgtcaggtcagaccggaagcggatttctgggttggtgttgaagcgggtattgaaggcgatatgacctttgcctggattgttatcgagcaccgtcagctgcgcggggaatcccgttctgccagcctgatgctgccggaaaaaattctcgcggggatccgcgaaggccgcgaactgggtgatgaaatggccgacctgaccggagtggaagatattaaacagaaaggcggagcgatcggtttcttcaccggcggcgctctgacccgcaccagtgtctatgagcaggcaattatcctggcgctggtgcctatccagcatgaaatttataaatccctgaacaccagagaatcctga

SEQ ID NO: 276051 - DNA, 648 bp, Morganella morganii
atgtcacaggtatttcttgtccgtcacggcgaaactgaatggaacgttcagcgccgtatccagggtcattctgacagcccgttaacacaaagtggtatcgaccaggcgaagcaggttgccgcgcgtctgaaaaatgaagggatcacccatattattgccagtgatctgggccgtacacaacagactgcaaaactgatcgcagaagcctgcggttgtgaggttattgcagatccgcgtctgcgtgagctcaatatgggcgtgctggaaaaacgtcagatccataccctgaccgaagaagaagagggctggcgtaaaagtctgcttaacggcgcggaagacgggcgtatcccggaaggggaatctctcgcggagctggaaagccggatgcgggcggcgctggaaagcacgctggatctgccggagggcagcaaagttctgctggtcagtcacggtattgcgctgggatgcctgattggctctgtgctggggctgccggcttatgcggagcgccgtctgcgtctgcgtaactgctcgttatccgttctggagtatcaggaaagcccgtggctggcggatggctgggtggttgaaacggccggtgacaccacacatctgagtcttccggcgctggatgaagtgcagcgctga

SEQ ID NO: 276052 - DNA, 912 bp, Morganella morganii
atggatcagaccagcatcattcgcgatttactccgttggttagatgagcatttagatcagccactttccctcgataacgtcgctgcgaaggcaggctactccaagtggcatttacaacgtatgttcaaggacgttaccggtgaggccatcggcgcttacatccgcgcccgccgtttatcacgcgcagcgattgcactgcggctgactgcccgtcctattttagatatcgcgctgcagtatcgtttcgattcacagcaaacctttacccgcgcattcaagaaacagtttaataaaacacctgcgctgtaccgccgtcttgacgaatggtgctctgacggaatctgctccgccattctgcttgatgatgtgccgatgccggagcacgagtttgtcacgctgccgccgcgcacagtcatcggtatcgagaacagctgttcacatcgtctggaagactgggcaaccgcatgtacccacatgcgccaggagttctggctgcatcatatttctgtggcgaaaactctcccggactatgtttacgggctttacagtaccacccgtaatccggacaaagaagatgagcagacagtccattataccaccgcagtggctaaggaatttgcagcctttactactgaggaaaatgttcacgagctggaaatgcccggtggtgaatatctctgcttcaccttcagcggcattccttaccgcggtgcgatgcaggaattcctgttcactatttacggccagtgtgtgccgcgactggggatcacccgccgccgtggttacgatgttgagagctataaactgagaaaaggaaccgatatccgttatccggatgtggatgaggcagatccgcgccatcacattgaggaatttaaatactatattcctgtcagacgtgacgcgcagtaa

SEQ ID NO: 276053 - DNA, 492 bp, Morganella morganii
atgaagcagactcgccggtctatactgggaattattacagctatttcattgagttcgttatcctttttgagtcatggtgaagaaatcggctctgtggacaccgtgttcaaaattctggggccggaccacaagattgtggtggaagcctttgatgatccggatgtggaaaatatcacctgttacctgagccgggcaaaaaccggcgggattaagggcgggctgggtctggcggaggatacgtctgatgccgcgatttcctgtcagcaggtcgggccggtcaccgtcagtgataaagtgaaaaaaggccgcaaagataaaggtcaggtggtgtttcagaagcggacatccatggtattcaagaagttacaggtggttcgtttctatgatgagaagcgtcacgcgctgatttatctgacttattcagacaaagtggtcgacggctcgccgaagaatgcgctgagtgcggtgccgatcattccgtggaacaaataa

SEQ ID NO: 276054 - DNA, 717 bp, Morganella morganii
atgcaaaccccgcatattttaattgttgaagatgagatcgtcacccgtaacaccctgaaaagtattttcgaagcagagggttacgtggtacatgaagccactgacggtgcagagatgcacaatgtgctgtcagaccatgatatcaatttggttatcatggacatcaacctcccgggaaaaaatggtctgttgctggcgcgtgagctccgcgaacaggcaaacgtggcactgatgttcttaaccggccgtgataatgaagtggataaaatcctcggtctggaaatcggtgctgatgactacatcaccaagccgtttaacccgcgtgaactgactatccgcgcacgcaacttactgtcacggaccatgaatctggccggtggcagcgaagagcgccgcagtgtggaaagttacaagttcaacggctgggaactggatatcaacagccgctcattaatcggaccaaccggcgagcagtacaaactgccgcgcagtgagttccgtgcaatgctgcacttttgtgagaatccgggcaagattcagacccgtgctgaactgctgaagaaaatgaccggccgtgaactgaaaccgcatgaccgtacagtggatgtcaccatccgccgtatccgcaagcatttcgagtccacaccggataccccggaaatcatcgccaccattcacggcgaaggttaccggttctgcggcgatctcgacgagtaa

SEQ ID NO: 276055 - DNA, 2460 bp, Morganella morganii
atgcgtgtacttaaatttggcggcacatccgtggcaagtgcggatcgtatactgaacatcgcaggaatcgcggagaaaaaactcgcgcagggacagctcgccatggtgctttccgcaccggcgaaaatcactaattatttagtggcgatggtggagcagaccgtcagcgggcaggaagcaaacaccctggtacacgatgccgccgcgattctcggggcgattctggacgggctgcgcgatgcggtaccgggctttgaatatgaccggctgaagcatgaaacagagcaggaaatcagccggatccgccgggtactgcacggcgtgtcactgctgggacagtgtccggacggcatcaatgccaatatgatcagctgcggcgagcgtttttccatcgcagtgatggcatcactgctgaaagcccgcggccataaagtaacggtgattgatccggtggcgaatctgctggcggtcggcggttatctggaatccaccgttgatattaatgaatcaacaaaacgcattgcagcgctgaatatcccgtctgaccacatcattctgatggcgggattcaccgccggtaatgaaaacggcgagctggtggtgctggggcgtaacggctctgactattctgcggcggtactggcagcgtgtctgcgtgcctcctgctgtgagatctggactgacgtggacggcgtgtatacctgtgacccgcgctttgtgccggatgcccgtctgctgaaaggcatgtcgtatcaggaggcgatggagctctcctatttcggggcaaaagtcctgcatccgcgcactatcgcaccgattgcccagttccagatcccgtgcctgattaaaaataccctcaatccggacgcgccgggcacgctgatcggcgacggtcagcgtgatgacagcctgccggtgaaggggatcaccaacctgaataacatggcgatgttcaacgtctccggcccgggtatgaaagggatggtcgggatggcggcacgggtgtttacggtgatgtcacggcgtaatatctctatcgtgctgattacacagtcatcttccgaatacagcatcagtttctgtgtggcgcagaaagataaggcccgtactcagcaggcgctggaagaggaattttatctggaactgaaagagggcgtgctcgatccgcttgacgtgctggataacctggcgattgtctccgtggtcggggacggtatgcggacactcaaaggtatttccgcacggttcttctcggcactgacccgcgccaacatcaatatcattgcgatcgcgcagggctcatccgagcgttccatttctgcggtggtggataatgacctcgcggccgccggtgtgcgtctgtgtcaccagatgctgtttaatactgaccgcattgtggaggtgtttgtggtgggcaccggcggggtcggcagtgcgctgctggagcagatccgccgccagcagacgtggctgaaagcccggagtatcgacctgcgtgtctgcggtatcgccaattcaaaagcgatgctgaccaatatgcgcggcattgatttacaggactggcgtcagtcgctggcgcaggccaaagagccgttcagcctcagccgtctgatccgcctggaaaaagaatatcacttcctcaacccggtgattgtggactgtacgtcgaatgaggaaatcgccctgcaatatgcggatttcctgaaggacggtttcaacgtggtgacgccgaacaaaaaagccaacaccctgccgatggattattaccatgaactgcgcagtgcggcggcggcatcaaaacgtcagttccgttatgacaccaacgtcggtgccgggctgccggtgatcgaaaacctgcaaaacctgctcaacgcgggggatgaactggtgcagttcagcggtattctgtccggttcgctctcctttattttcggtatgctggatgaaggaatgtcgctgtctgaggcaacagctgcggcgaaagccaaaggctttaccgagccggatccgcgtgatgatctctccgggatggatgtagcgcgtaagctgctgatcctggcccgtgaagcggggctctcccttgaattatcagatattgaggtggattccgtgctgccgccggacttcgatgcttccggtgatgtgaatacctttatggcgaatctgccgtcactggatgcggcctttgccgcgcgtgtggcgaaagccgcagaagcaggctgcgttttgcgttatgttggcatcattgatcacggccgctgtcaggtgaaaatcacagaggcagacggtaacgatccgctgtataaagtgaaaaacggcgagaacgccctggcgttttatacccgctactatcagcctatcccgctggtactgcgcggttacggcgcggggaatgatgtgacagcggcaggggtgtttgcggatgtgctgcggacaatgtcatggaaaccaggagtgtaa

SEQ ID NO: 276056 - DNA, 933 bp, Morganella morganii
gtgataaaaatttatgcaccggcgtcaatcgggaatgtgagtgtggggttcgatgtgctgggtgcggcagtgtctccggtcagcggggcactgctcggcgactgtgtgtccatcgcgaaggcagagacgttttcactcagaaaccgcgggcgttttgccgggaaactgccggtgaatccgaagcacaatattgtgtatcagtgccgtgaacggttcagtgagatcattcatgataatctgccggtcgccatggtgctggaaaaaaatatgccggtgggttcggggctgggctcaagtgcctgctcggtggtggccgcgctggtggcgctgaacgagtacaccggcaggccgctggatgaaatgacgctgctgcgtctgatgggggagatggaagggcgcatctccggcagtgtgcattatgacaatgtcgcgccctgcttccttggcgggctgcaactcaatattgaaaccggcgaaagcgtcagccaggcagtgccgggatttgaacactggtactgggtaatggcgtatccgggcatcaaagtctccacggcgcaggcacgggcgattttaccggcgacctattcacgggcggatattgtcagtcacgggcgcaacctggccgggtttatccacgcctgtcacaccggacagtcggatctggcggcggcgatgatccgtgatgtggtggcagagccgtaccgccgtgaattattaccgaattttgatgcggtccgtgagcaggtgcttgcacgcggcgcgaaggcatgcggcatctccggctcgggcccgacactgtttgcgatctgtgacagcaaatcagcggcagatcaggtggcggatgtctttaacacacagtatttgcagaacagcgaagggtttgtccatctgtgccgtctcgatctcaaaggcgcacgtcagataagtgcataa

SEQ ID NO: 276057 - DNA, 1293 bp, Morganella morganii
atggaactgtacaatttaaaagatgagagtgaaaaagtcagttttgcacaggcggtaaaacaggggctgggacgcggacaggggctgtttttcccgcgtgagattccgttttttgcggcggcggagatggataagctgctggcgatggattttgtcagccgcagcaccaccattctgcatgcactgattggtgatgagatcccggaagctgagctggcagcgcgtgtccgtgccgcctttgccttcccggcaccgctgaacccggtggagccggatgtggcctgtctggagctgtttcacggcccgacactggcgttcaaagatttcggcggacgttttatggcccaggcgctggccgccgttgccggtgacaaaccggtcactattctgaccgcgacttccggggataccggtgctgctgtcgcacacgccttttatggcctgaaaaatgtgcaggtggtgatcctctatccgcagggaaaaatcagtccgttacaggaaaaactgttctgtaccctcggcggcaatattcataccgtagcggtgcaggatgatttcgatgcctgtcaggcactggtaaaacaggcatttgatgatgaggaactgaaacagacgctgcatctgaactcggcaaactccattaatatcagccgtctgctggcacaaatctgttattactttgaagcggtggcacaggttccggcggaaaaacgcggtgagctggtgttctcggtgccgagcggtaacttcggtgacctgactgccggggtgctggcgaaagcgatggggctgccggtgaaacgctttatcgccgcgaccaatgccaacgacactgtgccgcgttatctggcggacggacagtggaaaccggcggcaacagtggcaacgttatccaatgccatggatgtcagccagccgaacaactggccgcgtattgaggcgctgtttgcgcgcgaaggctggccactgaaggagctgcgttccggcgcagtaagtgacgatgaaacccgcgaaaccatgcgcgatctggccgcgaaaggttatatttccgagccgcatgccgcgatcgcgtatcgtctgctgcgcagtgatttgcagccgggcgagtacggtattttcctcggtacggcgcatccggcaaaattcctggagagtgtggaagcgattctgggcagtaaactgccgttaccggctgaactggcggagcgggctgatttgccgttgttgtcagctgtgttaccggcggattttgcggcgctgcgggactatctgctgaagacagtgaagccgtaa

SEQ ID NO: 276058 - DNA, 792 bp, Morganella morganii
atgctgctgaccatttcccctgccaaaaccctcgactatgacagcccgttagccactgaacgccatactcagcctgagctgctgacgcagtcagaaacgctgatggaaacctgccgcaaactgactccggcggatatcggctcgctgatgcatatcagtgacaaactcgcgggtctgaatgccgcccgtttcggggattggcagccggatttcacaccggacaatgcccgtcaggctattctggcatttaaaggggatgtgtataccgggatgcaggcggaaaccttcagtgaagccgattttgatttcgcccagcagcatctgcgtatgctctccggcctgtacggcgtactgcgcccgctggatctgatgcagccttaccgtctggaaatgggaacgaaactcgccaatccgcgcggcaaagatctgtatgcgttctgggggggcattattacggacaatctgaataaggcgctggctgcacagggcgataacgtgctggtcaatctggcctctgatgaatactttaaagcggtgaatccggagaaactggatgcggtaattatcaaaccggttttcctcgatgagaaaaacggcaaatataaagtgatcagtttctacgcgaagaaagcgcgcggcctgatgagccggtttattattcagaaccgcctgacacagccgtctcagctgaccagctttaacctcgacggttaccgttttgatgagagtcagtccggtgagcgggaactggtgtttacccgaccggaaggtaccggttctgataacgggtaa

SEQ ID NO: 276059 - DNA, 954 bp, Morganella morganii
atgaccgataagttaacttccctgcgtaatctgaccacggttgtggccgataccggtgacatcgaagcgatgaagctttacaaaccacaggatgccaccactaacccttctctgatcctcaatgcggcgcagattccggagtaccgtaagttaattgatgatgcggtgacctgggcgcgtgcacagagcggctcacgtgaacagcagattattgatgccggtgacaagctggcggtgaatatcggtctggagatcctgaaactgatccctggtcgcatctccacagaagtggatgcccgtctctcttatgacactcaggcgagtatcgccaaagcaaaacgtctcatcaaactgtataatgatgccggcatcagcaacgatcgtatcctgatcaaactggcctccacctggcagggtatccgcgctgcggaacagctggaaaaagaaggcatcaactgtaacctgacactgctgttctcctttgctcaggcgcgtgcctgtgcggaagcgggtgtatatctgatttctccgttcgttggccgtatcctcgactggtacaaagcaaacagcgacaagaaagagttcgcaccggcagaagatccgggcgtgatttcagtaactgaaatctacaactactacaaagagcacggctacaaaaccgtggttatgggcgcaagcttccgtaactcaggtgaaatcctggaactggccggttgtgaccgcctgaccatcgcccctgcactgctgaaagagctgtcagaagcgaccggtgcggttgaacgcaaactggaatataaaggcgaagtgaaagcgcgtcctgcaccgctgacagaagctgagttctactggggtcaccacagcgatgctatggcaaccgagaaactggcggacggtatccgtaagtttgcggtagaccagggcaaactggaaaaaatgatcgccgatctgctgtaa

SEQ ID NO: 276060 - DNA, 585 bp, Morganella morganii
atgaacaatgtgttgcgcatcggtcttgtctcggtttctgaccgcgcatccggtggtatttatgaagataaaggcattccggccttacaggcatggctggaaaaaactatcaccacgccttttcagacagaaacccgcctgatcccggatgaagaagcgatgatcagccagacgctgtgtgagctggtggatgaattcggctgccatctggtgctgacaaccggcggaaccggaccggcgcggcgcgatgtgactccggacgcaacactggcggtggcggatcgcgaaatgccgggtttcggcgaacagatgcgtcagatcagcctgaaatttgtgccgactgccattttatcccgccaggtgggcgtgatccgcaatcagtcgctgatcctcaatctgccgggtcagccgaaagctattgctgagaccctggaagggctgaaagatgaaaacggcaaagtaatggtttccggtatttttgcaagtgtaccgtattgtatacagttactggacgggccctacatcgaaactgaccctgaaattgtcgcggcgtttcgtccgaaatcagcaataaagccgcagtaa

SEQ ID NO: 276061 - DNA, 1299 bp, Morganella morganii
atggcacagaccattccccggacactcaaccggcaggattataaaacactctctctcgcggccctgggcggcgcactcgaattctacgattttattattttcatcttttttgccgtcactatcggcaaactgtttttcccgcctgacatccctgcgtggctggtgcagatgcagactttcgggatctttgctgccggttatctggtgcgcccgctgggcggcattgtgatggcgcacttcggtgatctggtcgggcgcaagaaaatgttctccctcagtattctgctgatggcggtgccgacactttgtatcggcctgctgccgacttatgaatctatcggtattgccgcgccgttactgcttttattaatgcgggtaatgcagggggcggctatcggcggggaagtgccgggcgcctgggtatttgtttccgagcatgtgccgaagcaccgtatcggcattgcctgcggcacactgacggcagggctgacggttggtatcctgctcggctcgctggtggccatgatgatggcgacactctttactgaagcgcagcagcttgcctggggctggcgtgtaccgttcttcctcggggggattttcgggtttgtggcactgtatttgcgccgctggctggcggaaacccctatctttcaggagatgaagcagcaaaaagcactggcgaaagagctgccgctgaaaaccgtggtggtgaatcacaaagaagcgattgttatctccatgctgctgacctggctgctctccgccggggttgtggtggtgatcctgctgacaccggcgtatttacagacggagttcggcctggcaaaagcggtggtgtctgtcgccaatatgaccgcgattctggcgctgtgcgccgggtgtctggtggcgggttatctgtgtgacaaactgggcgcctctgtggtctttaccttcggcagcctgctgctggcggtctgcaccggctatttttacctgaccgccggtgaaccgggtacgccgctgtcgctgacctacggactggccggattcagtgtcggcgtggtgggcgcggtaccgtttgtgatggtgaacagttatccggcggagatccgcttcagcggtatttcgttctcctacaacctttcttatgccattttcggcggactgacgccggtggtggtcacgctgttcctgaaatggacaccgcttgcaccggcgtattatatgctggggctttcgctgatcggcctgctgctgggactgtatatggggaaagcggcggtccgtcagcggatgatggtgttcagctcctga

SEQ ID NO: 276062 - DNA, 1923 bp, Morganella morganii
atgggtaaaattattggtatcgacttaggtacaaccaactcttgtgttgctgtaatggatggtaatcaggcacgtgtcctggagaacgcagaaggtgaccgcacaacgccgtcaatcattgcgtatacacaggatggtgaaatactggtcggtcagccggcaaaacgtcaggctgttaccaacccgcagaacacactgtttgcaatcaaacgtctgattggtcgtcgttttgacgatgaagaagtgcgccgcgatatgaacatcatgccgtacaaaattgtcagctctgataacggcgacgcatgggtggaagcaaaaggccagaaaatggcaccaccacaggtttctgctgaagtcctgaaaaaaatgaagaaaaccgctgaagattatctcggcgagccggtaaccgaagcggttatcaccgtacctgcttactttaacgatgctcagcgtcaggcaaccaaagacgccggccgtatcgcaggtctggatgtaaaacgtattatcaacgaaccgactgctgcggcactggcttacggcctggatcgcgaagtgggtaaccgtactatcgcggtcttcgacctcggtggtggtactttcgatatctccatcatcgaaatcgatgaagttgacggcgaaaaaacctatgaagtgctggcaacgaacggcgacacccacttaggtggtgaagacttcgacagccgcatgatcaactatctggttgaagaatttaagaaagaacagggtatcgatctgcgtaacgacccgctggcaatgcagcgtctgaaagaagctgccgagaaagcaaaaattgagctttcttccgcacagcagactgacgttaacctgccgtacatcacggcggacgggaccggtcctaaacacatgaacatcaaagtgacccgtgcgaaactggaatcactggttgaagatctggttaaacgctctatggatccggtcaaagttgcattacaggatgccggtctgtcagtgaatgatatcaatgatgtcatcctggtaggtggtcagacccgtatgccgctggttcagaaaaccgttgctgatttcttcggtaaagagccgcgtaaagacgtgaacccggacgaagctgtggctgttggtgctgcggttcagggcggtgtgttaggtggtgatgttaaagacgtgctgctgctggacgttaccccgctgtctctgggtatcgaaaccatgggcggcgtgatgactccgctgattgcgaagaacaccactatcccgaccaaacacagccaggtgttctccacagcggaagacaaccagtctgcggtaactatccatgttctgcagggtgagcgtaaacgttccggtgacaacaaatcactgggtcagtttaacctggatggtattcaggctgctccgcgcggtatgccgcaaatcgaagttacttttgacatcgatgccgacggtatcctgcatgtgtccgcgaaagacaaaaacagcggccgtgagcagaacatcaccatcaaggcgtcttccggtctgaacgaggaagagatccagaaaatggtacgtgatgcggaagccaacgccgaagctgaccgtaagtttgaagagctggtacaggttcgtaaccaggcagatcagctggttcacgccacccgtaaacagatcgaagaagcgggcgacaaactgccgggcgacgataaagtgaaaatcgagcaggcggtgagtgagctggaaatcgcagcgaaaggcgaagataaagcggctatcgaagagaaaacgaaagcgctgatcgacgcttctgccaaactgatggaaattgcccagcagcaggcgcaggcaggtgcagcaggtgctgatgccgcgcaggatgcaggtaaaaatgatgatgttgtcgatgctgaattcgaagaagttgacgacagcaaagacaaaaaataa

SEQ ID NO: 276063 - DNA, 1146 bp, Morganella morganii
atggcaaaaaaagattactacgaggtgttgggcgtctcgaaatctgcggatgacaaagagattaaaaaagcctacaaacgcctcgcgatgaaatatcaccctgaccgtaatcagggcgataaagacgcggaagataaattcaaagaagtaaaagaagcatacgagatcctcaccgacgcacagaaacgtgcggcttatgaccagtacggccatgcggcatttgagcagggcggtatgggcggtggcggcggatttggcggcggcggtttcggcggtgctgatttcggtgatatctttggtgacgtcttcggtgatatttttggtggtggtcgccgtcagcaacgcgcggcacgcggagcagacctgcgttacaacatcgaactgacccttgaagaagcggttcgtggtgtgaccaaagagatccgtattccgaccctggaaacctgtgataaatgtcacggcagcggggcgaaagaagggacagagccgcaggagtgtccgacctgtcacggtatgggccaggtgcagatgcgccagggcttctttgcagtgcagcaggcgtgtccgacctgtcacggccgcggcaaaatcatcaaagagccgtgcagcaaatgtcatggtcacgggcgtgttgaacgttataaaaccctgtcagtcaaaatcccggcaggaatggacagcggcgaccgtatccgtctgaccggcgaaggtgaagcaggtgaaatgggggctccggcaggcgatctgtatgtcgaggttcatgtccgccagcacaatatcttcgagcgtgacggcagcaatctctactgtgaagtaccgattggctttacggttgcggcgctgggcggtgaaattgaagtaccgacactggacgggcgcgttaagctgaaaatcccggcagaaacccagaccggcaaactgttccgcatgaaaggcaaaggtgtcagaccggcgcgcggcggaatgcagggcgacctgatgtgccgcgtggtggtggaaacaccggttaaactgagcgaaaaacagaaagaactgttacgtgagttcggtgagtctgtggatggccagagcggccacaacaacactccgaaagcgaaacgcttctttgacggtgtgaaaaaattctttgatgacctgaccaaataa

SEQ ID NO: 276064 - DNA, 645 bp, Morganella morganii
atgtatacaccggctctctcctcatcttccgcatcacaggatatctctgtttcccggtttatccgcagcacagcgggtgctgatagtcacgaattgatcggcctgctgatttttggtgtgcagaataccactgaaaaactattcagatgcgatgccgcgcaagcatcacttattgacccggaaaatacacctgctttttctgacactggcggtactgatatgtcagtgattgaaaccaccccgctgaaaaatctgtcagcgtatatcagtctgatgaagttgcagggagatgtccctgcgggcagctatctgaatacagttcagcatcattgtgaacaggcgattaggcagcaggataccaccacgcaggcttctgccttcagtccgtatctttctgcccggactatcgccgcaacaccggacaggaaattcaatagcggtatgacagaggccgcccggcagcagaatacccggctggcggagacactgactcagctaaaattcagtaaagagcagatgacggggcaaagacaaaaaatcgcggagaaccatgcaaaaccgtttctcagaacaccggtggatatcatcaccggtgagattgatctcgccggactgagccggttatatgacgctaatccgggttaa

SEQ ID NO: 276065 - DNA, 1179 bp, Morganella morganii
atgaccgcaattatccggcagttcttaaaattcgaagcagcaggcggcatactgctgattattgctgcgctgatcgcgctggtgatggcgaatacgccgctgtcagcggtgtatcagtcatttcttgatattcccgttgctgtaaaattctcggcactggaaattgataaacccttgttattatggattaatgacgccctgatggcgatatttttcctggtcgtcgggctcgaagtaaaaagggagctgataaccggctctctggccgggcgcgacaaagcgatgtttccggcaattgccgcactcggcggtatgatagccccggcgctggtctatctgctgtttaacggcggggatgccgccgctgcacagggctgggcgattccggccgcaaccgatattgcctttgccctcggcgtaatggcactgctgggcaaacgcgtaccgacagagctgaaagtctttctgctggcactggcgattattgatgacctcggggttatcgtgattatcgcgctgttttacaccaaaaccgtttcactgacagcgctgctgctggcggcactgatggtggtggtattgtgtgtgatgaactggcgtaatgtcagcaacaccgctgcgtatatgattgcggggctgatattgtgggtgtgtattctgaaatccggcgtgcacgcaactctggccggggtgatcgtcggcttcctgatcccgctgcgcagtaaagatggtgagcactcaccgtcagaggagctggagcatgtgctgcatccgtgggtggcgtttctgatcctgccgctgtttgcctttgccaatgccggtgtcagtgttcagggaatttcctttgatgcactgatgggtacactgccgctggggatcctgctcggtctgtttgtcggcaaaccgctggggattttcactgcatgtctgatttcggtaaaactgggctttgcaaaactgccggagaggattactcttaaccagatattcgctgtatcggtgttatgcgggatcggttttacaatgtctatctttatcgcgggactggcatttaccgggcttccggaagcatttaacacctactccaagctgggaattctgattggttccactatggcggcagttaccgggttattcctgctccattccgtgttaccgaagaaaacagtccggcagtaa

SEQ ID NO: 276066 - DNA, 930 bp, Morganella morganii
atgcgagtctcccatttaaactacaatcacctctattatttctggcacgtctgcaaagaaggttcggtggtgggagctgcagaagcgctctatctcaccccgcaaaccattaccggccaaatcaaggcgctggaagagcgtctggacggtaagctgttcaaacgtcagggacgcggcctggtgccgtcagaactcggtcagctggtgttccgctatgcggacaaaatgtttatgctgagccaggaaatgctggatattgtcacttacagccgcgaatccaatctgttgtttgatgtcggggttgcggatgcactgtcaaaacgtctggtcagcaaagtgctggaaacggcggtgatggagcatgagcaaatccatctgcgctgttttgaatccactcacgaaatgctgctggagcagctcagccagcacaaactggatatgatcctctctgactgcccggtggattccacccagcaggaagggctgttctccgtgaaactcggggagtgcagtatgagtttctactgccgccagcccgcgccgcagaagccgttcccggaatgtctggaagagcgccgtctgctggtgcccggccgccgttcgatgcttggccgtcagttgctgacctggatccgcaataaaaacctggaagtggaaattctgggtgagtttgacgatgcggcactgatgaaagcatttggtatgtatcacaatgcgatttttgtggcaccgtcgctctacaccaaaggcatttttgcggacagtgatgttgtcgagctgggaacggtggataccatcaaagaagagtattatgtgatttttgccgagcgtatgatccagcatccggcggttcagcgggtgtgtaacaaggatttctctgcgctgttcagcggttcgcagtcggctgcggacgccggtttaccggactga

SEQ ID NO: 276067 - DNA, 261 bp, Morganella morganii
ttggctaatatcaaatcagctaagaaacgcgccattcagtctgaaaaacgtcgtcagcataacgctagccgtcgttctatggtgcgcacctttatcaagaaggtttacgctgctatcgctgccggcgacaaagaagctgctcagaacgcatttaatgacatgcaaccacttgtggatcgtcacgctgctaaaggcctgatccataagaacaaggctgcccgtcataaggcgaacctggctgctcagatcaaagcaatgtaa

SEQ ID NO: 276068 - DNA, 945 bp, Morganella morganii
atggagctaattcgcggtactcacaatattcgtgcgcgtcaccatggttgcgtgctgactatcggtaattttgatggcgttcatcgcggacatcaggcattactgtcacatctggcgcaggaaggaaaacgcctggggctgccgtcggtcgtcatgatcttcgagccgcagccgctggaattttttgccccggataaagcgccggcacgcctgacccggctgcgcgataaggtaaaatatcttgcgcagtacggtgtggactacttattgtgtgttaaattcagcaaacaatttgcatcactgacaccggatgcttttatctcacacctgctggttgaacagctgggggtgaagtttctggtggtcggggatgattttcgtttcggaaaaaatcgtcagggcgattttaacgggctgtgtgaggcggggaaacagtatggtttcacggtccgcagcacggaaagtttttgtgataacggcaaacggatcagcagtacggccatccgccgcgcgctggaaaacgacgatctggcgcaggctgaggcactgctcgggcacccttaccgcatcagcgggcgtgtggtgcacggcaacgaactcgggcgcaccatcggtttcccgactgccaatatccccctgaaacgtctggccgcaccggtacacggtgtgtacgccgtggacgtatacggcctcgggccgcatccgctgccgggtgtggccaatatcggctcccgcccgacagtacagggtaagagccagcaactggaagttcatctgattgatgtgtctatggatttatacgggcagcatccggatgtagtactgcgcaagaaattgcgaaatgaacagcggtttgcctcgctcgatgagctgaaagcgcaaatcgcgcgggatgagattgcggcaagggaatttttacaatccaacccctcgttatgtgtttaa

SEQ ID NO: 276069 - DNA, 2814 bp, Morganella morganii
atgagtgactataaaaataccctgaatctcccggagacagggttccctatgcgcggggacttagcaaagcgcgaacctgatatgctgaaacgctggtacaaagaaggtctgtaccaggcgatccgtaaagccaaaaccggtaaaaaaacatttattctgcatgacggccctccgtatgcaaacggcagcattcacattggtcactcagtcaataaaattctcaaagatattattattaaatccaaaggcatggccggttttgactccccgtatattccgggctgggactgccacggtttaccgattgaacacaaagtcgaacaggtgattggcaagccgggtgataaagtcacaccggctgagttccgtgctgcctgccgtgaatacgcaaaagagcagattgaaggccagaaggaagactttatccgtctgggcgtgctgggtgactgggatcatccgtacctgaccatggacttcaaaaccgaagctcatattatccgcgcactggcaaaagtgattgccaacggccatctggtcaaaggggcaaaaccggttcactggtgtacctcctgtgcctcttccctggcggaagcggaagtggaatattacgacaaaacctctccgtccattgacgtgcgtttcacggctgcggacgcggatgcggtttacagcaaattcggcgtgaaaaatgacgggctgccggtttctctggttatctggaccaccacaccgtggactttaccggcaaaccgcgcgatttccctgaacccggaatttgattatcagttagtccgcgtgaacgacgagcgcctgattctggccgctgacctggtggaaagcgtgatgaaacgcgccggtatcaccagccggactgttgaagcggactgcaaaggcagcgacctggaactgctgcggtttaatcatccgtttatgggctttgatgtcccggctatcctcggcgatcacgtcaccctggatgcgggtaccggtgctgtgcataccgcgccgggccacggtcctgacgactatgtaatcggccagaaatacggcctggaaaccgcaaacccggtcggtccgaacggctgttatgtcagcggtacctatccgtcactggatggtgtgtttgtgctgaaagccaatgacatcatcctggaactgctgaaagagaaaggcgcactgctgcacagcgaaaatatttcgcacagctatccgtgctgctggcgtcacaaaacaccggtcattttccgtgccacaccacagtggtttatcgggatggatgtgaacggtctgcgtccgcagtctctgaatgaaatcaaaggtgtgaagtggatcccgggctggggcgaagcgcgtatcaccgcgatggtggaaaaccgtccggactggtgtatctcccgtcagcgcacctggggcacaccgatgtctctgtttgtccataaagagacccaggaactgcatccgcgtacactggaactgatggaagacgtcgccaaacgtgtggaagagcatggtattcaggcgtggtgggatctcgacccgcgcgacctgctgggtgatgatgccgatatctatgaaaaagtgccggataccctggatgtctggtttgactccggatccactcactttgctgttgtcgatgcccgtcctgagttccatggcaattctgcggacatgtatctggaaggttctgaccagcaccgcggctggtttatgtcctcactgatgctgtccaccgcgatgaaaggcaaagcgccttaccgcgaagtattgactcatggtttcaccgttgatggtcagggacgcaaaatgtccaaatcgctgggtaacaccatcagtccgcaggatgtgatgaacaaactcggcgcggatatcctgcgtctgtgggttgcttctactgactactccggtgaaattgcggtttcggatgaaatcctgaaacgttctgcagattcttaccgacgtatccgtaacaccgcgcgtttcctgctggcgaacctcaatggtttcaatccggaaaccgatatggtgaaaccggaagagatgattgtggcagaccgctgggctgtcggccgcgcactggcggcacaggctgatattctgaaatcgtatgaagcctatgatttccatgaagtggtgcagcgtctgatgcagttctgctcggtggaaatgggctctttctacctggatatcatcaaagatcgtcagtacaccgcgaaaagcgatggcctggcacgccgcagctgtcagaccgcactgttccacatcgcggaagctctggttcgctggatggcgccgatcatgtccttcactgccgatgaaatctggaatgtgatgccgggcaaacgtccgcagtacgtcttcactgaagagtggtatgacggcctgttcgggctgaatgcacaggacagcatgaacgatgattactgggcaacgctgctggcggtgcgtggtgaagtcaacaaagtgctggagcaggcacgtgccgacaaactgattggcggctcgctggaagcagcggtgactctgtatgcggatgatgccctggcggcacagttgaacagcctgggtaatgaattgcgtttcgtgctgctgacctctcaggcagatgtgaaaccattgtctgcggcaccggaaagtgcggtaaacagtgagctggacggcctgcgcatcggcttcggcaaagcggaaggcagtaagtgcccgcgttgctggcattacgcgaccgacatcggtcaggacagtgaacatcctgaactgtgcggccgctgtgtgacaaacgtagccggaaacggtgaagaacgtaagtttgcctga

SEQ ID NO: 276070 - DNA, 522 bp, Morganella morganii
atgaaaaaaccactgtgttcgaccggattgcgctggctgtggctggcggtcctggtactggtactggatgcgatttcaaagcagctgattttagccaattacgggctgcatgaatccacatcactgataccgtactttaatctgacctatgtgcggaattacggtgccgcattcagcttcctcgcatctcagggcggctggcagcgctggttcttcacagcggtggctatcggtatctccgtgacattactggtgatgatgtaccgcaccagtgcgcgcaataaactcagtaatattgcttatgcactgattatcggcggggcgatcggcaacctgcttgatcgcctgatgcacggttttgtggtggattacatcgacttttatgtcggtgactggcactggccgacgttcaacctggcggacagctggatcatcatcggggcggggcttatcattattgaaagctttatccctgacggtaagaaaagcgacaaaccagagaacaagacatcatcagactga

SEQ ID NO: 276071 - DNA, 432 bp, Morganella morganii
atgcaggttgcagaacatcacagcgtattactggattacaccctgaaactgtctgacggctctgtggcggattccacagaagcacaaggcaaaccagcactgttccgcctcggcgacggcagcttgtctgacgcactggagcagcaattactgggcttatctgccggggataaaaaaaccttcactctgcccggtgaggcggtgttcggtaaagcgagcccggatctgattcagtttttctccgccgccgatttcctggaggcgggtctgccggaaaccggcacgatcatgctgtttaccgcgatgaacggcagcgaaatgccgggaattatcaaatccgttactgaagattctgtcgaggtggatttcaaccatccgctgtgcggacaggatgtgacgttcgatatcagtgtccgtgacgtcactgcataa

SEQ ID NO: 276072 - DNA, 951 bp, Morganella morganii
gtgcgtattttactggctaacccgcgggggttctgtgcaggtgttgaccgggcaatcagtattgtggagcgggcgctggaattatacggtgcgcctatctacgtccgtcatgaagtcgtgcacaaccgctatgtggtcaatgatctgcgtgagcgtggcgcgatttttattgaggaaatcgctgaagtaccggataacgccattctgatcttctccgctcacggtgtctcgcaggcgatccgccaggaagcgcgttcccgtaatctcaccatgctgtttgatgccacctgtccgctggtcaccaaagtgcatatggaagtggcccgcgccagccgcaaaggcaaagaagcgattctgatcggccacgccgggcatccggaagtggaagggacgatggggcagtacaacaacccggaaggcggtatgtatctggtggaatccccggaagatgtgtggaaactgaacgtcaaagatgaggaaaacctcagctttatgacgcagaccacactatctgttgatgatacctccgaagtcattgatgcgctgaatgcccgtttcccgaaaattatcgggccgcgtaaagacgatatctgctatgccaccaccaaccgtcaggaagcagtgcgggatctggcgggtcaggcagatctggtgctggtggtcggctctaaaaattcatcaaactccaaccggctggcggagctggcgcagcgggtcggaaaaccctcttatctgatcgattctgcggatgatatcaatcccgcctggctgcgtgatgtggataccatcggcctgactgccggcgcatccgcgccggatgtgctggtacagcaggtgatcagccgtcttcaggaactgggggcggatgaaatcagtcagttggaagggcgtgaggaaaatattatctttgaagtcccgaaagagttacgggtggatatcaaagaagtctga

SEQ ID NO: 276073 - DNA, 816 bp, Morganella morganii
atgggtaagttacggctcgcggttgcgggtgccggtggccgcatgggacgccagctgattcaggcgattgcacagaatgatgatgtggtgctgggcgcggcatttgagcgcgaaggctcctcactcaccgggaccgatgccggtgaactggccggtaccggccgcaatggcgtgatcctgacggctgacctgaacagtcagaaagataatttcgacatcctgattgatttcacccgcccggaaggtaccctgacacatctggcgttctgtaccgctaacggcaaaggcatgattatcggcaccaccgggtttgatgatgccggaaaggccgctattgcacaggctgcgcagcaaattcctgtggtttttgcggcgaatttcagtgttggcgtcaatctggtgctgaaactgctggaaaaggcggccaaagtcatgggcgactataccgatattgaaattattgaagcgcatcaccgccataaagtggatgcgccgtccggaaccgcgctggcgatgggagaatctattgccggggcgctggggcgtgacctgaaggattgcgcggtgtactgccgtgaaggctataccggcgagcgggagcggaacactatcgggtttgccactgtgcgtgccggggacattgtgggcgagcacacagcgatgtttgcggatatcggcgagcgtgttgaaatcagccacaaggcttcaagccggatgacatttgcaaatggcgcagttaaggctgcagcctggctgagtgataaaaagaacggtctattcaccatgaaggatgtacttgatctggaaaatttataa

SEQ ID NO: 276074 - DNA, 1140 bp, Morganella morganii
ttgtttaagtcagcaatcctggttctgcaagacggaaccacatttcacggacgcgccatcggcgcagagggtgccgttaccggcgaagttgtttttaatacctcgatgacggggtatcaggaaattctcaccgacccctcttattcccgccagatagtcactctcacttatccccatattggtaataccggcactaacagtgctgatgaagaatccccggatgtttatgcacaaggcctcgttatccgcgacctgccgctgaccaccagtaatttccgcagtgaagaaagcctctccgaatacctgaaacgccgcaacgtcgtggctatcgccgatattgatacccgcaaactgacccgcttactgcgcgagaaaggcgctcagaacggctgcatcatcgccggtgaacacccggatgcggcactggcgctgaaaaatgcgcagagcttcagcgggctgaacgggctggatctggcgaaagaagtcaccaccgcgcagccatacagctggacacagggctcctggacactggacagcggcttaccggcggataaaacagcggaagagctgccgtttcatgtggtggcgtatgacttcggtgccaagcgcaacattctgcgtatgctggtggatcgcggctgccgcctgaccgtcgtaccggcacagaccccggcggaagaggtgctgaaaatggcaccggacggtattttcctctccaatggcccgggcgacccggcaccgtgtgattatgcgattgaggctatcacccgcttcctggaaaccgatattccgctgttcggcatctgcctggggcaccagttactggcactcgccagcggtgcaaagaccatcaaaatgaaattcggtcaccacggcggcaaccacccggtcaaagatattgaaaataatgtggtgatgattaccgcgcagaaccacggttttgcggtggatgaggcgacgctgcccgcgacactgcgcgtcacgcataaatcactgtttgacggcacattgcagggtattcaccgcaatgataaacccgcattcagcttccagggtcaccctgaagccagcccgggcccgcacgacgccgccccgctgttcgaccactttattgaactgatgaaaaacgcccgtcactga

SEQ ID NO: 276075 - DNA, 3228 bp, Morganella morganii
atggcaaaacgtacagatatcagcagcatcctgattttaggcgccggtccgattgttatcggccaggcctgtgaatttgactactccggcgcccaggcgtgtaaagccctgcgcgaagagggctaccgcgttatcctcgttaactccaacccggcaaccattatgaccgacccggaaatggcggatgcgacttacatcgagcctattcactgggaagtggtgcgcaaaatcatcgaaaaagagcgcccggatgccgttctgccgactatgggcggacaaaccgcgctgaactgtgcgctggatctggaacgtcacggcgtgctggcagagttcggtgtcgaaatgattggcgcgacagcggatgcgattgataaagcagaagatcgccgccgtttcgatatcgccatgaaaaaaatcggtctggatacagcgcgttccggtatcgcacacaccatggaagaagcgtttgcggtcgccgatgatgtcggtttcccgtgcattatccgcccgtcattcactatgggcggtaccggtggcggtatcgcgtataaccgtgaagagtttgaggaaatctgtacccgaggcctggatctctccccgaccaacgaactgctgattgatgaatcgctgattggctggaaagagtacgaaatggaagtggtgcgggacaaaaatgataactgcatcattgtctgctccatcgaaaacttcgacgcgatggggatccacaccggtgactccatcactgttgccccggcacagaccctgaccgacaaagaataccaaatcatgcgtaacgcctcgatggcggtgctgcgtgaaatcggcgtggaaaccggcggctccaacgttcagttctcggtgaacccgaaaaccggccgcctgattgttatcgagatgaacccgcgtgtatcacgctcctccgcgctggcctcgaaagcgaccggcttcccgattgccaaaatcgcggccaaactggcagtcggctatacgctggatgaactgtcaaacgacatcaccggcggcctgacaccggcctcctttgaaccgtctatcgactatgtcgtgacaaaaattccgcgctttaactttgaaaaattcgccggtaccaatgaccgtctgaccacacagatgaaatccgtcggtgaagtgatggctatcggccgcactcagcaggaatccctgcaaaaagcgctgcgcggcctcgaagtgggcgcgaccggctttgatccgaaagtgaatttagatgacccggatgcactgacccgcatccgccgtgagctgaaagaagcgggcggcgagcggatctggtatatcgcggacgcattccgcgccggactgtcagttgacggcgtatttaacctgaccaacattgaccgctggttcctggtacagattgaagaactggtgcgtctggaagagcaggtggcggaagtcgggattaacggcctgaccccggaattcctgcgtcatctgaaacgcaaaggttttgcggatgcgcggctggcaaaactggtcggtgtggcggaagctgaaatccgcaaactgcgtgacagctatcagctgtggccggtttacaagcgtgtggatacctgtgcggcagaatttgccacggacaccgcctatctctactccacctatgaagaagagtgcgaggcgcagccgaacaacgacaaaccgaaaattatggtgctcggcggcgggccgaaccgtatcggacagggtatcgagtttgattactgctgtgtgcatgcggcgatggcgctgcgtgaagacggttacgaaaccatcatggtcaactgcaacccggaaacggtttccactgactacgacacctctgaccgcctttatttcgagccggtgacgctggaagatgtgctggaaatcgtgcgcgtcgaaaaaccggcgggtgtgattgttcagtacggcggccagactccgctgaaactggcgcgcagcctggaagcggccggtgtgccggttatcggtaccagccctgatgcgattgaccgcgcggaagaccgcgagcgtttccagcaggcggttgtccgcctcggcctgaaacaaccggcaaatgccaccgtctctaatattgagcaggcggttgaacgggcaaaagagattggttacccgctggtggtacgcccttcttatgttctgggcggccgtgcgatggaaatcgtttacgacgaaaccgacctgcgccgttacttccagaatgcggtcagtgtctccaatgacgcaccggtactgctcgaccgcttcctcgacgatgcgattgaggtggatgtcgatgctatctgcgacggcgaacaggtgctgattggcggtattatggagcatatcgaacaggcgggggttcactcgggggattcggcctgctcgttaccggcttacacgctgagtcaggaaatccaggatgtgatgcgcgaccaggtgagaaaactggcgatggaactgcgtgtgcgcggcctgatgaacacgcagttcgcggtcaaagacaacgaagtgtatctgattgaagtcaacccgcgtgcggcgcgtacggtgccgtttgtctccaaagccaccggagtgccgctggcgaaagtcgcagcgcgcgtgatggccggtcagacactggcgcagcagggcgtgacaaaagaagtcatcccgccgtactactcggtgaaagaagtggtgctgccattcaataaattcccgggggttgacccgattttagggccggaaatgcgctcaaccggggaagtgatgggcgtaggacgtaccttcgcggaagcctttgccaaagcgatgctcggcagctcttcctcactgaagaagaaaggccgtgcgctgctctctgttcgcgaaggggataaagcacgggtggtggatctggcggcaaaactgctgaaacagggttttgagctggatgcgacacacggtaccgcgattgtgctgggtgaggcgggtattaacccgcgtctggtgaataaggtgcacgaaggtcgtccgcatattcaggacagaattaaaaacggtgaatacgattacattgtgaataccaccgccggacgtcaggcgattgaggattccaaagtcatccgccgcagtgccctgcaatataaggtgcattacgacaccaccatgaacggcggctttgccaccacactgtctctgaatatggatccgacagagagagtgatttcagtacaggaaatgcacagcctgattattgataaataa

SEQ ID NO: 276076 - DNA, 1137 bp, Morganella morganii
atgaaaaaaaatttaatttccctgcttattatattgcctttatcatacgcaaatgctgatgatagcagcgttttctattatgcaagaacatctgttgatttatctgaatataaaaaggtcactgacagtgatattccggtattaacaaaggaaagcagcactaaattatactttgtggaaaacaattatcagccactgattgtatctgaaatcaaaaatgagtatgaccgtagtgctggtatttcagaggttattcaggtatatgataatttaaacggaaagattaataatacgctaagcagtattgctgaaatgcaggagaatcctcttgcttataataagccattgtttcagactactgatgattttgctcagttaaagcaggacactgataatatcaaaatacagaatgaatctgttattttatctttgggagaactgaatacggatatatcagtagttaaaactgtgaataaacagcaggatgataagctcgaagaacttaattcatcaactgaaaatatgaaaaataatatcagttttttgcttaacagatctattcctgctgataatgaaatttatcagttaaaacaagatagtgagagacataatcaggagatcattaacctggaatctgctatccaactaacagagagtgtgagttttgaacaaggtgatgatattcggaaacaggaaaaaatgctctccgggctgaaagctgattcagacaaactggcaacagatttgaaagatgtgcgtaaaaagagtaatacgacaaccaatgtggcgaatgccaacaaaaaagatattgataaacatacaactaaaatcgatagaaacactctcgatatcctgaagaaccgccaggatcttcgcgcgttggaaaatgatctgcgcgaaaccaatgagcgtcttgataacggcctggcggccagtgcggcattgaatggcttattccagccgtacggtgtcggtaagctgaatatcactgcggcgatgggcggataccagtccactcaggctgtagcagtaggaaccggttaccggttcaacgagaacatcgctgtgaagacaggtgtcgcatacaccggttcgaacgatgtgatgtacaacatggcttttaaccttgaatggtaa

SEQ ID NO: 276077 - DNA, 825 bp, Morganella morganii
atgaacaaacctgcattagttaccttatctgacggacacttaatgccgcaactggggctgggtgtctggaaagccgggaacgacgtggtcggctctgctgtgcagaccgcactcgaaaccggttaccggctgattgatactgccgcgatttatcagaacgaggaaggtgtcggtgaaggactgaaagcgaccaccgttccccgcgacgagttgtttattaccaccaaactgtggaacagcgatcagcaacatgccggtaaagcgctggaagcgagcctgaaaaagttacagctcgattatgtggatttgtatctgatccactggcctgcaccggcagaagaccattatgtctccgcctgggagcagttgattgaattacagaaatccggactgacccgcagtatcggtgtctgtaattttgatatcggccatttgcagcgcattatccacaaaaccggcgtggcaccggtactcaatcagattgaactgcatccactgctgcaacagcgcgagcttcaggcctggaatgcgacccattccattcacactgaatcctggagtcccctggcacagggcggtaacggcgtttttgatactgatgttattcaggcgttagcggcaaaatatcagaaaaccccggcacagatagtgattcgctggcatctggatcgcggattgattgtgataccaaaatcagtcacaccttcacggattcaggaaaactttgatgtctttgatttccgtctggagaaagaagaactctcacagattcagtctctcgattcaggtacccgcttagggccggatccaaaagaatttaattaa

SEQ ID NO: 276078 - DNA, 1158 bp, Morganella morganii
atgaacaacttcactcttttcaccccgacaaaaattcgtttcggcaaaggccaaatcgccaaactcagcagtgaaatcccgaaagatgccaaagtactgatgttgtacggcggtggcagtattaagcgtaacggtgtttacgagcaggtactggctgccctggacggttatgatgttcatgaattttcaggtatcgagccgaacccggcctatgaaacgctggtaaaagcgattgcgtatatccgtgagcatgacatcagctatctgctggcggtcggcggcgggtctgttatcgacggcaccaagtttattgccgctgcggtgaattatccgggcgacccgtgggatatcatcactaccggaggccgcaatatccgcagtgcactgccgattgcctgtgtgctgacacttccggccaccggctctgaaaccaactgtttttctgtggtcagccgccgtgaaaccggggataaacagtcattcgggcacccgctggtgcatccgaagtgcgccattcttgatccgcagaccacttacactctgccgccgcgccagacagccaacggcgtggtcgatgcctttattcataccctcgagcagtatctgacgtatccggtgaatgccaaaattcaggatcggtttgcagaaggtattctgctgacactgattgaggaaggcccgaaagtgctggcaaatccggaagattatgacagccgtgccaatgtgatgtgggccgccacccaggcgctgagcgggctgattggtgccggtgtgccgcaggactgggcaacccacgcgctgggccatgaaattaccgcactctacgggctggatcacgcgcagacactggcgattgtgttaccggcactgctgcgggaaaaacgcaaaaccaagcgcgaaaaattattacagtacgctgagcgtgtctggcatctgacagacggttcggaagagagccggattgagtgcgccattgaagcgacccgtattttcttcgaagagctgggcgtgaaaacccgtttctctgattaccagattgatgacagcggcattcccaaactggttgccaagctcactgaacacggccagaccgcactgggtgaacaccaggacatcacaccggaagtcagtgaacggatctaccgggctgccgtctga

SEQ ID NO: 276079 - DNA, 699 bp, Morganella morganii
atgtctagtttatcagagattgtgagtgcgctctggtctcacgattttgccacactctctaatcccgaagtcctctggctggtttacgctatcctcttcactgttattgtgctggagaacggcattctgcccactgcgtttctgcccggggataccctgcttattttgtcaggcgcactgattgcgaagggcgtgatggatttcctgccgacactggctattctgaccgctgccgccggtatcggcagctggctgggttttgttcaggggcgctggctgagtgataccaaaaccgtcaggcgctggatgacgcagatcccgaaaagttaccatcagaaagccgaagtgctgtttaaccgccacggcctgtatgccctgcttatcggccgcttcctcggttttgtccgtactctgctgccgatgctggccggtctctcctcgctgccgaaccgccgtttccagttctttaactggctgagcggattcctctgggtggcaattattaccaccttcggttatgtgctcaatcagatcccgtttgtcaaagcacacgaaaaaactgtaatgaccgcactgctgctgatcccggtctttttcctgattgtcggtatcgtggcatccctgtatctgttaatccgccactaccgcagacgccgcgccctgctcaaccgcagacgccaccgcgtccataagaaataa

SEQ ID NO: 276080 - DNA, 909 bp, Morganella morganii
atgcgtaatttgaccgtttctgtgctattggcattatgtttaaccggcagtgcattcgcagataacactgcagctgtcacaccagcgacaacaacacctgtcaccgcgccggcagcaaccgccggtcagcctgctcagacgcctgaaccaccggcggccccggtatccgcgacagaggttcctgttcaggaaatcagcgcagcaccggcagacggtaaccgtggctttgcggctgagctgtctgtgatttccatgtatcagggcgcggatgttattgttaaatcggttatgataggccttattatcgcctcagtgattacctggtccattttctttgccaagggcgctgatcttatcgcttcccgccgccgtatccgccgtgaagcggcagcaatcaaagatgcccgctcgctggatgaagcggctgcgattgccgatacattcgggaaaaagagtgtcacccggatgttggtgcttgatgcggtaactgagcggactgcatcagaaaaaagccgtgatctgagcggcatcaaagaccgtgtggcatttcgccaggagcgtatcgttgccggtgttgcccgtcatatgggacgcggtaacggctatctggccactatcggggctatttcaccgtttgtcggcctgtttggtaccgtatggggtatcatgaacagctttatcggcatcgcccactcacagaccaccaacctcgcggttgtggcgcccgggattgcagaagcactgctggcaacggcactgggtctggtcgcagcaatccctgcggtcgtgatctacaacatctttgcccgtatgatttccgcttaccgtggtgacctgggtgataccgcagcacacactattttatggctgggccgtgatctcgacctggcagacagcaaagcagggtaa

SEQ ID NO: 276081 - DNA, 423 bp, Morganella morganii
atggcaatgcgtcttaacgaagagtcggatgacagcggcgaattgcatgaaattaacgtcacaccttttattgatgtgatgttggttctgctgatcatctttatggtggccgcaccgctggcgaccgttgatattaaagtgaatctgcctgcctcaacggcaaaaccacagccgcgtccggaaaaaccggtcttcctgacagtgaaagcggataaccaactgctggtgggcgagcaggaagtcacgaaagaaacactggctcagatcctggatcagaccacggaatccaataaggaaaccacgatcttcttccaggcagataaaacagtcgattatgaaacgcttatgggcattatggatgctctgcgcaaagcgggatatctgaaagtcgggttagtgggtatggagtctgcagagaaataa

SEQ ID NO: 276082 - DNA, 1182 bp, Morganella morganii
gtggatatttatctggtcggcggcgcagtccgcgatgccctgctgggtctgcctgtctcggacagagactgggtggttgtcggtgccaccccggagatgatgctggcgcgcggctatcagcaggtcgggcgtgatttcccggtatttctccatccggatacccgggaggagtatgcgctggcacgaacagagcggaaaaccggggccggatataccgggtttgcctgttacagtgcgccggatgttacgctggaagacgatttacagcgccgggatctgaccatcaatgctattgcccaatcatctgacggcacactgcatgacccgtatcacggggcagatgacctgaaaaaccgggtgctccgccatgtttctgcggcgtttacggaagatccgctgcgcgtgctgcgcgtggcgcgctttgctgcccgtttcgccccgcagggatttgttattgcaccggaaactctggcactgatgtctgctatcacacagcagggagagcttgcccatctgacggcggagcgggtctggaaagagacagaaaaagccctgaacagcccgtgcccggatatctattttgcggtactgcgtgattgtggtgcactggcggtgctgtttccggagctggaagccctgttctgcaccactgacgggcagacaggctatgacatcctgaccgccgcactcctgcgccggacagtgcttctgactgacagcacagatatccgctttgccgcgctgtgcctttacctgagctgtcacagtatcgccgaaggaacagccgcaattcagaagatgtctgagcgcctgcgggtgccgaatccggcacgggatctggctctgcttaccacccgcgattaccggactgttcatgatatcagccatctggccgcagacaatatcattgccctgtttgattcactggatgcctggcgcaagccggatcgcatcactcagttggctatcctttgcgaagcagatcaccgcagccgggttgcgcctgacgcagcagattatccgcaggggcagttactggctgaggccttcgcgcttgcacagcaggttgccgtcaaaccggtgattgaggccggttttaaaggcgcggacatcaaagcggaactcacccgccgccgcgctgaagccatcagagagtggcaacaaaaaaaccgttcatcatga

SEQ ID NO: 276083 - DNA, 624 bp, Morganella morganii
atgacgatgaaaaaactcgccttactccctttgctgtttgcagcaaccgtcagcattaccgcccatgctgaagaaatccgttatgtctctgatgacctctccacctatgttcacagcggtccgagcaaccgctaccgcattgccggctcacttaattccggagaaaaagtcaccgttcttgatgtgaataatgagagcggttttgtccgtgtccgtgacagcaaaaaccgcgatgtctggttaccgaaagagctgctgagcaccacaccaagcctgaaagaacgcgttccggccatggaagaagaaattaaaacactgcgcggcaaactcgccaatatcgacggcacctggaacgacaaaacggcggacatgcaaaaccgtgtggccgccagtgatgatatcattaataacctgaaaaaagagaatgacagcctgcgtaatcaggttgtggtcgcaaagaaaaaactggatgccatcagtgtgcagttggatgacaaacagcgcgatattatcctgcaatggtttatgtacggcggcggcgtagccggtgccggtctgctgctgggtctgctgctcccgcatatgatcccgcgccgcaagaaaaaagatcgctggatgaactga

SEQ ID NO: 276084 - DNA, 969 bp, Morganella morganii
atgagcgattacgaaacagaactgaaatttgcggtaaaacaggaagccatcacggcggtgatcgccgcgctgaccgcctttcctcatcagcatttccgtgctgtccgcctgaccaacagctattttgaaacagctgacgacacactgcggcagtgggatatgggactgcggatccggggatgtgacaccgaatatgaaatgaccctgaaaactgccggaaatgatatcggcggtttgcatcagcgtcccgaatataatattccgctctcccgcccggaactggatttagcggcactgcctgctgatgtctggccgccggaaacggatgtcgcggcgctgcagtcatcactgcaggcccgttttaccacggatttcgcccgtgaaaagtggctgctgacggtcaatcacagtgtggtggaagcggtgctggatcagggcagtgtggttgccggtgaggcagaatgtcctatttgcgaatttgagatggagctgaaagaggggacagccgctgatttgctgacagccgccaaagccctggcggaattgccggggctgcgccttgccgggcgcagcaaagcggcacgcggctactggctgtcacagggagcaccggtaccggaactgcctgagctgttcacagagtgggatccgcagaccccgctgaccgatgtggttgtccgtctgatcaaacagtggcagagcctggaagaagcctggctgctggatgcggacggtgcattaccggcattgcagcaaaccatttctctgctgctgacactggcggaccactatcccggcgcagtgcctgattttgtccgtgactgcccgctgccggaggtggcatcggcactggcggaagcggatgcaaaatctgcggatgtctgtttcagtccggtatggttgcagtgtaaactggctttcacgcaatgggttttcgcactgtggatggcggctcctgccatgccgtaa

SEQ ID NO: 276085 - DNA, 2829 bp, Morganella morganii
atgctgccgctgaccccgatactccggcaagccgctgagcgggtaaccgcccggcttgataccggactggtgccgtattctgaacaggaagagctgatttttgccggcagtgattttgtggcggagcagtgtatccgccacccggactggctctccgccctccgcgacaccccaccgcagccggatgaatggcaggattatgccgcccggctgacggatatgatggcggatgccgcacaggaagaggatgtgatgcgggtgctgcgcttgttccgttatcaaatgctgatgcgcattgccgtcatgcagatcctgcgccggagcacgacagaagagacactgcgtcaactcagtgaactggcggaagtgctgattatcgccgcccgtgactggctttatcagcgctgttgtgcggactggggcacaccctgttcggcagacggcagcgcaatgccgcttctgatcctcgggatggggaaactgggcggcggcgagctgaatttctcctccgatattgatcttatttttgcttatccggaaaatggtgtcacacagggtggccgccgcgagctggaaaacgcgcagttctttacccgcctgggacagaaaattatcagaatgctggatcacgccacggcggacgggttcgtctaccgcgtggatatgcgcctgcggccattcggcgacagcgggccgctggtgttcagtttctccgccctggaagattattaccaggagcagggacgcgactgggaacgctatgcgatggtcaaagcgcgtatcctcggtcgtgatgattctgcttacagtgagacgctgcgccggatgctgcgtccgtttgtttaccgccgctatatcgatttcagtgtgatccagtctctgcgcaatatgaaaggtatgattggccgtgaagtccggcggcgcgggctgaccaacaatattaaactcggcgccgggggcatccgggaagtggagtttatcacccaggtctttcagttgatccgcggcggacgtgagccgggattacagacccagtccctgcatgcggcgctggcggaaattgcccgtctggggctgctcggtgaggagccggttgcgcagttgctggatgcttacgcgtatctgcggcggctggaaaatctgctgcaggccattaatgacagccagacacagacgctgccggactcaccgctggatcaggcgcggctggcacaggggatggattccgcttcgtgggcggatctggaaacagtgctgaacagtaaaatggcggcagtgcaccagatttttaccgatcttatcggcgaggatgatgaggaaagtgaggatgaaaccgccttacagccgtttatctcgctgtgggagagtgagccggaactgactgatatcacctctctgttttccctgaatgaagaagatgccactcagtttcttaccggtttacaggggttccggcaggatctcggcaaacggaccatcgggccgcgcggacgggatgtgctggatcacctgctgcccaaactgctggcgaaactgctgtcccagccggatgctcagcgggtgttgcagcgtctgacgccgctgctgctcagcattgtcagccggacaacctatctggagctgctgctggaatccgatgtggtactgacccatgtggtgcggttgtgtgcggcatccccgatgattgccgtgcagctggcgcgccatccgctgctgcttgatgagttactggatccggcctcactctatcagccgctgccgctgaatgcgtaccgcgatgagctgcgccagtatctgatgcgggttccggaggatgatgaggagcagcagcttgaggcactgcgccagtttaaacaggcgcagttgctgcggattgcggcggaagatatcaccggtgtgctgccggtgatgaaagtgagtgatcaccttacctggctggcagaagcaatgatcggcgctgtggtgcagcaggcgtgggggcagatggtcagacgttacggcgagcctgcgcatctgacccgcgacggggacaaaggttttgcagtgatcggctatggtaagctgggcggctgggagctgggttacagttctgatctcgacctggtgtttttgctggattgcccggaaggcacacaaaccaccggcccgcgtgaaatcgacgcgcggcagttctatctgcggctggcgcagcgcattatgcatctgttcagcacccgcacatcatccggcgtgctgtatgaggtggatgcccgtctgcggccatccggggaagccgggatgctggtcagcacgctggaggcatttgcggattaccagcagaacagcgcctggacctgggagcatcaggcgctgatccgtgcccgtcaggtgtacggagatgaggcgattgccgcccgctttgacagcatccgccgtgatattttgtgccgtcagcgtgataacgcacagctgaaactggatgtccgtgagatgcgcgaaaaaatgtatcagcatctcggcagccgtgatgacagcgtgtttaacatcaaaaccgatccgggcgggatcacggatattgaatttatcgcccagtatctggtgctgcgttttgcgccggagaataaagcgctgatccgctggtctgataatgtccggatttttgagctgatggctaattatgatgtgatgccggaagaggagtcactgcggctgacagcggcctatattatgatgcgcgacaggctgcatcatctttctttgcaggataaatccggcgtggtgccgctgacggaattcgccgctgagcgcgaatttgtccgcgcccgctggcagcactggctcggggaataa

SEQ ID NO: 276086 - DNA, 1428 bp, Morganella morganii
atgaaagtaacactcccggattttcagaatgccgcagttttagtcgtcggtgatgtgatgttagaccgttactggcacgggccgaccagccggatctccccggaagccccggtaccggtggtgaaagtcactgaaattgaagagcgtcccggcggcgcggcaaacgtggccatgaatatcgcgtctctgggggcaaattcccgcctcgtggggctgaccggtattgatgacgcggcccgcgcactgactgagcgcctgaatgatgtgaaagtccgctgtgattttgtcggcctgccgacacacccgacgatcaccaagctgcgcgtcttatcccgcagccagcaactgatccgcctggattttgaagaaggtttttcggatgtcgatccgcagccgatgcttgagcgtatcgcacaggcactgccgcacatcggtgcgctggtgctgtcagattatgccaaaggcgcactggcgcatgtggaagagatgatcgcactgacccgcaaatccggtgtaccgattctgatcgacccgaaaggcacagattttgcccgttatcgcggcgcgaccctgctgacaccgaatatgtcagagtttgaggctgtggccgggaaatgcaccgataatgctgatatcgaagaaaaagggctgaaagttatccgtgatttcgatttgcaggcactgctggtgacccgctccgagcagggcatgagcctgctgcgtccggggcagcctgccctgcatctgccgacacaggcgcaggaagtgtttgatgtgaccggtgccggggacacggtaatcggtgtgctggcaacctcgctggccgccgggaaaaccctggacgaatcctgtgcgctggccaatgccgccgcaggtgttgtggtcggtaagctggggacatccaccgtatcaccggttgagctggaaaatgccgtacgcggccgcagtgataacggctttggtgtgatgactgaagcagaactgcatcaggcagtggcggatgcccgtcagcgcggcgagaaagtggtgatgaccaacggctgttttgacattctgcacgccgggcacgtctcttatctggccaacgcccgcaaactgggtgaccgcctgattgtggcagtgaacagtgatgcctccaccaaacgtctgaaaggcgaaagccgtccggtcaacccgctggatcagcggatgattgtgctcggcgcgctgggtgccgtggactgggtggtaccgtttgaggaagatacgccgcagcgtctgattgcctctgttctgccggatgtgctggtgaagggcggggattaccgtccggaagagattgccggcagtgaggaagtgctggctgcaggcggggaagtgaaagtcctcaattttgaggatggcatttccaccaccaatatcatcaatacgatcaataaatcaaagtaa

SEQ ID NO: 276087 - DNA, 261 bp, Morganella morganii
atgattgacccgaaaaaaattgaacagattgccacacagctgcaaagcgcgctgccgaaaggtgtgcgggagatcggagcggatatcgataaaaagatgcgtgccattttacagtcacagctcggcaagctggatttagtcaaccgcgaggagtttgatgtgcagactcaggtgctgctgcgcacccgcgaaaaactgtcgcagatggaaaaacgtctggctgagctggaagcgcgcctggcggaaaaaggcggcgagtaa

SEQ ID NO: 276088 - DNA, 654 bp, Morganella morganii
atgaatcagacgctgttatcagattacggcaatccgattgaacgtgcagaacgtgccattgaagctatccgtcagggacggggtgtgatggtactcgatgatgaaaaccgcgaaaacgaaggcgacatggtgttcgccgccgaaaccatcaccgttgagcagatggcactgaccatccgtcacggcagcggtattgtgtgcctgtgcctgactgacgaacgccgtcagcagcttgagctgccgatgatggtggagaacaactccagccagttcaaaaccggctttaccgtcacgattgaagccgcacacggtgtaaccaccggggtgtctgcggctgaccgtgtcaccaccatccgtgctgcggtggccgatggcgctgttccggcagatctgaaccgtccgggtcacgtattcccgctgcgcgcgcagaacggtggtgtgttaacccgccgcggtcataccgaagcctctgttgacctggcgacactcgccggtctgaagccgtacggtgtgctgtgtgaactgaccaacgatgacggttcaatggcccgcgcaccggaagtgattgtgtttgcaaaagcgcatgatatgccggttgtgacgattgatgacctggtgcagtaccgcgaacagttaatggcgaaagcgggctga

SEQ ID NO: 276089 - DNA, 135 bp, Morganella morganii
atgatgaagttattcaaaaaatatgacaggagtgcggatacaaaaatgccgctgtgtcagcagcggcattctcaggatttcagtcttgttcagttactgaccctgtctgtgatgtcagcccgctttcgccattaa

SEQ ID NO: 276090 - DNA, 780 bp, Morganella morganii
atgaaacgattaccggctctgtttgcgggtcacggcagcccgatgaatgtcctggaaaccaaccgttataccgaaacctggcggcaactgggagaggagatgccgcgtccgtccgctattctggtgatttccgcgcactggtatacacagggggcgtggctgacatcagccacacacccgcgcaccatccatgattttcgcggttttccgcctgcactgcatgagactgaatatccggctcccgggtcatctgcactggtagcgcgggtaaaagatctgctcagtgatgatcatatcggtgaagatcacggcgaatgggggttagatcacggcagctgggggatcttagtgaaaatgtatccggatgcggatatcccggtggtgcagctcagcctcgacggcagcaaaccggcgcaatggcattatgataccggacgtaaactggcggcactgcgtgatgaaggtgtgctggtgctcggcagcggcaatgtggtgcacaatctgcgtgagatggactggcagaatgcacaggccgaaccgtatccgtgggcgctgagttttaataatttcgtgcgcgataacctggagagtgacacccggccgcatccgctggtgaatgcgcttgagcgcgaagacggcaaacggtcgaatccgtcgccggagcactatctgccgctgctctatattctcggtatgcggaagggcagcgagccggtcaccgtaccggtggatggtattgaatccggctcactgagcatgctgacagtcaaagtcggctga

SEQ ID NO: 276091 - DNA, 1161 bp, Morganella morganii
atgaaacgcgtagcaattagcgagcgccctgactggcgcagtaaagccgaggaattcggctttcattttcatactatgtacggcgagccgtactggtcagaagatgcctgttatcagttttctatggcacaaatcgatgaaatcgaggaagtgactaacgaactgcatcagatgtgtcttcaggtggtggataaagtcacacaaagtgacgagctgatggcccgctttcaaatcccgaaacactgctgggatttcgtgcgtgagtcatgggcaacccgccagccatcgctttattcacgcctggatctggcctatgacggcgttaacccgccgaagttactggaaaataatgcggatacaccgacatcgctgtatgaatccgctttctttcagtggatctggctggaagaccagattgccgccggtaacctgccggaaaatgccgatcagttcaacggtatccaggaaaagctgattgagcgtttcggagtactggcggaagagtacgggttccgttatctgcacatggcctgctgtcaggattccgtggaagatcgcggtactatccagtatttgcaggattgtgcacaggaagccggtgtcaccactgattttctgtttatcgaagatatcgggctgggcgatcgcggtgagtttactgatcttcaggatcagattatcagcaacatgtttaaactctatccgtgggaatttatgatgcgggagattttctccaccaagctgacagacgccggtgttcgctggctggaaccggcctggaagagcatcatctccaacaaagccctgctgccgatgctgtgggaaatgttcccggatcacccgaacctgctgcctgcctattttgcggataaaccgtatccggaaatggagagctacgtcatcaagccgctgttctcccgcgaaggtgccaatatccgtattatcgaaaacggcaaagaaattgccgccgcggacggcccttacggcgaagaaggcatgattgtccagcagttccattccctgccgaaattcggcgacagctatacccttgtgggcagctggctggtgaatgatgaatctgccgggatctgcatccgtgaagataaagagcttatcacccaggatctttcccgtttctatccgcatgtcattattgactga

SEQ ID NO: 276092 - DNA, 675 bp, Morganella morganii
atgacaatgaaacgcaccaagaatattaaccgcgacgctttccgcaaaacctggcgtcagtaccgcctggcacctgttgcggctgctgtcggcgctgttctgatgttaaccgcctgcgatgaagccgatgaaaccgttgcgctctacaccaccgcagagcaatgctccgccgcgaacccgtcacaggccggtgaatgtaccactgcctataacaacgctctggaagaagcagcaaaaactgcaccgaaatatgccacccgcgaagattgtgtggcggaattcggtgaagcccagtgtactcaggcaccaacagagctggcgaacaacagccagcagcagcctgcccaggcatccggcagcttctggatgccgctgatggccggttatatgatgggccgtatgatgggcggcggtgccgcagcctctcagccgctgttcacttcccgtaacccggcaagcccggctaacggcaagtttgttgatgccaccggtaaaaactacggttctgccaccggcggacgcagcatgacagtaccgaaaacagccatggcaccaaaaccggccaccacaaccaccaccacacgcggcggcttcggtgacagcgtggcgaaacagaacaccatgcagcgctcatccggcagcagcaattcatcctcccgttcaatgggcggctga

SEQ ID NO: 276093 - DNA, 1365 bp, Morganella morganii
atgaagaaactgctttctcttctcattgctgtgagtgtggcaggtttcagctctgtcacccaggctgaagacctcctgcaggtttatcaaaaagcgaaagagactaacccgaccctccgtcagactcaggctgaacgtaaccaggctttcgaaaaaattaacgaagcccgcagtccgttactgccgcagttaggtttaagcggaggttatgactataacaccggttaccgtgataacagtaaccagagcaataatgcactgaatgcacagctgaaactgactcagacaatttttgacatgagcaaatggcgtcagctgaatctgcaggaacaaactgccgggatcagtgacatcacattccagagtgcccaacaacagctgattgtggataccgccgttgcttactttaatgttctgcgcgcgctggataccctgtccttcgtacaggcacagaaagaagccgtctaccgccagctggatcagaccactcagcgtttcaatgtcggtctggtagccattactgacgtacagaacgcccgcgctaactacgacagtgttctggctcaggaagtcgcaggccgtaatgatgtcgaaaacgccattgaagcactgcgtcaggtgagcggtatttattacagcgaattagcttccctggatgtgaaccgctttaaaaccaatgccccggatgccatcgaagcactgctgaaagaagcacaggaacgtaacctcaatctgctgagtgccacactgagccgtaacctggcgaaagagcaaatcagcctggcagaatccggccactatccgactgtgaacctgagtgccggcacaggcgtaaccaacaccgattacagcggcaacggctaccctaacggtcgtccggataacagctatgcaggtcagagcaccatcggtgtgaacgtcagtatcccgctgtacaccgggggtgctgtgtcatcacaggttgatcaggctcagtacggctataccgctgccagcgaaaaactggaagcgacactgcgtcaggttgttcagaccacccgctcttcttacaacaatatcaacgcctcaatcagcagcgtgaacgcctacaaacaggttgtgacctctgcggaaagctcactcgatgcaaccgaagccggttatcaggtgggtacgcgtacgattgtggatgtgctgaacgccaccactaccctgtatgaagcgaagaaaagcctgtccaacgcccgttatgactatctgattaaccagctttatatcggtcaggcacgcggtacgctgaatgaagacgatattctgcgcctcaaccaggtgctgggtaaaactatctccacatcaccggcttccgtggctccgaccacccgctga

SEQ ID NO: 276094 - DNA, 639 bp, Morganella morganii
atgaaacacacatccggattaccttttgcgttcagcagcgatgacgtggagataatcagtaagaaaaccctgttttcaggattttttaagattaatgaataccgtttccgtcaccggttatttgagggcggctggagtccggaaatccgccgcgaggtcttcgaacggggcaatgccggagtgattttgccgtatgacccggttcgtgatgaaattgtgctgattgaacagattcgtctgccggccaccgaaagcagtcagacaccctggctgctggaagctgtggccgggatgatcgataaaagcggggaatccgccgaagatgtggtacggcgtgaagcggaagaggaagcggggctgaaaatcggccgctgtacctttgcactgagctatctttcaagcccgggcgggacgtcagagcggatgtatgtgtatatcggcgaggcggataccacagcggcgggcggggttcacgggctggcgcaggagaatgaggacatccgtgttcatgtggtcagccgggaacaggcgtatgaatgggttgaaaaaggtgtgatcgataacgcagcaactgtcattgcaattcagtggcttacactgcactatgaacgcatacgcacaacgtggcgggataaataa

SEQ ID NO: 276095 - DNA, 834 bp, Morganella morganii
ttggaaaccccgttgcacttgcccgtggctgacggcgctgcggtcagaattttacagattaccgatacgcatctttttgccggcgaaaccgacacgctgctgggcattaataccctgcacagttaccatgccgtgctggatgctatcgtaaaacagcagttaccggccgacctgattgttgccaccggtgatctggttcaggatcagagcacccgggcctatcagcggtttacggacggtattgcccgtttaccggcgccgtgtgtctggctgccggggaatcatgattaccagccgtccatggcgcaggaactggccgccgccggtatctctccctccaagcaggtgctgctcggggatcagtggcagatcctgctgctcgacagtcaggttcagagtgtgccgcacggcgaactgagtgatgaccagcttatctggctggataactgcctggcgcagcagcctgaccgccatactgttgttatgctgcatcaccatccgctggcatccggctgtacctggctcgatcagcacagcctgcgcaactcgcatatgctggctgaggttctgacccgctatcagaatattgaaggtattttgtgcgggcatattcatcaggatctggatgtgatgtggaacggtatccgcatgctggccacgccgtcgacctgtgtccagttcaaaccgcactgtaccaattttacactggataccgccgctccgggctggcgttatctggagctgaccaccggtgataatccgtcgctgaccacgcagctgttccggctggatacggatgaattcagccccgacctgggttcggacggttactga

SEQ ID NO: 276096 - DNA, 579 bp, Morganella morganii
atggcgacgctcctttatctgcacggcttcaacagttccccgttgtcagagaaagggacgatgctgaaagcgtggctggctgagcaccatccggcgatccggatgttacagccgcagatcccctgttatccggatgaggctgcactgtttctggaagatctgatgaactcgctggccggtgagaccaccggaattgtcggatcatcgctgggcgggtattttgccctctggttgtcacaggcgtttgatgtccccgctgtggtggtcaatccggcagtatatccgtttgatctgcttcaggattatatcggggaaaatcaaaacccctacaccggcgagcgttacacactcgaaccgcatcatatgcaggatttacgggcgatttttgccgatcctgtcgaatcaccggatttgatctggttattgcagcagaccggcgatgaagtgctggattaccgccaggcggtcacccatctggtggcatgcaaacagacgattgaacccggcggaaaccatgcctttaccggatttcagcgctattttccgcagataattgagttcctcggcctcggccattaa

SEQ ID NO: 276097 - DNA, 1896 bp, Morganella morganii
atgacgcaatcatcttataacgcagaggatattgaagtcctcagtggtttggagcctgtccgccgccgtccgggtatgtacacggacacgacgcggccgaatcaccttgctcaggaagttatcgacaacagcgtcgatgaggctttagccggtcacgctaaatctgtcgaagttattttacataaagatcagtctgttgaagtgattgacgacgggcgcggaatgccggtggatatccatccggaagagaaagtctctgcggtcgaactgatcatgacccgcctgcatgccggggggaagttctccaataaaaactatcagttttccggtggtcttcacggggtaggtatttccgtggtcaatgcgttgtcaaaacgcaccgaagtgactgtccgccgtgacggacaggtttatcagattgcctttgaaaatggtgacaaagtcagtgaactggctgtcatcgggcagtgcggcaaacgcaacaccggtaccagcgtgcatttctggccggatgagcagttttttgacagtccgcgcttctctgtctcccggctggtgcatctgctgaaagccaaagccgtgctgtgcccgggtgttgagatccttttcaaagataatgtgaacgagaccgaacagcgctggtgctaccaggatggcctgaccgattacctgatggaaaacgtcaacggcctggtcactctgccggaagcggcgtttaccggcaaacatgccggggacaacgaagaggtggactgggcgctgctgtggctgccggaaggcggcgaactgcttaccgaaagctacgtcaacctgatcccgaccccgctgggcggtacccatgccaatggtctgcgccaggggctgctcgacggtatccgcgagttctgcgaattccgcaatatcctgccgcgcggcgtgaagttatccgccgacgatatttgggagcgctgtgcctatgtgctctccgtgaaaatgcaggatccgcagtttgccggtcagaccaaggaacgtctctcatcacgtcagtgcgcggcatttgtcagcggtgtggtgaaggatgcattcagtctgtggctcaatcagaacgtacaggctgcggaacagctggcggaaatggcgattgccagcgcccagcgccgtctgcgggctgcgaaaaaagtggtgcgcaaaaagctgacgtcaggtccggctctgccggggaaactggcggactgttcatcccaggatctgaatcagaccgaactgtttctggtggaaggggactcggcgggcggttcagccaaacaggcgcgtgaccgcgaattccaggccatcatgccgctgcgcggtaagatactgaatacctgggaagtgtcgtctgatgaagtgctggcgtctcaggaagtgcatgatatttccgtggctatcggtatcgatccggacagcgatgatttaagcaccctgcgttacggcaaaatttgtatcctcgcggatgcggactcggacgggctgcatatcgccacgttgctgtgcgcgctgtttgtgcgtcacttcccggcgctggtgaaagccggtcatgtctatatggctatgccgccgctctatcgtatcgacctcggtaaagaggtgtattacgccctcgatgagagcgagaaaaatgcgattctggataaattaagccgcaagcgcggcaaaccgaatgtgcagcgttttaaagggctgggggaaatgaaccccggtcagttgcgtgaaacgaccctggatccgaatacccggcgtctggtacagctcactatcagtgaggaaaactatcaggaaacgatgtcggtgatggatatgctgctcggcaagaaacgtgcggaagaccgccgtaactggctgcaggaaaagggtgatcgggtggaattggatgtgtga

SEQ ID NO: 276098 - DNA, 2262 bp, Morganella morganii
atgagtgaaataactcatgacggtgtggagcgccaggcgcttcataattttacagagaatgcctacctcaactattccatgtacgtcatcatggacagggcactcccttttatcggcgacgggttaaaaccggttcagcggcgtatcgtgtatgccatgtctgaactggggttaagcaactccgccaaatacaaaaaatccgcccgtactgtcggtgacgtgctgggtaaataccatccgcacggtgacagcgcctgttatgaggcgatggtactgatggcgcagccgttctcttaccgctacccgctggtggacggacaggggaactggggggcaccggatgatccgaaatccttcgccgccatgcgttataccgaatcgcgcctgtcaaaatatgcggaagtgctgctcagtgaactggggcacggcaccgcagactgggtgccgaactttgacggcaccatgcaggagccgaaaatgttaccggcgcgtctgccgaacattctgctcaacggcaccaccgggattgcggtcggtatggcgacggatattccgccgcacaatgcccgtgaagtgaccggtgcactgctggcgctgatcgacaagccgtctctgtctctcgaagaggtgatggcgtttatccctggcccggattacccgacagaagcggaaattatcaccggaccggaagatatccgtaagatctataaatccggccgcggctctgtgcgtatgcgcgccgtgtggacaactgaggacggtaatgcggtgatcaccgcgctgccgcatcaggtttccggcgcgaaagtgctggagcagatagctgcacagatgcgggcgaaaaagctgccgatggtggaagatctgcgcgatgaatcggatcatgaaaatccgacccggctggtggttgtgccgcgcagtaaccggatcgatcttgagcaggtgatgactcacctgtttgcgaccacggatctggaaagaagctaccgtatcaacctgaatatgatcggtctggacggacgtccggcggtcaaagggctggttgagatcctcaatgagtggctggtttaccgccgcgaaacggtgcgccgccgcctgaatcaccggctggaaaaagtactgcgccgtctgcatattctcgacggtttgctgctcgcgtatctcaacattgatgaagtgattgaaatcatccgttcggaagatgagccgaaaccggtactgatggatcgtttcgggctgagtgatactcaggcagaagcaatcctcgaactgaaattacgtcatttagccaaactcgaagagatgaaaattcgtggcgagcaggatgaactggccaaagagcgtgataaattacaggctatcctcggctctgagcggcgcatgaacacgctgctgaaaaaagagcttgaggaagacgctaaacagtacggtgacgatcgccgctccccgctcaatgagcgcgaagaggcgaaagccatgagcgagcatgacattctgccatccgaaccggtgacggttgtgctgtcacagatgggctgggtgcgcagcgccaaaggccatgatatcgacccgtccggcatgaactacaaagcgggtgataccttcctcggtgcggcacggggtaaaagtaatcagccggtggtattccttgattccaccggtcgcagttactcgctcgacccgctggaactgccgggtgcccgtggtcagggcgagccgctgaccggcaaactgacaccgccgccgggcgccgtgtttgaacaggtgctgatgaacgatgaaaatcagaagtacctgatggcctcggatgccggttacggctttatctgtacattcagtgacctggtcgcgaaaaacaaagccgggaaagtactgatcacgctgccggataacgcgaaagtcatgacgccgattgaggtgaatgacgaggaaaacgaccttctgctggcagtatcacaggaaggacggatgctgctgttccctgtcggtgacctgccgcagttgtcaaaagggaaggggaacaaaattatctccattacctctgcggcggctgcagccggggaagacggcctggcacatctgtttgttatccgcccggatgccagtgtgacactgcatttcggtaagcgtaaactgatgctgcgtccggaagatctgcagaaattccgtgctgagcgcgggcgccgtggtacggcactgccgcgcggtatgcagaaaaagatcgaacggattgatatttctgaaccagagccgaaggcgtaa

SEQ ID NO: 276099 - DNA, 747 bp, Morganella morganii
atgttagccattttacgtatcatcatcgttattttttattgtattttcggtagtctggccggcattcttatctgcctgaccagcccgcgtaacccgaagcatgtgatgactttcggccgcatgtacggcaagctctctcatgttttcggcatcaaaatggtgtaccgcattccggaagaagcgaaacactacggttcctgtgtgtatgtgggcaaccatcagaacaactatgacatgatcaccatgtcgaatgcggtgcagccgcgcacggtgactgtcggtaaacgcagcctgatttggatcccgtttttcgggcagttgtactggatttcggggaatatcctgattgaccggagcaaccgcagcaaagcccataacaccattacccaggtggcggatcagatcaaaaagcgcaatatctctgtctggatgttcccggaaggcacgcgcagccgtggccgcggtatgctgccgtttaaaaccggtgctttccacgcggcaatggccgctggtgtgccggtggtgccggtatgtgtgtccaccactcaggggcgtattaaactgaaccgctggaataatggtgtggtgattgtggaaatgctgccgccggttgatacctcaaaatatacccgcgaacaggtgcgtgaactggccgaagattgtcgccagatgatgatcaaacgtatcgcggagctggataaggaagtgattgaaatggaaaaacaaaagggtcgtaaagacgcttga

SEQ ID NO: 276100 - DNA, 1428 bp, Morganella morganii
atgaccctgagtcggcgccggtttattcaagcatccggcttagctgtgtgtttaggctcactgcctctgtctgtccgcgcggcagatgagggcggcagtcaaccgttacctgttccgccattgctggaaagccgcaacggacagccgttatttctgacgatgcagcgcacacactggtcatttaacggtaaaactcaggccagtgtctggggctttaacggccgttatctcgggccgactgtccgcgtccgtaacggcgatgacatcaaaatgatttacagcaaccgcctgtcagagccggttgcggtcaatgtcagcgggctgctggtgccgggaacggtcgccgggggtgccgcgcgtctgatttcgccaaatactgactggtcgccggtgatcccggtgcgccagccggctgcaacctgctggtatcatgccaataccccgaaccggatggcgccgcacgtttataacgggctcgccggcatgtggattgtggatgatgaggaaagccgtaatctgccgctgccgaaagagtacggcgtcaatgatttcccgctgatcattcaggataaacgcctggattccttcggttcaccagagtaccgcacagaaagtgacggtatgtttatcggtgaccggctgatcgtcaacggtgcggaagatccgtatctggaagtgtcgaaaggctggatccggctgcgcatggtcaatgctgcaaacgcacgccgctttgaactgaaactcagtgatggccgtccgttctatatgattgcctctgatcagggcctgctgccgtcaccggtggcggttgaggtgctgtccctgtcgccgggtgaacgacgcgaagtgctgatcgatatgtcaaaaacagaaacactgactatcacggccggggaatccgctactctgacagagcgttttaaaagtctgtttgagacatcaaacacactggtgaataccaatgtgctgactatccgcgcaaccggcctgatctcgctggtaacggataacctgccaaccaccctgattcaggatccgacacagatcacgaccggtgtccgtaaccgcgatgtgtcactcagtctgtcaccgccggggattaacggcgcaatgtgggatatgagccgcaccgatatccgcacacagcagggcaactgggagcgctgggttgtcacaactgatactccgcagccgttccatatcagcggtgtccgctttaaggtgatcaaccataacggccagtcaccgcagccgcaggattacggctggaaagacactgtctggattgacgggcgcagtgaattgctggtgcagatgatgcagccatcgtattctcacttcccgttcttctattacagccagttcctggagcaggcggacagaggggttaccgggcagttggaaatcgagccgtcttctcagtattaa

SEQ ID NO: 276101 - DNA, 765 bp, Morganella morganii
atgattatgataatgaaaacagataaatacacttttcagccggaatttcagaatgtgatacaggatgcagtacagtccctgtgtactgcactgccgggtattctgcacagcatctatgtttacggcagtgtggctgaaggccgcgctgtcccgggccgctctgatctggatctgaccctggttttgcaccggccgctcagtgcggcggaaaaaaccattctccgttgtctggacaaagcactgaccgcgcgtcacagcagtgtgtcaaaaatcgggtttgataccggcctgctgtcagaagtgacctctgcggaagaacagccggtctgggcttactggctggcacacttttgcctgccggtctggggtgatgacctgacactgaaactgcctgtcgtgacactgaaccgtgagattatacacggcattaacggtgattttccggtactcgtccgtaccaacctgatgcagttacagaaaagcccgcctctgactgagatccggcggataaaacgggaaaccgcgcggcgtctgctgcgtgccaccgccctggtgtggaatgactatgagacctgcacttacccgctgccgctgccgcagatggccggaaaagcgattgcgctgtatccggaaaagcgccacgcgatcaccttcctgctggggcagaccgaagaaccggataccggcatcattcagtttatcgcggttgccgggacattctcccgctggctgcgggatgaggaaaaacggctgctgagccgctga

SEQ ID NO: 276102 - DNA, 615 bp, Morganella morganii
atgtatgacgccactctgatggtcaccaccatcgctgcgctcggtatgatttccccgggcccggacttctttctgattgtgaaaaacgcagcccgttaccagcgtgccgccgccatgatgaccgcgctgggcgtgctgtccgcgatagctattcacatgacctactgcgtggccgggcttgctgtgatcatcaccaccacaccgtggctgtttatgatcctcaaatatgccggagcggcttaccttatctggatagggatcaacagcctgctggcacgtgccggacatacccttgataccggggacggctcacatcagcgcatttcttataagaaagcctttatgcagggattcctctgcaacctgctgaacccgaaagccacactctttttccttgctatttttacccaggtgctggatatcaattccggatttggtgaaaaactctggtatgctgctattgtgatgggactggcggtggtttactggccatcgctggtactgctgattcagagtgctccggtacgccacggattggcgaaaattcagaaatatatcgataaggtccttggcgtcgtcctgattggctttggcgtccgggtcgcaatgagctga

SEQ ID NO: 276103 - DNA, 495 bp, Morganella morganii
atgaacattagcttgatcgctgctttagctatggatcgggttattggcatggaaaatgcgatgccatggacactgccggaagacctggcatggtttaaacgtaatacggtgaataaaccggtgatcatgggtcgcgtgacttatgaatctatcggccgtcctctgccggatcgccttaatatcgtgctcagccgtacgccgggcaacgatgatcgcgtggtctgggctaagtctgtggaagaagctctggtgattgcacagaaagaaacagacggcgagatcatggtgatgggcggcggtaaagtctacggacaattcctgccgctggcggatcgtttatatctgacacacgttgatgcggaagtcagcggggatacttacttccctgactatgagccggatgagtgggactccacttttatggaatatcatgacgcggatgaagcaaactctcacggtttctgctttgaaatcttagagcgccgtaagagctga

SEQ ID NO: 276104 - DNA, 834 bp, Morganella morganii
atggcaacctatcttatcggcgatgttcatggctgttaccatgaacttcgcgcattactggctcaggctgattttgatccgcaggcagataccctgtggctgaccggtgatctggtcgcccgcggcccggattcactggatgtcctccgctatgtcaaaagcctgggtgactgcgtcaggctggtgctcggcaatcatgacctgcatctgctggggatctacgcggggatcagccgtaacaaaccgcgcgatcatctgaacaaactgctcagtgcaccggatctggatgagctgatcaactggctgcgccgtcagccgatgttgcaggttgatcatgagaaaaagctgatcatggcacacgccgggatcaccccgcagtgggatctggataccgccattctgtgtgcccgtgaagtggaagcggttctcagcagtgatacctatccgctgttcattaatgctatgtatggtgacctgccgaatgactggtcaccttccctcaccggcctgccgcgtctgcgtttttccaccaatgcactgacccggatgcgttactgtttcccgggcggacagctggatatggtctgcaaagataaaccggatcaggtttccgcgccgctgaaaccctggtttgccctgccgtcaaaactgccggaaggctacagtgtggcctttggtcactgggcgtcactggaaggcaaaggggcaccacgcggtatctatgcactggataccggctgctgctggggcggacaactcaccatgctgcgctgggaagatcgctgctatttctggcaggagtcttttgcggtgcgggatgaggatgatgactga

SEQ ID NO: 276105 - DNA, 378 bp, Morganella morganii
atgaataacgacccgagaatttgtattcaggttcagagtgtttatatcgaaagtcagtctgaaccggatgcggaacgctatgttttcgcgtataccgtttctatccgtaacctgggtcgtgatcctgtgcagcttatcagccgctactggcgtatcactaacagtgaaggccgccagacagaagttcagggggaaggtgtcatcggtgaacaaccggtgatccggcccggtgaagagtatcgttataccagcggcacggttctggaaacaccgctgggcaccatggaaggttattacactatggtggatcacgagggtgcggatttcatcagtgagatccctgttttccggctcgcaataccaacctttattcactga

SEQ ID NO: 276106 - DNA, 813 bp, Morganella morganii
atgaatacacgagtccatcaggggcattttgcccgtaaacgtttcgggcagaacttcttaaccgatcaatttattatcgacagcattgtcgcgtcgattaacccgcaacccggccaggcgattgttgaaatcgggccgggactggctgcactgactgagccggtcgccgatcgcatggacaaaatgacggtcattgaaattgaccgtgatctggccgcccgtctggccagccatccgtttttacaaagcaaactgaccattattcagcaggatgccatgaccgtggattttacggcactggcacaggaacgcggccagccgctgcgggtgttcggtaacctgccgtacaatatctccacgccgctgatgttccatctgttcacgttcactaacgcaatcagtgacatgaactttatgctgcaaaaagaagtggttaaccgtctggttgccggtccgggcagcaaaacatacggccgcctgagtgtcatggcacagtattactgccaggtcgttccggttctggatgtaccgccgacggcattccgcccggcaccaaaagtggattcagcggttgtccgtctgatcccgcaccgcgaaaatccgtatgtgctgaaagatgtcgcgctgctcagccgggtgaccacgcaggcctttaaccagcgccgcaaaacgatccgcaacagcttaggtgatctgttcagtccggaaaccctgactgaactgggtattgatccggccacccgtgcagaaaatatcagtgttgcgcaatactgtctgatggccaattacctggcggaacatcccgcctcatag

SEQ ID NO: 276107 - DNA, 999 bp, Morganella morganii
atggcagtaacaaataagctgaaacctgtcgttattacccccggcgaacctgccggggttggtcctgacctgacagtcgcgctggcacagcgcgactggccggtaaaactggtagtttgtgccgacccgcagctgatgcagcaacgcgcacacgccctgtcactgccgctcacccttgaaccttattcaccggataccgcctgtcagccgcagcgcgccggtacactgacgattctgcctgttgaactgaaagcgccggctgtcgccggtgagcttaacgtggcaaatgccgcctatgtgaccgaaacactggcccgtgcctgtgacggctgtttacagggtgaatttggtgctttgattacaggtccggtacacaaaggcatcattaacgatgcagggatcccgtttatcggccacacagaatttttcgctgaccgcagtcactgcaaacgtgtggtgatgatgctggccacagaagaaatgcgggtagcactggcgaccacgcatctgccgattttacaggttccggcagccgttgaccgcacctgcctgcatgaagtgatcaccatcctcaatcatgacctgcgcaccaaattcggtatcacacagccgcatatcatcgtctgtggtctgaacccgcatgcgggggaaggtggccatatggggcatgaagagatagacaccattatcccggcactcgatgagctgcggacacagggcatttccctggaaggtccgctgccggcagacaccctgttccagccgaaatacctggagcgtgcggatgccgtgctcgccatgtatcacgatcagggtctgcctgtgctaaaatatcagggattcggccgcgccgtgaatatcacgctgggactgccgtttatccggacctctgtcgaccacggcacagccctggaactggcaggtaccggcaaagcagatgtgggtagttttatcaccgcattaaatttagcgattacaatgattaaaaacagtcaatga

SEQ ID NO: 276108 - DNA, 1299 bp, Morganella morganii
atgaaaaactggagaacactcattctcggcctgatgttcacggcaagcacaacctcatttgcagcaccgcagcagcttgataaagttgcggcagtcgtgaataacggtgtggttctggagagtgatgtcaataatatgcttcagactgtcaccatgaatgcccgcaatgccggtcagcagattccggatcaggcaacattacgtcagcagattcttgaacgtcttatcatggacaatatcgtgatgcagatggccggacagatgcagatctctatccctgaccaggcggttgacggcgctatcgaagatatcgcccgtcagaacaacatgacccttgcccagatgaaagatcgtctgaaacgcgacggtatgagctatgacaaataccgcagcgatatccgcaaagaaatgatgatggcggaagtccgtaacaacgaagtccgccgccgtgtcgtgatcctgccgcaggaagttgattctctggcaaaccttatcagcacacagaacgctgcagatactgaactgaacatcagccatatcctgatcccgctgccggaaaatccgacagaagagcagatgaatgcagcaaaagaaaaagtcaccaccattatgaatgaacttcagcatggtgctgacttcggtaaactggcgatcacctattctgcggatccgcaggcgctgaaaggcggtaatatgggctggagccgtttacaggagctgccgggtctgtttgccgagcgccttcagacagccaaaagtggtgagattgtcggaccggtgcgttccggtgtcggcttccacattctgcgcgtgaatgaagtccgcggaaacagccagccgatttctgtaacagaagtgaaagcccgtcatattctgatcaaaccgtcaccggtgatgaccgatgaccaggcccgcagcaaactgcagcagattgcctctgatgtgaaaagcggtaaaacctcctttgatgctgcggcaaaacaattctcagaagatccgggctctgccctgcgcggtggtgagttaggctggtcaatgcctgatatctacgacccggctttccgtgacgcactgatgaaactgaaaaaaggcgaactgagtcagcctgtccgctcctctttcggctggcacctgatccagcttgaagatacccgcaacgtggataagaccgaagcggctcagaaagatcgcgcttaccgtatgctgtttaaccgtaaattcagcgaagaattacagagctggatgcaggaacagcgcgccggcgcttacgtggaaattttagatggcagtaacaaataa

SEQ ID NO: 276109 - DNA, 2370 bp, Morganella morganii
atgaagaagagttatccaaccctgctggccaccattatctggacagcgttatacagtcaggcagcacaagccgccacacttgccgagcaatgtatgctgggtgttccggtgtatgacgagccggttgttgacggtaagcccggcgattttccggtcaatatcactgcacaaggtgtgtcaggcgaatatccgcacgcggtaaaatatgatggtggcgttgatatccgctcaggtaaccagaatctgaaagcggaggaagtggaagtcacccagagcggtgaagaaactaatcctgtccgtattgcgacagcgaccggtgatgtccgctattctgatccgcaaatccgtctgaaagggccgaaagcgtggctgaatctcaataacaatgatgctgatgttgagaaaggtgattaccagatggtcggccgtcagggccgcggtgatgccgacaaaatgaagcttcgaggcgaaaaccgttataccatcctcgaaaacggggtctttacctcctgcctgccgggcaatgacagctggagcgtcaaaggctctgaggtcattattgaccaggaagagcaggttgcggaaatctggaacgcccgtttccgtgtcgccaatgtcccgatcttctacagcccgtacctccagttaccgatcggtgataaacgccgctccggttttctgatcccgaacggcagctattccaaatcatccggcctggaatttaccctgccgtattactggaatatcgccccgaattacgatgccactatcacgccgcactatttcagtaagcgcggcctgaaaatggataatgagttccgttacctgacacaattcggtacaggcacactggcctttgatttcctgctggatgactcgcagtataagaaagacaaagaagccgccggtgatgcagagtgggcaaaacgggaatccaatgaccgctggttattctactggggtcacagcgggtcgtttgcacaggactggtggttctcttctgactacaccaaagtcagtgactcgcgctattttaccgatttcacatccgcttacggtaactccactgacggctatgccacgcaaaaactggctgtgggtatccgaaaatcgaactggaacgccaccgtaaccgccaaacagttccagattctgaccaacaatgataacgcgacctcctaccgtgctgagccgcagttagatctcaattattataaaaatgacctcggagtgtttgatttccgtgcctacggtcaggtctcccgctttaccagcgtaggtaaaaataatccggatgccgtccgtattcatgcggaaccgacactcagcatgccgctgtctaacggctgggccagcttcaatactgaagcgaaactgatggcaacccattatgatcaggatattcctgaagtactgaagaactccgaacttgaaaaaaatgttacccgggtgctgccgcagtttaaagctgatgcgaagatgatcttcgagcggccgatgttctttaatgacagcttcacccagacattagagccgcgcgcgcaatacctgtatgtcccgtataaaaaccaggacaatatcaataactttgactccacactgatgcagtccagctacagcggtctgttccgtgaccgcatgtacagtggtctggatcgcattgcatccgccaaccaggtcactaccgggataaccagccggatttatgatgatgaattagttgaacgatttaacgtttctgtgggtcaaatctactactttgaacgtccgcgtaccggtgactctcaaaatactgtcgtggatgaaaaagatgaaaccggttcgatggtctgggcaggtgattccatgtggcgttataacgacaactggggcctgaaaggcggtattcagtatgaccgccgtctgggcagtgtctccatgtccaacgctactctggaataccgtcaggatgccgagcgtctgattcagctgaattaccgctatgtggaccgggactatattcaggctatgcgtcagcatacccggtatggcgaaaaatacgtttcaccgccaaaccagcaaggcatctctcaggtcggtattgtggctagctggccaattgcggagcagtgggcttttgtcggtcagtattactatgacaccaaagagagccagccggccagccagttagtcggtctgcaatacaatacctgctgctgggcggcaaacgtcggttacgagcgtaagattatcgactggaaaaatgatgccagtgagtacgacaataaaatcacgtttaatatcgaattacgcggtatgagcagcaattacagtctgggcagccagaaaatgcttgagcgcggtattctgccgtatgttccggcattttaa

SEQ ID NO: 276110 - DNA, 822 bp, Morganella morganii
atgcactatttgggaaaaatcatcggaattttattaggcatggcgtcaggggccggtttttggggtatttttctcggctttcttattggtcatgcgattgataaagtccgcagtcagcaattgggtggctcattcagcaacaatcagtccagacaggcactctttttcagcacaacctttcagattctggggcatctgaccaaatcaaaaggccgggtaacggagtcagacatttatctggccaccgctctgatggatcgcatgcagttgcacggcagtgcacggactcaggctcagaatgctttccgtgaaggtaaagcggccggtttcccgctgcgcgatgcactgcgccagttacgccgcgcctgttacgggcgggcggatttactgcgcatgtttctggaaatccagatccaggcggcgttcggtgacggggaactgcatccgaatgaacgccaggtacttttggtgatcgccgaagagctggggatcccgcgtcatcagtttgaaaatgtgctggcaatgatgcaggcgcagatgcacggcggggcacagagcggtaattggcagcagcagtctcagcagggttattaccgcgatcagaccgcagaccttgccgccgcttaccgggtgctgggcgtgaaagaaagcgacgacagtacggttatcaaacgcgcctaccgtaagctgatgagtgaacatcacccggataaactggtagcgaagggattaccaccggaaatgatggaactggcgaaagagaaagcgcaatctatccaggcagcatatgatctcattaaaaaagagaaaggctttaaataa

SEQ ID NO: 276111 - DNA, 651 bp, Morganella morganii
atggaaccctataacccgcctgccgatccctggctgaacatcctctggcaggatgaaagtatcattgtggtgaataaaccaagcgggctgctttccgtacccggccgtgcgcccgaacataaagacagtgtgatgacacgcattcagcgtgattatccggccgcagaatctgttcatcgtctggatatggcaaccagtggtattattgtggttgcgctgaccaaagccgccgagcgggagcttaaacggcagttccgcgaacgggaaccaaaaaaaacctatgtcgcccgtatctggggacatctggagccggaaaccggcatggtggatttaccgctcatttgtgactggccgaaccggccgaaacagaaagtgtgttttgaaaccggcaaaccggctcagacaggttatgaagtgctggaatatgaggaaaatgccacacgggtaagactgtttccggttaccggacgttcgcatcagttgcgggtgcatatgctggcactgggacacccgattctgggggatcgtttttatgcacatgatgaagcaagagccgcagcgccccggctgcagcttcatgcagaggcgctgtctgtcacacatccggcaaacggtaagccgatgcattttacttgtaaatcagatttttag

SEQ ID NO: 276112 - DNA, 2907 bp, Morganella morganii
atgccgtttactcttggtcaacgctggataagcgatactgaaagcgagctgggattaggtacagttgtatctgtcgacgcccggatgatcacccttcttttccctgccaccggtgaaaaccgtctctatgccgcagccgatgcccctatcacccgtgtgatgttcaacgaaggggataccgttaccagtcacgaaggctggcagctcagtgtgaccgccgttgaagagagcgacggattattaacctataccgggcagcgtaccgataccggtgaggaaaatgtccgcctgcgcgaagtgtttctcgacagtaaactgacatttaataaacctcaggatcgcctgtttgccggtcagattgaccgtatggatcgctttgcgctgcgctaccgtgcccgcaaattcctgagtgaagagtaccgccgcgccaccagcggcctgcgcggcatccgcgccagcctgatcccgcatcagctgtttatcgccaatgaagtcggtaaacgccacgcgccgcgtgttctgctggcggacgaagtgggcctgggtaaaaccattgaagccgggatgattatccaccagcagttaatggccggacgcgccgagcgcgtgctgattatcgtaccggaaagccttcagtaccaatggctggtggaaatgctgcgccgtttcaatctgcggttttctctgttcgatgacagccgctacaccgaagcacagcacgagagtgacaacccgtttgagaccgaacagctggtcttgtgctcgctggattttgtccgcaagagcaagccgcgttttgaacacctggcggaagccggctgggatatgctggtggtggatgaagcacaccatctggtctggagcgaagaagcgccaagccgtgagtatcaggtgattgaaaccctggcagaaagcattccgtctgtactcctgctgaccgccactccggaacagctgggcatggagagccactttgcgcgtctgcgcctgctggacccgaaccgtttccatgatttcgaaacctttgttgccgaacagcaaaaatatcagccggttgccgatgcggtcactctgctgctcgaccgcgcaccgctgaccaaagatcagcaaaatgccattcatgacctgatcgccgaacaggatattgagccgctgctgaaagccgccaataccgacagtgaagacggcgaaaatgcccgtcgcgagcttatcagcatgctgatggacagacacggcacaagccgcctgctgttccgcaacacccgcaacggcgtgaaaggcttcccgcgccgcgaactgaaagccattaaaatgccgctgccggcacagtatcagaccgcgattaaagtcgccgggatcatgggcagcaagaaaaccacggaaatcaaagcccgtgagatgctctatccggagcagatttatcaggaatttgaaggcgaaaacgccacctggtggaacttcgacccgcgtgttgaatggcttctcggcttcctgctggcaaaccgcaatgaaaaagtgctggtaatttgtgcccaggccgcaaccgctctgcagctggagcaggttctgcgcgagcgcgaaggcatccacgctgcggttttccatgagaatatgtccctgctggaacgcgaccgggcggcggcctactttgcctccgaagaggaaggcgcacaggtgctgctctgctctgaaatcggttctgaagggcgtaacttccagtttgccaatcagctggtgatgttcgatctgccgtttaacccggatctgctggagcagcgtatcgggcgcctcgaccgtatcggtcagaaacgcgatattcagatcagtattccgtatctggaaaataccgcacaggccgtactgctgcgctggttccacgaaggtctggaagcctttgaatatacctgtccgaccggccgcaccatctatgaccgctattacgacagactgattaacctgatggcaaacccggcggatctcagtggttttgatgaatttatcgcggaatgccggaagacccatgatgtactgaaacaacagctggaacagggccgtgaccgccttctggagatgcattccaacggcggcgaagccggtaatgagctggctgctgaaattgcggatcaggatgaagataccgaactggtcacctttgccctgaatctgtttgatattgtcggcatcaatcaggatgaccgcagcgataacatgatagccctgactccgtctgaccacatgctggtgccggattttccgggtctgccggaagacggctgcaccatcacctttaagcgtgaacaggcattgtcccgcgaagacacacagtttatcagctgggaacacccgattatccgcaacggtctggatctggtcctgtccggtgataccggcagctgtgcggtctccgtgctgaaaaacaaagccctgccggtcggcacactgctgacagagctgatttatgtggtggaagcacaggctccgaagaatctgcagctgacccgcttcctgccgccgacaccggtgcgtctgctgatggatgtgaaaggcaataatctggcatctcaggtggagtttgaaagctttaaccgccagctgaatgccgtaaaccgccataccggcagtaagtttgtcaatgcggtgcaaaatgaggtgcatcaggtgctgcgtctgtccgaagacgttgttgccggtcaggcccgtgagctgattaccgcagcgaaagcaatggctgatcagcaccttactctggaacacgaccgcctgctggcactgaaatcggttaacccgaacatccgtgatgacgagcttgatgccattgaggaagaacgtcagcaaatcctgtcacatctggatgatgccaactggcgcctggatgctatccggctgattgtcgtttcgcatcagtaa

SEQ ID NO: 276113 - DNA, 2373 bp, Morganella morganii
atggcagggcacaacagttttccctcccgtcaggtggcagcaccggcggaagccggttttattctgacccgacactggtctgataccccgcgcggtattgaggtccgttactggctggcgacagataacgggccacggcatgtttctgttccgctgcagcaggctgtcggctttgtaccgcaccgggagctggcggaaagccgtcccttcattaacaacattcccggcgccacactgacagcacgtccgctaaaggattttcatcaggatgatgtcagtgccgtttactgccgccagtaccgccagttacagcaactggaaaaacagctcggcgaacagcatctgcacctttatgaagcggatatccgcccctgcgagcgctatctgatggagcgttttatcaccgccgctgtctgggtgcagccacagccggatggtcatgtgctgatgaaaccgcatccggattaccgcccggcgctgaaaatcgtttctctggatatcgaaaccacggagttcggtgatctttactccatcgggctctccggttgcggtgctgatactgtttttatgctcggcccggagaacggcacaccgctgaccaatcctgatttcacgctggagtatgtcccgcgccgcccggatctgcttcaccgtctgaaccagtggctggcggaacatgatccggacatgataatcggctggagcctgatccagtttgatctgcgcattctgcagcgccatgcggaaaaatatcagatcccgctgattttcggccgtaataatgccccgctttcctggcgggagcacggcttcaaacccggacaattttttgccggtgctccggggcggctgattattgacggtatcgatgccctgaaagccgcgacctggcagttcccgtctttcagtctggaggctgtgtctcagacactgctcggcgagggcaaagacagcgattccccgtatgaccgcatggatgaaatcaaccgccgtttccgtgaggataaaccggcgctggcacggtataaccttcaggactgccgtctggtcacccggatttttgagcacacccatctgacagaatttttactggcgcgggctgccgtaaccggcctggcaccggatcgcatggggggttctgtcgccgccttcacccatctttatctgccgccgatgcaccgtaaaggctatgtcgcacccgaccccggcgagaaacccggtgagccgataccgggcggctttgtgatggattctgccccgggattatatgactcggtggtggtgctggattttaaaagcctgtacccctccattatccgcacttttctcattgatccgattggcatggtcgaaggtcttgccgcaccggaacaggcggttcccgggtttaagggcgcgtatttttccagggaaaccaactgcctgccggatatcgtcaaccgaatctggcatgagcgggacatggcaaaactggcaggggataagccgctgtcgcaggcactgaaaattattatgaatgcgttttgtggtgttctgggtgccgccggatgccgtttttatgatccgcgcctgacctcctccgtcaccatgcgcggacatgacatcatgcgaaaaacccgcactattattgagtctctgggttatcaggtcatttacggcgataccgattccacctttgtctggctgaaaagtgcgcacagtgaagcgaatgcggaacgtatcggacgctggctggtggaaaagatcaatcagtggtggcagacacatttaaaggacgaatacggactgatctccgccctggaaattgagtatgaaacccactaccgccgctttctgatgccgacgatccgcggaactgacctcggcagcaagaaacggtatgcggggctttcgggggataacatggtctttcgcgggctggagacggtccgcagtgactggacaccgctggcacagcatttccagcaaaccctgtaccggctgattttcgataaaatgccgtatcagcagtttatccgtgattatgtccgtgacacactcgcgggacgctacgatgaccggctggtgtaccgcaagcgtctgcgccgtccgctggcggattatcagcgtaatgtgccgcctcatgtcaaagcagccagaatggcggatgagtataatgtccgcatgaatcgtccgccgcagtaccagcgcggtgcggggataagctatattattacccgctccgggccgcagccgctggagattctgacggcaccgccggactatgagcattacattaataaacaactgatgccgatagccgacgccattctgcctttcctggaggataacttcaccacattgttaaccgggcaattattgatgccattttaa

SEQ ID NO: 276114 - DNA, 699 bp, Morganella morganii
atgatttattttgatcatattctttaccgctatcagcaacagaccatgaattttcatttttccgttgccgccggagaaaaaattgccattctcggcccgagcggcgcgggtaaaagtaccctgctgtcactgattgccgggtttcagtttgccgaaagcggcactattctgctgaataatgaagatcacacccgcacaccgcccgcttcacgcccggtatccatgctgtttcaggaaaataacctgtttgctcacctgacggctgaacagaatatcgctctcggttttcatcccgggatgaaactgaatgcggagcaaaaagtgcagctggcacaaatcgctgaacaggtttcgctgacaccactgctgaaacggctgccgtcacagctttccggcggtcagcgccagcgggtggcactggcacggtgcctggtgcgttcccagccggttttgctgctggatgaacctttctccgcactggatccggcactgcgcaatgaaatgctggcactgctggaaaccatctgtgattcacggcagctgacactgatgatggtctcccacaatacagatgacgcggccagaatcgcgccccgcgcgatggtggtggataacggtaccattgcctttgacggcagtaccgccgccctggtcagcggtgaggttccccaggctcagatcctcggtatccatccgtaa

SEQ ID NO: 276115 - DNA, 1611 bp, Morganella morganii
atggcaaaacgcagtcagccgttaattgccgcgtacctgataccgggcgcactcgcgtccggtcttcttctggtcgttgctgtcagtgccttcggggcgctgtggtttaacacaccggatacagactggcagcagatatgggatgacagctacttgtggcatgtcgtccgctttaccttctggcaggctttcttatccgcactcttttccgttatcccggctgttttcctggcccgggcactctggcgccgacgtttcccgggacggacggtctttctgcggttatgcgcgatgacgctggtactgcccgtgctggtagccgtattcggtattctgtcagtttacggacgtaacggctggctggcacatatttccggttttctggatctggactataccttctccccgtacggattacagggcattctgctggcgcacatcttcttcaatatgccgcttgccacccggatgctgtatcagcagctcgataatattgccacggagcagagacagctcgccgctcagcttaatatgaatgaatggcagcatttccggattgtggaatggccttatctgcgccgtcagttgctgccgaccgccgcactgatttttatgctctgctttgccagttttgccacggtgctggcactcggtggcggcccggcgtcaactaccattgaactggcgatttatcaggcactgaattatgactttgatattggccgcgctgccctgctggcgctgatccagctggtgtgctgcatcgggctggtgctcgtcagccagcatttgtccggtcatttttctgtcggctttacccagtcactgcaatggcgcaacccgcaggacacgctgccgcgcagactggctgacggcctgatcatcctctgtgccctgctgtttctgctgccgccgttttttgccatcatcgcggacggtctgaatccgggattactgccggtcctgcagcaaccggcactgtggcgagcttttttcacctcgctcggaattgcgctggcttccggttttatctgtgtgctgctgaccatgatgctgttatggagcagccgtgaactgcggctgcggcaggcggtcagagcaggacaggccatggagctttccgggctggtgatcctcgccatgccgggaattgtactggctaccgggtttttcctgctgctcaacagcacgaccggcaccactgatttgggagcaattccatacgggctggtgatcctgaccaacgcgctgatggcgattccgtatgcactgaaagtgctggataacccgatgcgtgacctggctgaacgctataacccgctctgtctctcgctgaatatcagcggcttcaaccggctgaaactgattgaactgaaggctctccgtaacccgctggcacaggcagtggcatttgccagtgtgctgtcggtcggggattttggtgtgatcgcgctgttcggcaatgaagatttccgcacgctgccattctatctttatcagcagatcggcgcttaccgcaatgcggatgccgcggtcactgccctgatcctgtttttactctgtttcgggctgtttaccgttctggaacgtctgccggggaaacgcccatga

SEQ ID NO: 276116 - DNA, 1011 bp, Morganella morganii
gtgttacagaaactgaccagaaatatcattgcaggcggtcttgccgcactgttttctttccaggcggctgcagataacagcaagccggttctgactgtctatacctatgactcatttgttgccgagtggggaccgggaccggaaattaagaaaaactttgaagcgcaatgcaattgcgaactaaaactcgtcggtctgagtgacggcgtgacgctgctgaaccgtctgcggatggaaggtaaaaaatcacaggccgatatcatcttaggtctggataacaacctgatgcaggcggcactggataccggactgtttaaagaaagcaatgttgatcagtcaaaactggtgctgccggtcaaatgggaaagcaaaacctttattccttatgactacggctggtttgcctttatctacaacaaagacaccctgccgaacccgccgaaaagcatgaaagaactgcttaacagtgatcagaagctgaccattatttatcaggatccgcgcaccagcacaccgggactgggattactgctgtggatggaaaaactctacggggatgatgtggcggcacagtgggccaaaatggcgaacaagaccctgacggtcaccaaaggctggagtgaatcttacggcctgttcctgaaaggtgaagctgacctggtactgagttatacctcttcgcctggttaccacatgctggcagataacaaagataactatgccgcagcactgtttgaggaaggacattatcttcaggtggaaatggcaggtgtactggcctcctcaaaacacccggcactggcggaacagttcatgcagtttatgctgacaccggatttccagaaaacgctgccgaccaccaactggatgtatcctgtgattgatatgccgctgccgccggtttacgacaaaatgccgaaaccggcgaaaacgctggaatttgatgcaaaagaagtggcgaaagagcgcaatcagtggatacggatatggcaaaacgcagtcagccgttaa

SEQ ID NO: 276117 - DNA, 534 bp, Morganella morganii
gtgattgatgatgatggctaccgcccgaatgtcgggattgtaatttgtaataaggaaggccaggttttatgggcccgccgctacggacagcactcgtggcagtttcctcagggaggtatcaatcccggcgaatcaccggaacaggccatgtaccgtgagttgtatgaggaagttggtttaacgcgtaaagatgtgcgtatcctggcggtcacccgcaactggctgcgctacaaattacccaaacgtttggtgcgttgggataccaaaccggtttgtatcggtcagaagcagcgctggttcttacttcagctgctctgcgaggacaaagaggtcaatgtgacccgcagcaagtcgccggaattcgacggctggcgctgggtcacctattggtatcctgttcgtcaggtggtctctttcaaacgtgatgtgtaccgccgcgtaatgaaagagttttcttccgttgtgatgcctgccaacagcgaagcgacggctgtgcgggcaccgtctccctaccgtcgccggcgccagaattag

SEQ ID NO: 276118 - DNA, 2247 bp, Morganella morganii
atgctgacgcgtttacgtgaagtgattgaaaaagtggctgccgccgccgatctcgcggaagcgctggagcttctggttaaagaaacctgtcaggcgatgggaacggatgtctgttccatctacctggcagataatcagcatcactgtttttatctgatggcaacgcaggggctgaaaaagccccgcggccgtgctgtcagccttgctttcggcgaaggtgtggtcggtcatgtcggccgccgcgctgagcttatcaatatcgcggatgtccgcgaacaccccggttttaaatatctcccccaggttaaagaagacaacctgcgtgcatttctcggtgcgccggtggtttaccgccgccagttactgggcgtgctggtggttcagcagagagaaaaacgcctgttcagtgaaacggaagagtcttttattgtcactctggcgatgcagcttgccgtactgctggctcaggcacaaaccaaagggttgttcgggcagttccgtcagacccggatccaggctattccggtttcttccgggattgtgatggcctatggctgggaagaccgttcacagccggtgcttgagaatgtttctgaagcctcggcactggaccgcgtgcaggagcgtgcccgcctgaataaagcgctggaggatgccacggcagagtgccggcgtatcagcaagcgttttaatgccgcctcacaaaaagagagtgccgctattttcgatctctactcccatctgctgaatgacctgcaactgaaaaaagggttatacagtattgtggagcaggggtttgtggccgaatgggcagtcaaaacggtcattgagcaatttgcgggccggtttgccgggcttcaggacagctatatgcgggagcgggccacggatttgcgtgcactcgggcagcggctgttattccaccttgatgataattttaccggcagcaaccagtggccggaacgctttgtgctggtggctgatgagctgagtgccagcctgctggcagagctgccgcaggaacagcttgccggtgtggtggtgcgtgacggggcaacacattcccattccgccattctggtcagggcgatgggtattccggttattatgggcgcggatattcagccggaattgttacacaaccgtctgcttatcctcgacggctaccggggcatggtgtatatcgaaccggagccgctgatagcacaggaattcagccagattattgagcaggagcaggctatcagccaactggccgaggatgagctcagccgctcagctgcactgaaaagcggcgaacgggtttccgttcagctgaatgccgggctcagtctgaagtatgagcaaaaaatcgtcaaaagtattgacgggattggactgtaccgtacggagataccgtttcttgttcataatggttttccgtcagaagaagagcagaaagtccgttatcaggatatgctgcaactctttgccgggaaaccggtagtattgcggacactggatatcggtgctgataagcagctgccgtatatgcctatcagcgaggaaaacccgtgtctgggctggcgcggtatccgtgtgatgctggatcagccggagatttttcttatccagttgcgggccatgctgcgggccaatatcgggctgaataatctgaagatattattcccgatgatttccgggctcgcggaggttgaagaggccatccgcctgcttgatcgtgcctgtgaggaagtatcggtactgaccggggaacgggtggaacgtccgccggtgggggtgatgctggaagtaccgtcattgctgtttatgctgccggaactgaagcaatatattgattttatttctgtcggtacgaatgatttaacccagtatctgctggcggttgaccggaataatacacatgttgcaccattatatgactcgcttcatccggcggtcctgcgtatgctgaattttgtccggactgaaaccacccggctggggatcccggtctcggtctgcggggaaatggcggcaaatccgttaggtgcaatgatactgattggtttaggataccgtcagctgagtatgaacgggcggagtatcccgcgtattaagtatttgctgcggcatctggatgccggagcactggagccgctgctggcatcattgctggatgcacagacagcggctgaaatccgtgaaaaagcggagctgtttattgagaacaaggggctgggacagcttatccggggcagtgcctga

SEQ ID NO: 276119 - DNA, 897 bp, Morganella morganii
atgagtaacacttatctggcatttccggattttgatcctgttattttttctgtggggccggtggcgttacgctggtacgggctgatgtatcttgtcgggtttgtgtttgccatgtggctggccaaccggcgtgcagacaaaccgggcagcggctggaaacgcagtgaagttgaaacactgttatatgccgggtttgtaggtgttttcctgggcggccgtatcggctatgtgctgttttataacttcccgctgtttgcggaaaacccgctgtatctgttcaaagtctgggatggcggtatgtcattccacggcggactgatgggcgttattattgctatgtggtggtttgcccgccgcacgaagcgtcattttttacaggttgctgactttgtggcaccactgattccgtttggtctcggtatggggcgcatcggtaactttattaacggcgaactgtggggacgtgtgactctcgatacaccgtgggccattctgttcccgacgtcttacagtgaagacgtgaaactggctgctgctgatccgtctctgatgccggtgcttgagcaatacggcgttctgccgcgtcacccgtcgcagctgtatgaaatgctgcttgaagggatcgtcctctttatcattctgaatgtgtttgtccgcaaatcccgcccgatgggcagcgtgtcaggtctgttcctgatcggctatgggctgttccgtatcattgtggaatttttccgccagccggatgcccagcttggtttattcggcgggatcagcatggggcagattctgtctgtgccgatgattattattggcgtactgatgatggtatgggcatacaaatgcccgggtaataaaaagcagagtgataccggaaaacagaacgcaccggaatag

SEQ ID NO: 276120 - DNA, 936 bp, Morganella morganii
gtggaacaatatttagacattgcaaagcggattctggaggaagggaaatggattgagaataaacggacaggcaaaagatgcctgacaattattaatgccgatttcacttaccacgttgacaaaaatgagttcccgctggtgaccacccgcaaggcattctggaaagccgcaattgcggaaatgctgggttacttacgcggatatgacagcgccgctcagttcagagccatcggctgtaatacctggaacgctaacgccaatgaaaataccgactggctggcaaacccgaaccgcaaaggtgaggacgatatgggccgcgtttatggtgttcagggacggcagctgaaagtatccccgacagaagcacagtatgatttattattatcattaagtgacgccggcgataaagaaggtgttaaaacactgattaatgaactgcgaaaaaatacattcgatcaactccgaaaagtctatgataatttaaaaaaaggaattgatgaccgcggtgaaatcatttcattctggaatccgggtgaatttgatcagggctgcctgagaccctgcatgtttatgcatcatttttctgttcttgatggtacattatatttaaacagttatcagcgcagttgtgattatgcacttggttatgttttcaatgcaccgcaatgttatttcctgctggctattatggctcagataaccggcctgaaatgcggtaaagtttatcacaaagtagttaaccttcatttatatgaagatcagctggaattaatgcgtgatgtccagattacacgtcagccgtttgcgtcaccaaaactgcatattaaccctgacattaaaacgctggatgatttaatgacatgggtaaccaccgatgacttcacagtgacagattaccagcaccacgacccgattaaatacccgttctctgtctga

SEQ ID NO: 276121 - DNA, 468 bp, Morganella morganii
atgcagacagaacgggggatatcgctgatggaagtcattattgttttatttattatggcattacctgtttcatttattaatatttcatgggaaagccacagagagcggcgttatctgacagaaacggctgcgttgtttcagcaatatctcagcagtcataaactgaaagcaacctatctgaacgaaacacggaaaatcgcggttacgtttggtgagaaaagccgggcatgtcatcaggtatccgcagcacggtgtgatgatgatccggaaggattcacaccgatgggaggtgtccggattgtttccggtacgaccggtaccgtgttgttctggggaacccggcataccgcctctgctgccagctttttactggaaaatacgcagggacagataaaactgattatctcggccccgggccgtatacggttgtgctcgccgggcatgatatccggagtaccgtcatgctga

SEQ ID NO: 276122 - DNA, 588 bp, Morganella morganii
atgctgaataaaagacgggaaaagggttcattgctatttgaaatgctggcgggaatggctgtcagtgcgattcttctggtctcggtaacccgtttttttccggctctggggcgggatgtgctgaacacattccggcaatataagctggatacgataatgcgggaaactcttttgcggctggaaaaagatctccggcggacggcattctgccgggggctctgtcagggaaaaccgctggaaatttccgcccggcgcggcgagacagccggcagttgcatcattgttgcttacgatctcaatcacaatggccgctgggagcggaatgtccgtaaaatcggggagcattttggctaccgtctgaataagcaggcactggaatggacgcgcgatgcccgcagctgccgggataccggctggcaaaaggtcacggatagccgctatgtgaatgtttcccggtttctggttacgccggtaaaactgtacggaaaaaatggcctgaaactgaccctgacactcaccgggcgggacatgcccttaatacagcgaaccggagaaagcctgattgtcatgcctaattaccacctgtag

SEQ ID NO: 276123 - DNA, 516 bp, Morganella morganii
ttgtcatgcctaattaccacctgtagatccggcggggagaaagacggtcactccggaggaaatgccctgttgctgatgattatgctgttgctgggaatttcactgatgatgttgtctgttttacatcgcttttatcagacagagtggcgtaacggtcaggatgaaacggcattttaccgggcggatgccggtgcggcctctgcactggaatgggggctgacactggcgtggtcccggaaagcactgaacgaaacacagttttactgccggacagcaccggacccggcactgaagagttgtttgcggcggctgagagccaacaagctgttattacagggcagtatattttctccctggtttgaacaaaatatcacgcattatcagctggtcagtgccagggaagaaggaggcaacatgattttgacagccctgccgcagggatggagtgatttttgcccgccggatttaaaacccggctgcaaccggcatactgaaacgggagaaaacaatgaatga

SEQ ID NO: 276124 - DNA, 333 bp, Morganella morganii
atgaatgaacgcggaatgtcgctaccggaagtgatgatttgtgcctttatctttacgattctgattaccggattattacgctattatcagttgctgcacagcggaaaacagcggcagtatgcggatgtcagcacggtgcgtcatctgcatcagatgatgcgttttacggctgatcccggaatattacggcagatgatgcagacacatttatctcccctgcagaaatgggaaagttatcaggaaaatgtgtcaccgggctgtatttccgttactatcgggctggtctctccgggagagcgccggttaactgccggcagatggcaatgtatgtaa

SEQ ID NO: 276125 - DNA, 3402 bp, Morganella morganii
atgtttacagtttatcactccaatgatctggacctgctgaaagatctgatatgccatattattgataatgataaaattaatgatcctttttgtcctgaaaccgtgctggtgcaaagcccggggatgtctcagtggctgcaaatcagtctggcagaaaaactgggtattgccgcgaatataacatttccgcttcccgccacatttatctgggatatgtttacccgtgtcctgccggatattccgaaggagagtgccttcagcaaaggggcaatgacgtggaagctgatgtcactgttgccgcagcgccttgatgatccggattttgccccgctgcgccattatcttgatgatgacggggataaacgcaaactgcatcagctatcgggacgtattgctgatttatttgaccagtatcttgtctaccggccggactggctgacggcctgggaaaataatgaactgattgacgggctgagccataaccagtcctggcagaaatgcctgtggcgggatttgcagacactgacccgcagcctggggcagccggaatggcaccgtgccaatctttatcagcgctttattgatgtgctcaatgaaggtgacccggagattgtcgccaatctgccgccccgcctcttcatctgcggtatctccgcattaccgccggtgtatctgcaggctctgcgggcgctcgggcagcatacccatatccatctgatgtttaccaatccctgtcagtattactggggcgatttacagagcccggctgcactgcggcgtatgctggcgcgcaagccgcaaagctattgggataaaaaagccgtcagctggtttaaatcggatgaggatgcaccttcactgttcgattttgaggctgacggggaacagaataccggtaacccgctgctggcatcatgggggcgtcccggccgggataacctgtttttcctggaagatattgaagaaatccatgctattaaagcttttgtcgaccgcccggcagatacactgctgtctgctgttcagcaggatattcttaatctggaagacggcagtgtggtgggaaaaaacaaagaggagtttgtcaccagtgagcggcggcgggtgattgcggataatgaccgctccctgacattccattcctgccacagtccgcagcgggaaacagagattttgcaggactatttactgaacctgctggagaatgatccgtcactgactccccgcgacattattgtgatggtggcggatatcgacagttattctccttatattcaggcggtttttggccagggaaacgaaaaccgctatctgccgtttgctatctcagaccgtaaagcccgccaggctcatccggtattacaggcagtactgacactgctggaattaccgcagagccgtttcacctcagagcatgtactcagtctgctggaagtcccggcggtggcgcagcagttcgggctggatgagagcgatttaccgcttctgcgccgctgggtcagcggatccggtgttcgctgggggctggatgaccataatattgagtctttctcactgccggtttttggccagaacacctggaaattcgggctggaacgcatgttgctgggctatgccatggcagaggaggaaggtacctggcgcgggatcctgccgtatgacgaggtttccggtatgtcagcggaccgggtcgggcaactggctgcttttattgatacgttgcgggagtggcagaaaatactgagtgagctgcggacaccggcacaatggcgtgaaaccggttctgagcttctgtctgcctttttcatgacgacaccggataccgaatcggtgctcagtatggtgttacagcagtggcagcaggtactggatcagggggttaaagcctgttatgacggcgatgttccgcttgcattgatccgggatgagctctctctgcggctggatgacgagaaaatcagccagcgctttttatcgggagcggtaaacttttgcacgctgatgccgatgcgttctgtgccgtttaaggttatttgcctgctgggtatgaatgacggcgtgtacccgaggacaatcccgccgctggggtttgatcttatggcggaaaaaagccgccggggtgaccgcaaacgccgggatgatgaccgctatcttttcctggaggcgctggggtcagcaaaagaatatttatatatcagttatatcggccgatctatccgcgataatgaagagcgtaacccgtcagtgctggtcagtgaactgctggaatatgccggtctcagtttttgtctggagaaagaccggtttgctgacctggataccagccgggaagcgctggaaaatcatctgattgtccggcacaccagggttccgtttgcggcggataactaccgggagggcgcggaatttcagagcttttcgccgcagtggttaccggcagcattacggcagggcgaagcgcaggggccgtttaatgtcccggttccgtcagaagatataacagaaataaccattgatcagctgctgaggttttaccgtcatccggtcagggcattttttcagcagcgtctgaatgtccattttgatattgaggatgtggctctgccggaagaagaaccgttcagtgttgataatttacagcgttacgggtttaacacccggctgcttgatgcgctggtggacggcgaaccggaagagcgggtcttccgcatactgaaggcggcgggggaactgccggccggggcgtttgcacaggtttactgggaagaacaattacaggaaatggatgttctggcggaaaaaatccgcaatgcacggacagaatctgatattgagtcgtttcactatgttaccgggccgtatacttacagcgggcaactgaccggagttcaggagaacgggctgctccgctggcgtccggcggcacttaccgccgctgacgggctgcgtttgtggattgaacatctgacatacagcctgagcggacggcagcagtacagccggatgtacgggcgcggtgatacggtgtggatctttgagccgctgacggcggagcaggcgcagggctatctgcgtccgctgctggatgtgtttgtccgtggtctgaatgagccgctgcctgtctttgtcaaaagcggctgggcatggctgaccacactggcggatgagaacaccggtgaactctctgatgatgatgcactccaacataaagccggtttactgcttctgcagacactgcaggggggatatcagtttaccggtgaggcggaggacgattatgtcgtccgcgcattccgccattttgatgaagcacttatggatgcaataaagcaattttcacaacaactctttttgccgatgtttcaacatcagaaaaacagggagaatgaggctgatgcctaa

SEQ ID NO: 276126 - DNA, 2883 bp, Morganella morganii
atgcctaaacaactagtgcagtttatttttacgctgcttttcttttttaccggtgccaatgcacttgctcagaataactggcaggttctgcccggagagattgagaaaagcgccaacgatccgcgtcagtatcaggcaatcaccctgaaaaataatatgacggttctgctgatttccgataaaaccgcacgtaaatcagctgcagcggtcagtctggctatcggcagtatggatgaaccgcagagccaggcgggtcttgcgcactatctggaacatatggtgctgatgggctcaaaacgtttccctgagcctggtaatttcagtgattatctggcgaagcacggcggaagccataacgccagtaccggctccaattacactgacttctattttgaagtggaaaataatgcgctgaaaggggcaacggagcggctggctgatgccctggcagaaccactgctggatccggtgaatgcggataaagaacgtaatgcggttaatgccgagctgaccatggcgcgttcccgtgacgggcaccgcatgtatcaggtccgggctgaaacctggaatccggcacatccgatttcacgtttttccggtggtaacctggaaactctgagagataagcccggcagcatcctgcatgaagagctgctgaagttttacaacacctattattcatccaatctgatgaaagccgtgatctacgggccggagtccccggaagaactggcaaaactggctaatgagacgttcggtacaattccggatcgccacgcaactgttccgcagattaccgttccgctgatcactgcagccgagcagcagaaaatcattcactatgttcctgcgcagccgcagaaatcgctggattttgagtttgtcatcgacaacaacagcaaagatttccgcaagcagacagatacctatattgcgtatctgctgggcagccgcagtgaaggaacgctggcaaactggctgatatccaacgggctggcggagaatgtcagtgcatcggcatcctcaaccctggcacgtaatcagggcgtgtttattatctctgtctcactgactgatgagggtatggcgaagcgcgatgaaattaccgccgctgtttttgcgtacctgaatctgattaaagaaaaagggattaataaagactatttcgatgaaattgcccgtgtgaatatgctggcattccgctacaactcggttgtccgtgatatgaattatgtggaatcactggcaaatacgatgatggaatatccggtaaaaaatgttctgaatgtcggctatctggctgatgactgggatcctgccgccatcaaagcccgccttgcggatttaacaccggaaaaagcccgcatctggtataccagcccgcaggaaccaagcaataaaaaagcctatttcgttgatgcgccttatcaggtggatgcagtgactgcagctcagttgaataaatggcgtaaatctgaaggtgatttccgtttctctctgcctgcactgaacccgtttattccggataattttgatctgatcaaacagcaggaacagcaaaaaccggtacaactgacagacactgcaaaactgcgcctgttctatatgccgagccgctattttgcggatgagccgaaggcaattatcgcgctggaactgcgtaaccggaatgccggcagaacagccaaagatgttgtcaccagcgcgttgctcagttatgtcagtgaactgaagctgaatcagctcagttatcaggccagcgtggcaggaatggggatcaatatcagtgatgatgatggtctgaatatcagcgtcagtggttattcccagcatctgccggaactgctgaccaccgcagtgagtgaataccagtcctttacaccgtcagcatcggagcttgcacaggcgaaatcctggtatcgtgagcaggttgcggtatcggataacggcaaagcctatgaaatggcaatgcgtccgttcagccgtctgaaatcagtgccttattttgaagataaagaacgcctcgcagcgctggacaccattaccgaaagtgacatcacgcagtaccgtgaccgtcttatccgtgaaggtgctctccagatgtttgtattcggtaatctgacagcacctcaggcagagcagattgcatcgaaagctcaggcacagctcggttcacagggtacggaatggtgggtcggggattactatgtgattgataaagccctgaaaccaaactttgacgaaaaagccaacagcacagataacgcgctggccaacatctttatcccggacggttattcacggacggaaggcgcggcattctcgtctgtgctgtcgaaaattctgcatccttggttctatgatcaactgcggacacaggaacaactggggtatgccttgtttgcatttaacccgaacttcggccgccagtgggggatcggtttcctgctgcaaagcaatgaaaagaatccggcttatctgtcacaacgctttgatgatttctatatcaatgcggaaaaacgcctgaaagcactggataatgcggaatttgataaataccgcaatgcactgctgaccgaaatgacacagccgccggaaacctttgaggaagaagcatcccgttattcatttgatttcaaaaataattactttgatttcaacacccgcgagcagacgattgcggcggtgaaaaaaatgaccaaacaggatgtggtgacattctatgagaacgcggtgatgtcgaaaaaaggactggcactttactctcaggtgaccggtaccggcggcaaagcggatgattacgcgaaaccggccggatggacgacgtatccgtctgtcacggctttccaggcactgttacctgttaaagaagaaatccggtaa

SEQ ID NO: 276127 - DNA, 3618 bp, Morganella morganii
atggcggctgaatctttaaatccgatgacaataccgctgcaggggcagcggttaattgaagcctctgccggtacagggaaaacctataccctggcacggctctatctgcgtctgctgctgggtattggtgaaggggcgtttgtccggccgttatcggtagaagagatcctggtggtgacctttaccgaagcggcaaccaatgaactgcgggggcgtattcgtgagaacatccataagctgcggattgcctgtctgcgtcatgaagaaggcggggaaccgggggaggattacgggttcggtccgcttctggcgctgattgaggataaacaaagtgctgctcagcgcctgctgctggctgaacggcagatggatgaagccgccatttttaccatccacggtttttgtcagcgcatgctgacacacaacgcctttgaatccggcgtgctctttgaacaaacgctgattcaggatgagcatcctgtccgtaaacaggcctgtgaggatttctggcggcgtcattgttacccgctgccggttgaactggccagagccattacacagctctggtctgatcctgaggcgctgctgcgggatatttacccctggctgcagggggaactgccagggattaccgatgcaccggaatcggatgaaacattactttcccgccatgaaaaaattatcgccgcgattgatgaggtcaaacagtgctggcgggaaagtgatgctgattttgtcagtcttattcagaactctgatctgaataaaagcagttaccgcgctaatctggtgcccggatggattgccggcattgatgactgggcgaaggaaaccgaaaccacacattacgcactgccgaaaaatatagaacgtttcagtcaggcagtgctggatgaaaaaaccaaaaaaggcggtacgccgccgtcacatccggtgttctctgcgattgaggaactgacagcacaggcactgacgctggaggatgtcctgtttacccgcgcggtgtatgagatccgccggaccatcacgcaggagaaacaggcccggggcgagatgggatttgatgatttgctgacccggctggataacgcgctgcatcaggaaaacggcgttctgctggcgcagacactgcgcagacgttttccggtggcgatgattgatgaattccaggataccgatccccagcaataccggatcttccgtactatctatcaggaaaacaccggtgacaacggcacaccggcagatccgtacgggctgctgtttatcggtgacccgaaacaggcgatttacgccttccgcggcgcggatatcttcacctatatcaaagcacggcgggatgtcagtgcgcattacaccctgggaactaatttccgttccgcgaagacgatggtcgacagcgtcaacaatctgtttttacaggcagatgagcctttctgctttaaacagatcccgtttcagccggtcagttctgcaccggataatgatgatgccgcttttattatcggcggaaaaacacaaccggcggtgcagttctggtggcaggccgcagagggggtcagcagcggggattatgagcggacaatggcgggtgtgtgtgccgggcagatccgcgactggctggatgccggacaaaacggcacggcactgattggccagcccggcaaacaacgtccggtcagtgcggcagatattaccgtactggtacgcagccgccgggaagcccaactgataaaggatgcccttaatcagcgggcgatcccgtctgtttttctctcaaaccgcgacagtgtgtttgacacaccggaagcccgcgaattgttgtggctgctccaggcggtgctgaatccggaaaaagaacggctgttgcgcagtgcgctggcatccggattgtttggtctgaatgctgcacaaattgacgcactgaatcaggatgaagctgcccgtgacaggctggtggatgagttcgccggttacggtcagatctggcagcagcagggcgttctgccgatgctgcgccgggtgctcagtcagcggaagattgcggaaaatcttctggcggggcaggacggtgaacggcgcttaactgatatcatgcatatcagtgagttacttcaggaaacatcactgacgctggaaaatgaacacgccctggtgcgctggctggcacaacaggtattacgcccggatgcgcagtcggaaagccagcagatgcggctggaaagtgatcagcatctggttcagatttgcactatccataaatccaaagggctggaatacccgctggtgtggctgccgtttatctgtaattttcaggcgggtggtcagcggctttatcatgatgaaaccaccttcgagccgtgcctgacactgtcaccggatgaaacacagcttgccctggcggataaagaacgtctggcagaggatttgcgtctgttgtatgtggcggtgacgcgggcggtttaccattgcagcctgggtgttgcaccgattatcagagggaaccgcaaaaaaacaggtaataccgacctgcatcttaacgggttggggtatctgcttcagaacggacaggcatgtgacagcaaaaccctggcggagcggcttgatgctttttgtcagggaaacagcgctgttgccgttacccggataacagaaccgcaactgcaactgtggcagcccggtatgtcacagccgccgtccctggcggtgaagccgtttacccggtctgtcagcagccgctggcgtgtgaccagttacagcggcctgagctacggcgcatcgtctggtggctctgtgtatacacaggacagacaggaagagatgatggcgatgatccgttctctcagcccgtcactggatacagatacgctcggtgaagtgcaggacgaaaccggaacggcacagaccgccggtaccttcccgcgcggtgcgatggcggggacattcctgcacagcctgtttgaagagcttgaatttgatagtgagccctcacttgagtggctgagggagcaactgctgtcatacggattctctgctgaatgggcaccgttcctgcaaacctggttcacggatctggttaatacaccgttgtctgcggaagggccggtgctcagtgcaatcccggtacgttataaacaggatgaaatgcagtttttcctgccgatagacggcgacctgaccgcgcaaaaactggatgcactgacgcggcagtatgatccgctgtcagcacaggcaccaccgctggatttcgcggcagtgaccggcatgctgaaaggctttattgatcttgtgttttatcacgacggtaaatattacatagcggactataaatcaaactatctgggtgatagtcacgcagattataagccggacgcactggcgcaggcgatgctggaacaccgctatgatttgcagtatcagctgtatacgctggcgctgcaccgctatctgcgccaccggttgccggattatgactatcagacgcatttcggcggtgtgtattatctctttctgcgcggcatgacaccggactatcccggccgggggatctggttttatcgcccggagcaggcattcacagagcaactggatgccctgtttaaaggggaggaaggttaa

SEQ ID NO: 276128 - DNA, 1833 bp, Morganella morganii
atgaatactcacttacaaaccttatgtgcagagcagatcctgcgtcccctggactgtcagtttgcggcgatgctggcaccggacactgatccgctgctgcaacttgtgtttgcgctgctcagtgcacaaaccggcggcggacacgtctgcctgccgctgtcgcggattattcccgcagcggaacagggcggacggcatgcggagatcatgcagtctgtctggcgggcactgaatgagccgggactgccggagataaaagcggctctgtctgcctctgatgcggttagtgatggctcacttcctgcaccggttgtgctgtcagaagagaatttgtatctgcaccggatgtggcagtatgaatgccgggtagctgaatttttctcccggcctcagcaggtttctgctgatgcagagaaactgcgcccggttctggatgcactgttcggtacggaagaaccggaggactggcagaaaattgccgcagcggtggcagtcagcagccggactgcggtgatttccggcgggcccgggaccggtaagaccacaaccgttgcccgtattctggcggctctggtgcaatcagccgctgagccgctgctgattgaactggcagcaccgaccggcaaagcggcagcccgcctgacagaatcgctgggtgaggcgatcgctcagcttgatttgacggacacacaacgggccatgatgccggatcaagccaaaaccctgcaccgcctgctgggcgctcagcctgacagccgccggttacgtcatcatcagaaaaacccgctgatgtcggatgtgctgattgtggatgaagcgtccatggtcgatttaccgatgatggcggcactgattgatgcactgccggagaacgctatgctgatcctgctgggggataaagatcagctggcttcggtggaagccggggcggtgctgggggatatctgccgttttgctgaatccggttacacaccacagcggcggcaggcgctggaggtaatgaccggctgtgtgctgccggataaatcaccggcacacccggtaaatgtgcaggatcatctctgcctgctgcgtaaaagtttccgttttgatgccggttccggcatcgggcagttggccaccgcagttaacaacggcgatgtccgggaaaccatggcggttctcggcgggcagcggccggatgtccgttatgtgccgctggaggatgaagaaggctatgctcaggtactgacagacaccatgaaagcctatctgccgtttttatcactggtgaaacagcatgctgacccggcagcggtacttgacgccttcagtcagttccggctgctctgtgcactgcgtgaggggccgttcggtgtggaagggctgaatgagcgtattgaacggctgctgcatcagcaggggcatatccgccgtccgctgatacaccggcaccgcgcctatcacggtaaaccggtgatgataagccgcaatgacagcccgctggggctgtttaacggtgatatcgggattatgctgacagatgaaaaccatgaactgcgggtgtatttccggctgccggacggcactatccggagtatccgcccgagccgccttccggcacacgaaacagcatatgtgatgacggtacataaatcacagggctctgagtttgcccatactgcactggtgctgccggtgcagccttcgccgctggtcagccgtgaattgctgtatacagcactgacgcgggcgaagaagtttctgaccatatacagccgggaagagtgtgttaagcgggcggtgaaaacgccgactcagcggtacagcgggctgagcgggcgtttacgttag

SEQ ID NO: 276129 - DNA, 1329 bp, Morganella morganii
atgaaagagcgcagtatcgaactggtggacggattccgtcagtcggttccttatattaatgctcaccatggcaaaacatttgtggtgatgctgggcggcgaagctatcgagcatgaaaattttcccggtattgttaatgatatcggcttactgcacagcctcggcatccgcctgattgtggtgtacggcgctcgtccgcaaattgaaaaaaatctgctggcccatcagtgtgagccggtttatcacaaaaatacccgtgtgacagatgcgcggactctcgagctggtcaagcaggcagcgggacagttacagctcgatatcaccgcccgtctgtcaatgtgtctgagcaacacaccgctgcagggtgcgcatatcaatgtggtgagcggaaactttgtgatagcccagccgctgggagtggatgatggcattgattactgccatagcgggcgtatccgccggatcgatgaagatgctatcaaccgtcagctcaataacggcggtatagtgctgattggcccggtggccgtttctgtcaccggtgaaagctttaatctgacctccgaggagattgccacgcagattgccgtcaaactgaaagcggaaaagctgatcggcttctgctctgcgcaaggtgtggtggcggatgacggcgggattatctccgaaatgcacccgaatgatgcagagcactatgtgcaggcgctggaaggcagcggcgattattactcaggaaccgtccgtttcctgcgcggtgcggtgaaagcctgccgccgtggcgtgaaacgcagccatctgctcagttaccaggaggacggcgcgcttatccaggaactcttctcccgcgacggtatcgggacacagattgtgatggaaagctcggaacagacacgccgcgccaatatcaatgatatcggcgggatcctcgagcttatccgcccgctggagcagcagggcattctggtgcgccgctcccgcgaacagctggaaatggaaatcgacaaattcaccattattgaacgcgataacaccacgattgcctgtgccgctctctatccgtatccggaagagaaaatcggtgaaatggcctgcgtggcggtgcatcctgattaccgcagttccgcacggggcgaggaattgctgcaccgggtgacgcagcaggcaaaacaaatcgggctggaaaagctgtttgtgctcaccacccgcagcattcactggtttcaggagcgcggctttgtcccggcagaaattgaaaacctgccggtcaaaaaacaggcgctgtataactatcagcggcgctcaaaaatcctgatcctcggctttcagtaa

SEQ ID NO: 276130 - DNA, 1251 bp, Morganella morganii
atgagtcattctgaacatgatgcgtcgcgccgtctgttactgaaaggagctgcggcgttttgtctgctgagtatcagcccgttcggctttgcggcgtcgtcacagattgtggcggtgcgtatctggccggcatccagttatacccgtgtgactattgagtcggatcatccgctgaaatataagcagttttcactgcaaaacccggaacgtattgttgtcgatctgaagaatgtgcacctcaacagtgtactgaaagggatggataagcaggtgcaggatcgcgatccgcatctgaagctgatccgtgtcggtcagaatgatccgcagactgtccgcctggtgtttgaagtgaaacaggcgatgagtccgcaggtgctggaactgaccccggtcgctgagtttaaaaaccgtttggtgcttgatttttatccgaaaaatggtgctgcgacagaagacgatccgttgctggcactgctggaagattacaaccgcggtgatctcgaagaaagcctgccgcgtgaaacgccgaaaccgggtaaagccggtcaggacaggccgattgttattatgattgacccgggccacggcggggaagaccccggtgctatcgggaaatacaaaacccgcgaaaaagatgtggtgctgcagattgcccgccgcctgaagtcgcttatcgatcgcgagccgggtatgcgtgcctatatgacgcgcaacgaggatgtgtttatcccgctgtcggtgcgcgtggcgaaagcccgtaaaatgcgggcggacctgtttgtctcaatccatgcggatgcctttaccaaccgctctgccagaggctcgtctgtctttgcgctctcgacacgcggggcaaccagtaataccgcaaaatatctggctcagacccagaacgatgcggataaaatcgggggcgtcagcaaaagcggtgacaaatacctcgatcagaccatgtttgatatggtgcagagcgcgagtatcaaagacagtctcaaattcggttcagaagtgctgaaacggatgggaaatgtcaacaaactgcataagcgcacggttgatcaggcagggtttgcggtgctgaaagcaccggatattccgtcgattctggtggaaacggcgtttatcagtaaccttgaggaagagcgtctgctgaaaacggccaaatttcagcaggagatggcaaattctattttcctggggattaaggcgtattttgccaacggcggagccgtcgcacggcgcaactga

SEQ ID NO: 276131 - DNA, 714 bp, Morganella morganii
atgaaaaatcttaatggccgaaaaatactcctattgtgtccaaaattttatgactatgctaatataatcaataatggactaattgatttaggtgctgaggtctattactatgatgaaagaccatctaattcattcttgtttaaattatttttacgactaaacatccctattttttttaaaaaaaaaataaataattattataaaaaaataatagacaacaatttaacacttacagatatattagtaataaatccagaatcactcactagtgagataattgaaaactttaaaaaaaaatataaaaattgcaaattcactctttacatgtgggattcagtaaaaaataaaaaaaagtcggctgatttatttaatttgtttgataaatctttctcctttgatgatgatgactgtaataaatataaaaatttaaacttagaaccattattctatagccccccaactccccagaaaataaattcagaatatgatattagttttgtcggctccatacatagtgatcgattggatgttatttcaaaagtactaaaaaacaataaaataattaatgttaagctatttttattttcgccatctagattatttacaatatataaacttattctttctaagaacttatctctaagagactataagttaacatctcataaaaaaataagcatcaatcaaacactagaaatattttataaatcataa

SEQ ID NO: 276132 - DNA, 828 bp, Morganella morganii
atgaagtcatacactatatttggaggaactggatttataggatctcactttgtcaagtttttaaaaaaaatgggtcatagtgtttggataccagaaaaaaatgattcatctatttttaataaaaacttaggcatagtaatatatgcagccggatatggaaattgtacagataatccatacaacgtactacaagctaatactagtttattaagtaatattcttgataaaggtcagtttgataagttaatatatctttcttctacaaggatatatatgaaccaatctatatcaacagaggatagtagcgtactcattaattttgaagataacagaaaattgtttaatttaactaagcttatttctgaagagctatgtataaaaagcaatcgtgattgtatgataatccgtcccagcaatgtatatggtttatctttaaatagtcctttatttttaccatccataataagagatgcagttaaaaataaagtagtaaatatgtatgtgagtccaaattacagaaaagattatatctctgtagatgatttagtaaatgctactataaaattaagtgaacttaacaccccccctgaaataataaacgttgcatctggtaaaaatatttcagccgaagaaattgctaaaattttaaaagaaaaaacagattgtaatatcctttggaataaaccactatcaaattatgaagtatttccccctattaatatagataaattaagaagaaaaatacaatttaatcctaggaatgtcttatctgatttagataaaatgatattagaatataaagacataataaaaaatgaaaaatcttaa

SEQ ID NO: 276133 - DNA, 555 bp, Morganella morganii
atggatatcatagaaagtaagctaaaaggttgtatgatcattgaaccaactatttattatgatgaaagaggttttttttatgaatcatatcaacaagaaagatatttaaaaataggaataaaagaaacatttgttcaggataatcgctcaagatcaagtaaaggagttttaagaggacttcattttcaaaaacaccatccgcaaggaaaacttgtaacaattacagctggtgctgtacttgacgtagctgtcgatttaagaccaaactcaccaacatttggtgaatatgagtctgttctccttacagaagagaataaactacaattttatatcccacctggatttgctcatggattttgtgttttaagtgatctagctgattttgaatataaatgtactgactactataatcctaacgatgaatgtgggataatctggaatgaccctactgtagcaataaattggcccatcaaaaatccaatattatcaaataaagatttacagcaaccattattgaaagatatagaaaaatcgataaatgaaggatggatataa

SEQ ID NO: 276134 - DNA, 870 bp, Morganella morganii
gtgaaaggtattattttagcaggtggttcaggtacacgtttatttcctattacattaggaatttcaaaacaattattgcctatttatgataaaccgatgatttattacccgctgtctatattaatgctggcgggaatccgggaagtattaattattacaacaccggaagatcaatcgggctttcagcgtttattaggtgacggcagtgattttggcatctctctggaatatgccgtccaacctgaaccagaaggtcttgcacaagcctttatcattggtgagaaatttatcggtaatgactctgtatgtttggtactcggagataacattttctggggacagggtttctcacctaaactgcttaaagccgcttctttagaagaaggggctgttgtcttcggttatgaagtgcaagatccggaacgatttggcgtagtcgagttcgacgagcactataatgctgtatcaattgaagaaaagccggttaaaccaaaatctaaatatgctgtaaccggtttatacttttacgataacgatgttattgaaatcgctaaaaatataaaaccatctgagcgcggtgaactggaaatcacaacagttaaccaaatttatctgaaaaacaataaattaaaagttgaattgctcgggcgcgggtttgcctggttagataccggcacacacgacagcctgctggatgcagccagttttgttgaaaccattgaaaaacggcagggttttaaagttgcctgtttggaagaaatcgcttaccggcagggatggctgactgaaaaacaagtattagatgccgctgaaaaatcaaaaaagaatggatacggtcagtatctttttaaattaataaataatatttaa

SEQ ID NO: 276135 - DNA, 1371 bp, Morganella morganii
atgataagcagcctgacggcgcggattttcgccatcttctggtttaccctggcactggtgctgttactggtgctgatggtgccgaagctcgactcccggcagctgatgccgctccaggaggccgagtaccggcaggggatgatgctgcagcaacatattgaatctgatctcgcgcaggatccggcgaatgacctgctctggtggcggcggctgacccgcgccctggtaaaatggacgccgccggacaagcgcctgattattgtcaccagtgaaggccggattatcgggcctatccgtaatgattcccaggtcatccgtaactttatggggcagtcggataacactgacaacccgaaaaagaaacggtatggccgcattgagctgctcgggccgtttgaagtccgcgacggcgaagaccgctatcagctttatctgatccgcccggcgaacaccgcacagtctgattttatcaacttcctgatcgaccgtccgttcctgttactggcagccaccatgctgatcagcaccccgctgctgctctggctggcgtggagcctggcaaaaccggcacgaaaactgaaaaacgcagcggatgatgtggccaagggtaacctgcgccagcatccggaactggaagccggcccccaggagttccttgcggcgggtaacagttttaaccagatgatcagcgcccttgaacgcatggtgaacgcacagcagcggctgatatccgatatctcccatgaactgcgcaccccgctcacccggctccagctggctacggcactgctgcgccgccgccacggtgagagtaaagagctggaacgcatcgagacagagacccaccgcctggacggcatgattaacgacctgctcgtgctctcccgcagccagcataaaaatgagctgctgcgccagaacatcaaggccaatgagctgtgggatgacattctcgacaacgcgaagtttgaggcagagcagcgccataaaacgctggagatcacctcaccgccgggcccgtggacaatttactgcaacccgtccgcactcggcagcgcatttgagaatattgtccgtaacgcgctgcgttactcaaaccagcatattcaggtcgcattcagtgccgacaccaaaggtatcagcattgtagtggatgacgacggcccgggtgtcagcccggaagatcgcgaacatatcttccggccgttctaccgcacggatgaagcccgcgaccgcgaatccggtggtaccgggctggggctcgcgattgtcagcaccgctatcagccagcacaacggtaaagtcaccgccaacgacagcccgctcggcggacttcgtctggaaatctggctgccgctgcacccgcgctga

SEQ ID NO: 276136 - DNA, 705 bp, Morganella morganii
atgaataaaatactgcttgttgatgatgaccgcgaattaacctcgctgttaaaagaattactcgatatggaagggttcaacgttgtcattgcacatgacggcgagcaggcactgaccctccttgacgattccatagacttgttattgctcgacatcatgatgccgcgcaaaaacgggattgaaaccctgaaagaactgcgccagaactaccagacaccggtgattatgctgaccgcacgcggcagtgaccttgaccgtgttctggggcttgaactgggtgcggatgactatctgccgaagccgtttaacgatcgcgagctggtggcacgtatacgcgcgattctgcgccgctccaactggagtgagcaacagcagcagagcgacagcagcagtaactcttccgtggtgatggtggataaactccagctcaacccgggccgtcaggaagccagcttcggtgacgaagtactggatctgaccgggaccgagttcacgctgctttacctgctggcacagcacctcggccaggtggtcagccgtgaacacttaagccaggaagtgctgggcaaacgcctgacgccgtttgaccgcgccattgatatgcacatttccaacctgcgccgcaaattaccggagcgcacagacggcctgccgtggtttaaaacgttacgcggccgtggttacttaatggtatctgcaacatga

SEQ ID NO: 276137 - DNA, 498 bp, Morganella morganii
atgggtaagatagcaacaatcactttagcgtcaatgtttgtgatgcaaagtgcgccgggactggcgcaggattcagaaagtgatagctgcgttaccccggtgcagagtcacagtcagtataaaggtataacgacatcagggggagatggttatacctctatgttgaccggcatccggttaacggaagaacaacggatgcagttgcgggatctgatgcacaattaccgcgaccagttacggaatgtccgtaaccttgcagaagatgatattgcgctgtatgagctggtaaaggccgaaaagtttgatgaaacggcggtacgtaatcagctggaaaaggagatgcgcaagcggctggattaccaggttgagatgatacgggttcaccatcagatgtatcagttactcaacccggagcagaaaatgcagctggatgccaattttgagccggagagtattcatacctcatccgcctcctccgcgcagaatatgccggaatga

SEQ ID NO: 276138 - DNA, 2526 bp, Morganella morganii
atgaaaacaaaaaagaaaatcttacacctcgctattctgtccgttattttcagcacagcaccttcattggttatggctgaaacattctgtggtgacagaggcagtattacttacggcgggagctcaacactgaccggagaactcaccgcggaccagtgctatgaggttggcgcatcggttatcggcgatcccgcagactatatcgggatcgcaaaagatctgaccctgctgagcggcagtaaactcagtgtactcggcctgtttgaggattctcaggttcagggcggcgctgaagtctggattgataaaacaacccatattgcctgggacgggtatcacaccggttttccggccaccggcaaccgtattgatattcagagcggcggattaattcgtgttctggatggcggaacattaaaagattccgtactcaacggcggaaccgtctatgtcagtaataccggtaaagcagatgacccgggtcagtctgtaaataataccgtcaacagcggcgggaaattatttatttacctgggcggggaatcaaccggtacacaggttaatgacggcggttatgaatatgtccagcaggacggtaaatccctgaatacggtcgtgaataacggcggtgcccagatgctgaaatccggaggatttgcagacagcaccattattaatgacggcggattacagcaactgcacggcaagggttttgccgataataccctcgtgaacgccggagcacggcaatatgtggttgatgattccaaagcaaccaatacaactgttgacggcggccagcaatatattttcagtcagaatgccgccgcagctgccggtattgcggaatttaacctggtaaaaaatggcggcgcccagataatcaaaggtggcggacaagccattaataacgaattatatgacaccgccgtacaaagtatttacagcggctcctccgcgacagataccacactgaatgatcgcgccaaaagctggctggcggcaggggcacagctcctcggcgtcactacggttaatcagcagtcgcaggtacagctgactgccggttcagaagacagactggctgcggatgccggggcttatgcggaaaatgtcatcttatccggcccggacagcactctgctggtgatcaccggtgataccgggaatgccgcctttgccggttcgctcagcggacagggtcaggtccggtttgttgcaccggtcaacgccgggtacagccatctgaccattgataatctctccggcagccagacattctatatgaacacagccattgcggagcaacagggtgattacctcactatccgtaacggcagtggtgatcatgctctgaacgtacaggattccggggctgaaattacccgtccggatgaatcacgtcttgatttaatcacggacgaaagcagcaatgcacagttccgcctgagcgccctcgacggtaccaatatcaatgcggtggacggcggaacctatatgtactcgctctatcagcgtgatgagcaggacggcaaaatctggtatctggcggctcagaaagacgagccgggcgagcctgaaaagccggttccgccggtcgtacctgaggataaaaccacaccatccaccgatgcggtgttatccatggctgccgcgccgcagctgatttttaatcacgaactcgacaatctgcggttccgccgcggcgaattacgggataatcagggcgatgcgggggtctgggtgcgtctgaccggcgacagaacccgcgcaggtaccggacacacacactttaaactgaatcaggccggttttgagctgggtgcggataaatctgtcccgctggaaaacggcaaattatggctcggcgtctttaccggctataacgatgtcaaactgaagcatcagcgcggcggcgaaagcagcatcgacagtattactgccggtggttacgccacctggttctcggataacggctggtatctcgatggtgtgctgaaatataaccatttcaataatgagttacgcgcggtttccaccaaccgcagcagcatccgcggggattattcacagaatgcctacggcgcatccgcagaagccggttactcctttgatctgccggaagccttctgggcggaaccgtatgcccgcctgagctatatgcgtgcggacagcaaatcagttcacctgaacaataatatgcaggcaaaactggacgcacagcagtccctgcaatccgaactcggcctgcacgcgggtaaagatttcactctgaacaatcaggtgatcatcaccccttacgccacactggcctggcagcatgagtttatcagcaataatgatgtgaccattaaccagcgcaatacgtttgacaccgatttctccggcgacagcctgaaagccggcggcgggttaactgtccgtttcacgccgcagattcaggcgtatgcggaaatcgattaccgcaaaggcgacaaaacagaatcgccgctgcacggcaatatcggcgtgcgctacaacttttaa

SEQ ID NO: 276139 - DNA, 978 bp, Morganella morganii
atgagcaagaagatcaaacgaatcggtgtgctgacaagcggcggtgatgcgccgggcatgaatgctgcaatccgtggcgttgtccgcgctgcgctgtcagaagggctggaagttatcgggatttatgacggctatctcggcctgtatgaaaaccggatgaaacagctcgaccgcttcagtgtctctgatgtgatcaaccgtggcggtaccttcctcgggtcggcgcgtttcccggaattccgtgatgacaaagtgcgggaaaccgcgattgaaaatttgcgcaaaaatggcatcgacgcgctggtggttatcggcggggacggttcttatctcggtgccaaaaaactgaccgaagcgggtttcccgtgtatcggcctgccggggactatcgataatgacgtggcgggaaccgactacaccatcggctattttaccgcgctggaaaccgtggttgaagctattgaccgcctgcgggatacctccacatctcacaaacgtatctctattgtggaagtgatgggccgctattgcggtgacctgacactgtccgctgccattgccgggggctgtgaatttatcgttctgccgccgaacgaagtggaatacagcagtgatgagctgattgcagaaatcaaagccgggattgataaaggcaaacgccatgcgattgtggcgatcaccgaacatgtcaccgacgtgtatgagctggcgcggcagatagaggcgacaacacatcacgaaacccgtgcaacggtactggggcatatccagcgcggcggctcgccggtggcgtatgaccgtatcctggcatcccgcatgggcgcttattctattcagttactgctggaaggttacggcggccgctgtgtcgggatccagaatgaaaaactggttcatcacgatattattgatgcggtgatgaatatgaagcgggtgtttaagaaagactggtatgagaccgcgaagaaactctactaa

SEQ ID NO: 276140 - DNA, 771 bp, Morganella morganii
atgcgacatcccttagtcatgggtaactggaagctgaacggcagcagtaaaatggtttatgagctgatcaccgctctgcgtcatgaaatcggcaatgtcaccggatgtgatgttgcgatcgcaccaccggcaatttatctctctcaggccaaacaggttctggcgggctcctccattgtactgggtgcccaggataccggtctgaatctctccggtgcgttcaccggcgaaacttcccctgaaatgctgaaagacatcggcgcacaatacatcattatcggccactccgagcgccgcacttaccacggtgagagtgatgaattagtggcagagaaattcgcgatcctgaaaaaactgggtctgaccccggtactgtgcatcggtgaatccgaagcagaaaatgaagcgggtaaaaccgaagaagtctgcgcacgtcagattgatgcggttctgaacactcagggtgcagatgcattcctcggcgccgtcatcgcgtatgagccaatctgggctatcggtaccggcaaatctgccacgcctgcccaggcacaggcagtgcacaaatttatccgcagccatatcgcgaagaaagatgcgaaagtggcagagcaggttattatccagtacggcggttctgtaaatgataaaaacgccgcagagctgtttacccagccggatatcgacggtgcattagtcggcggcgcatcactgaaagcagatgctttcgccgtgatcgtcaaagccgcagcggcagccaaagctgcaaaataa

SEQ ID NO: 276141 - DNA, 621 bp, Morganella morganii
atgaacgcagtcaaaaaaaccgcactggccgccctgacagcgggatgcacgctgctgcccgttacaccggctgcggccggtgacgcggtgctgatccccatcccctgcccgccggaaacactctggcttcaggcggatgcccctgctttcggcatcaccatccccgttatgcgcgaacagtttaaccgcaacaacccgtcgctgccattacgggaatacaaagtcgtggcctcaaacgacattaccgccagctatctgcgggcggcaacccgcatcagcccttatatttactcttccgccatccttgagcgcgacagtgaaaaaatcaaaagtcttcagctgacactgctgcccggcgcggacagtgcagcggaaaaaaccaaccgcgccctgatgctggcctatattaaggcactgattattcagttcgaaccgacactcaataaaagcaatattgatgccgccctgagccgggcactggcaacggatttcaaaaccggcacttacgcctctcaattcggtgcattacgctatcttctggtagttgatgacaaaaatggggtaactttcgctattgaaccgattaagctttcgctatctaatagtgatacggcacagtaa

SEQ ID NO: 276142 - DNA, 429 bp, Morganella morganii
atgacactacaacaatgggcgttttcgtttcacgggcggatcggccgcaaagcattctgggcggggatcggcgtgtgcggcgcagtgctgtttctcctgatgtcattacaggggctgtttaagctgcctgttgaagtgattatggtgccggtgctgatggtgatgtatcccgccgccgcgatttttaccaaacgcctgcatgaccgcaacaagcgcggcggctgggcgttaatgctggtgatggcgtgggcactgaccacgccggactggagcctcgccggtgatttctggcagtggggactggggcgttttctgccgatttttatcgtgatgataatggtgctcgactgcggtgtgtttaaaagtcttgatgagggcaaccgcttcggggagagcacacagccggtggataaaatcgacagccactga

SEQ ID NO: 276143 - DNA, 750 bp, Morganella morganii
atgtcaaactggatcacaggacgtgtcacacgtatcacacaccatactgataccttattcagcctgcatgttcaggcacctgtccttccctttacagcgggacaattcgccaaactcggcctggaaattgacggcgaacgcacacagcgcgcttattcttatgttaatgcaccggacaatgatgacctcgaattttatctggtcactgtcggcgacggtaaactcagcccgcgtctggtaaccctgaccccgggagatgaactgctgatcaccgatgaagcggccggtttttttgtgcttgatgaagtaccggactgcgacaccctctggatgctatccaccggcaccgccatcggcccgtttttatccattctgcaatatggcaaggatctggagcggttccgtcatattgtgctggtgcatgccgtgcgctatgccgccgacctgagctatctgccgctgatgcgggaactgcagaaaaaaatcgggagtgacaaactgcggattgtgactgttgtcagccgggagcatgcggaaggctcactgcatggccgggtaccggcgctgatcagttccggtgagctggaaaccgccgccggattaccgctgaccgccgaaaacagccatgtgatgctgtgcggtaacccggagatggtgaaagacacacaaaatctgctgaaaactgagcgggagatgcgcaaacacctgcgccgcaaacccggccatatcaccagcgagcaatactggtga

SEQ ID NO: 276144 - DNA, 1188 bp, Morganella morganii
atgaaaaaactggaaaactttcatctgctggtaatgctgattgcgctgattgctgtcgggcaaatgacgcagacagtgtatgtgcctgtaataacggatattgcgctggatttcggtaaaccggcgggtgccgtgcagagcgtgatggcggcgtatttatttacttatggtgcatcccagcttatttacgggccgatttcagataaagtcggccgccgtccggtgatcctcaccgggttatttatttatgtgttatccacgactgccgcgctgttttcaccgaacctgaccatgctggtgattgccagcgggttacagggactggggaccggagtggccggggtgatggcgcggaccatgccgcgtgatttatacaccggaatttccctgcgctacgccaacagcctgctgaatatggggattctggtcagtccgctgatcgccccgatgctcggcggtgcgctggcgtttttcttcggctggcgcgcctgttatgcgtttctgctcctgcttggcctggcggtgggttataacatgtggcacaagctgccggaaacccgtccgccgatgaaagagaaacctaaaatgtgggcctctttccgtctgctgctgaccaaccggacatttgtgccgtatctggcgatgctgatttgcggcctggccggggtggcagtatttgaggcatccagcggtgtgctgatgcgtgacggcctggggctgggcagtatggcggtgagtattctgtttattctgccgatacctgcggcatttttcggtgcctggtttgccgggcgtgacagcaaatccttcagttttctggtgtggtgtgcggtaatctgctgcctggtggctggtgcgctgatgtgggtcccggggctgctgggcgtgatgaatgtctggaccttactgatccctgccgcgctgtttttctttggtgccgggatgctgttcccgctggccaccacagcggccatggagccattcccgtatctggcgggggctgcgggtgcgctggtgggcggattgcagaatgtgggttccggtgttgccacctggatttctgcactgatgccgcagggcgggcagggcagtgtcggcctgctgatgctggcggtctctgtgattatggtgttgtgctggctgccgctggctcaccggttgcagaatcagcagccgatggcatcctga

SEQ ID NO: 276145 - DNA, 1083 bp, Morganella morganii
atgaatatatcccgtcagttttatcttgtcagtgcccttgcgggtgccatgctctgcggctctgccgctttcgcggcagacaataagattgtgattgcacatcgcggtgccagcggctatctgccggagcataccctgccggccaaagcgatggcatatgcgcagggtgctgattatctggaacaggatctggtgatgaccaaagatgatgaactcatcgtcctgcatgaccattatctcgaccgtgttaccgatgtggcaaaacgctttccggatcgcacgcgtaaggatggccgttactacgccatcgattttaccctcgcggaaattaaatccctgaaatttacggaggggtttgaaatcgaaaacggtaaagcggtacaaaaatatccgggtcgttttcctatgggaaaatcagatttccgtattcatacctttcaggaagaacttgagttcattcagggtctgaatcattccaccggaaaaaacaccgggatttacccggaaatcaaagcgccgtggttccaccgtcaggaaggtaaagatatcacccgtaaaaccctggaagtgctgaaagcctacggctaccagactaaagattccggggtatttcttcagtgtttcgatccgaatgaattaaagcgcatcaaaaatgaactgatgccggaaatgaagatggatctgatgctgatacaactgatcgcttacaccgactggcaggaaacctttgaacagaatgcggaaggcaaatgggtcaactataactacgactggatgatggctcccggtgcgatgagtaaaatcgcagcatatgctgatggtatcgggcctgattatcatatgcttatcagcaaggagtccaaaccgggtcacatcactctgacgccgatggcaaaagaggcacacgcttcgcaactgatgatccatccgtttactgtccgcgcggatgccttgccgccgtatgcggaaaacactgaacagttatttgatgctatttatattcaggccggagcagaagggttatttactgattttccggacaaaggcatacagtttctgcaaaaacataaactgcatcagtga

SEQ ID NO: 276146 - DNA, 1353 bp, Morganella morganii
atgctaagcctgtttaaacccgcaccgcatattcaaaggctcagtgctgatcgcattgatccggtataccgccgtctgcgctggcaaatttttattggtatcttttttggctatgctgcctattatctggtccggaaaaatttcgccctcgcctttcccagtctgatggagcagggattttccaaaggcgaactgggaacggcattgtctgcgatctccattgcttatggtctttccaaatttatcatgggatcgttttctgaccgggctaacccgcgctattttctcccgaccgggcttatccttgcctcggctgtcatgcttatcatgggcttttgcgactgggcaacctcttccgtctggattatggctattcttctgtttctctgcggatggttccaggggatgggctggccgccgtgcggacgcaccatggtgcactggtggtcacagagggagcgcggcgggattgtatcaatctggaactgtgcccataacgtcggcggcggtttaccgccgatgctgatgctgctggggatgtactggttcggtgactggaaagcggcgttttatatgccggcatttgcggccattctggtggcactcatcgcatttgccctgatgcgggataccccgcaatcctgtggcttaccaccaatcgaagagtacaaaaacgactatcctgatgattacacagagaacagcgaagttgaactgacggcaaaacagatcttcatgcaatacattctgccgaataagttactgtggtatatcgctgttgctaacgtctttgtttatctgctgcgttacggcgttctcgactggtcaccgacctatctcagggaagtcaaacatttcgatataacaggctattctgtcgcctatttcctgtatgaatgggcggggatcccgggcacgctgctgtgcggctggatgtcagataaagtctttaaaggaaaccgtggtgcaaccggggtgttctttatgacgctggtgacgattgccaccgtggtcttctggctcaacccgccgggtaacccgtctgttgatatggcgtgtatgatcaccatcggcttcctgatttacggcccggtcatgctgatcggcctgcatgccctggaactggcaccgaagaaagccgccggtacagctgccggattcaccggattattcggctatctcggcggttctgtggcagcaagtgccatcgtcggctttaccgtggattatttcggctgggacggcggtttcggtgtgatgattggcggcagtgtgctcgctgtgatcctgttagttgtggtgatgcgtggtgagaaaaaacaccacgatgaaatcgcccgcaataaagcctaa

SEQ ID NO: 276147 - DNA, 1527 bp, Morganella morganii
atgacaacagaaacaatcacccgtgagaaaaagtatatcgtcgcgctggatcagggaaccaccagttcccgggcggtactttttgatcgtaatgccaatattatcgatatcgcgcagcgcgaattcacccaaatctacccgaaaccgggctgggtggagcatgatccgatggaaatctgggccacacagagctcagtcttaacagaagtcctcgccaaaaccgacgtgcatccggacgaagtcgctgcgatcggtatcaccaaccagcgcgaaaccaccatcgtctgggaaaaagagaccggcaaaccggtttataatgcgattgtctggcagtgccgccggaccgcagattactgcaccggtctcaaacagaatgaagagatggtccgctatatccgggaaaataccggcctggtggtcgacccgtatttttccggcaccaaagtgaagtggatcctcgacaatgtcgaaggcgcgcgggagaaggcggagaaaggggaattactgttcggaaccgtcgatacctggctggtctggcgcatgacccagggacgtgtgcacgtcaccgatcacaccaacgcctcacgcaccatgctgtataacatccgctcactggagtgggatcagaaaatcctcgacctgttcggcattccgcgcgccatgctgccggaagtgaaagcgtcctctgaaatctacggcaaaaccaacatcggcgggaaaggcggtacccgtattcctatctccggtatcgccggtgaccagcaggcggcgctgttcggccagatgtgtgttcagccgggtatggcgaaaaacacctacggcaccggctgcttcctgctgatgaacaccggtaacgaagcggtactgtccgaacacggtcttctgaccactatcgcctgcggcccgcgcggtgaagtgaattatgcccttgagggcgcggtatttgtggccggcgcttctatccagtggctgcgcgatgagatgaaaatcattgccgatgccaccgattccgaatatttcgccaccaaagtcaaagacagcaacggtgtgtatgtggtgcctgcctttaccggcctgggcgcaccttactgggatccgtatgcgcgcggtgctattttcggcctgacccggggtgtgaacagcaatcacctgatccgtgccaccctggaatctatcgcctatcagacccgcgacgtgctggaagccatgcaggccgatgccggaacccgtctgaaggcgctgcgtgtcgatggcggtgcggtggcaaacaatttcctgatgcagttccagtccgatatcctgggcacgtcagtggaacgcccgctgatccgcgaaagtactgcactgggtgcggcactgctggccgggttatccaccgggttctggcaggatctcgaggaaatcaaagccaaatccaccatcgagaaaaccttccgtccgggcattgaaaccaccgaacggaatgtccgctacagcggctggaaaaaagccgttgcccgcgcacaggactgggaagaccacaactaa

SEQ ID NO: 276148 - DNA, 819 bp, Morganella morganii
atgagtctaatgaaatctccgaccctcttcggacaatgtctctccgaattcctgggtacagcactgctggtcttctttggtttaggctgtgtggccgcggttcgtatcgccggtgcacaactgggattatgggaaatcagtatcatctggggtctgggtgtggcactggcggtgtatctgacagccgggatctccggcgcacatcttaacccggctgtcacactcgcgctctggctgtttgcctgctttgagcgccgcaaagtgattccgtatattgtggcccaattcctcggcgggtttgccgctgcggcgctggtttatgccatgtattacaatgtgttcctcgattatgaccaggtgcatcatattgtccgcggctcacaggaaagcctctttaccgccggggttttctccacctatcctgcagcaccggtcagcgtgggtcaggcgttctttatcgaagtggtgatcgccgctatcctcgtctgtcttatcctggcactgaccgatgacggcaacggtgtgccgcgcggcccgctggcaccgctgctgattggtctgctgattgcggttatcggcggctccttcggtccgctgaccggtttcgcccttaaccctgcccgcgacttcggcccgaaagtggttgcataccttgcaggctggggagatattgccttcaccggcgggcgtgatatcccgtatttcctggtaccgatgtttgcgccgatcgtcggcgggttactcggtgcattcggttaccgcaagctgatcggccgccatctgccgtgcgaagtgtgcaataccggggacgaaaaataa

SEQ ID NO: 276149 - DNA, 243 bp, Morganella morganii
atgtcatttgaagtatttgaaaagctggaagcaaaagtccagcaggctatcgacaccatcactctgttacagatggaaatcgacgaattaaaagaaacgaacaacaacctgaaccgcgaagtgcagaatgcagccggtgcccgtgagtcactggtgcgtgaaaacgagcagctgaagcaggaacaggcaggctggcaggagcgtctgcgggctttactcggaaaaatggacgacgtccagtaa

SEQ ID NO: 276150 - DNA, 534 bp, Morganella morganii
atgaaaaatgataccttcgacacctccgagctttgtgacatttaccaggaaaatgtgaatgtcgttgaacccctgttttccaatttcgggggctgttcatcgtttgcggggcaaatcaccaccgtaaaatgctttgaagataacggactgctctttgatctcctggaagaagagggagagggccgtattctcctcgttgacgggggcgggtctgtccgccgtgcgctggttgacgcggaactcgcggcactggctgtgcagaacggctgggaaggtattgtggtgtacggcgcggtacgtcaggtggatgatctggctgaaatggatatcggtatccaggcgatggccgcgattccggcaggctgtggttcagaaggtatcggcgacagtgatatccgcgtgaatttcggcggtgtgaccttcttctccggcgattatctgtatgcggataacacagggattatcctgtcagatatcccgctgacgcttccggaagaaaatgatgacgatgaagacgagctgaccgaagcgtaa

SEQ ID NO: 276151 - DNA, 930 bp, Morganella morganii
atgtcagtcaccccttcaccggccatcagccgtacccaagcctggctggaaagcctgcggcccaaaacattacctctcggggtgatcgcgattattaccggttccgctctggcttactggaccggccactttaaattccctgttgccctgctcgcccttatcaccaccggcattctgcagattttgtcgaatctggccaatgactacggcgatgcggtaaaaggtaccgataccgaagcacgcctcgggccgctgcgtggtatgcagaaaggtgttatcaccgccgctcagatgaaaaaggcgctgattctgaccgtcaccctcgcctgtctgtccgggctggccctgattattgtcgcctgcgagaaaccggaagatattatcggcttcctggggttaggtgtggccgcgattatcgccgcaatcacctatacggtcgggaaaaaaccctacggctacctcgggctgggtgatatttctgttctgatctttttcggctggctgagtgtgataggcacctattacctgcaggccggttttttcagcccgctgactattctgccggcgaccgcctgcggtctgctgtctgttgcggtgctgaatatcaataatatgcgcgatatcgaaaatgatatcctggccgggaaaaacacgctggccgtccgcctcggtccgctgaaatcccgctattaccatgccaccgtgattaccgtggcattcctgtgcctggtgctctttacccttctctatctgcacggctggtacagctggctgttcctgctctccgcaccggtactgtttatgcatatcaggcgtgtgctgggggatatgaccgccaccggaatgcgtccgctgctggaacagatggtgaaagccgcacttctggtcaatatcctgttttccgcagggcttatctgccagcgtctgtaa

SEQ ID NO: 276152 - DNA, 1335 bp, Morganella morganii
atgtccgaaatgactccacgcgaaattgtcagcgaactcgataaccatattatcggccaggataaagccaaacgtgctgttgccatcgcgctgcgtaaccgctggcgccgtatgcagctcaatgaggagttgcgtcacgaggtcaccccgaaaaatattctgatgatcggcccgaccggtgtcggtaaaaccgaaattgcccgtcgtctggctaaactggccaatgcgccatttatcaaagtcgaagccaccaaattcaccgaagtcggttatgtcggtaaagaagtggattccatcatccgtgatctgactgattccgctgtgaaaatggtgcgtctgcagtctatcgagaaaaaccgtttccgtgctgaggaaatggccgaagaacgcattctcgatgttttaatcccgccggcaaaaaataactggggccagactgacacccaggcagagccgtcagctgcccgccaggcattccgcaaaaagctgcgcgaaggtcagctggatgacaaagacattgaaattgaagtctctgccgcaccaatgggtgtggaaatcatggcacctccgggcatggaagagatgaccagccagttacagtccatgttccagaacctggccggacagaaacaaaaaccacgcaaaatgaagatcaaagaagctttcaaactgctggttgaggaagaagccgccaagctggtcaatccggaagagctgaaagagcaggccattgaagcggttgaacagcacggtatcgtgtttatcgatgagttcgataaaatctgtaagcgcggcggccagtcctccgggccggatgtgtcccgcgaaggggttcagcgtgacctgctgccgctgattgaaggctgtactgtttccaccaagcacggcatggtcaaaaccgaccacatcctgtttatcgcctccggtgcgttccaggtttccagcccgtctgacctgatcccggaattacagggtcgtctgcctatccgtgtggaattacaggcactgaccacggaagatttcgagcgcatcctgaccgaaccgaacgcctcactgacggttcagtacaaagcactgatggccaccgaaggtgtggatatcacctttacagccgacggcatccgtaaaattgctgaatctgcatggcaggtcaacgaaaccaccgaaaatatcggtgcccgtcgtttacatacggtgctggaacgattaatggaagaaatttcctacgatgccagtgaaaaacagggtcaatccattgagatcaatgcggaatatgtgaaagatcatctggatcagctcgtggctgatgaagatttaagtcgctttattctgtaa

SEQ ID NO: 276153 - DNA, 531 bp, Morganella morganii
atgacaacaatcgtaagtgttcgccgtaatggccaggtcgtaattggtggtgatgggcaggcgacaatgggtaataccgtcatgaaaggtaatgtccgcaaagtccgccgcctctatcacgacaaagtcattgccggtttcgccggtggcaccgcggatgcctttaccctcttcgaactgtttgaacgcaaacttgaactccatcagggacacctgacaaaagccgccgttgagctcgccaaagactggcgtaccgaccgcatgctgcgcaaactggaagccctgctggccgttgccgatgaaaccgcatcgctgattatcaccggccagggggatgtcgttcagcctgaaaatgatctgattgccattggttccggcggcccgtacgcccaggcagcagcccgtgccatgctggaaaccaccgatctgagtgcccgtgaaatcgcggagcgcgcactgactattgccggtgatatctgtatctacaccaaccacaatctgaattttgaagaattaccttcaaaagcataa

SEQ ID NO: 276154 - DNA, 789 bp, Morganella morganii
gtgggacgcggacgctctgcgccgcgtaaaaaaagtaaatcacggaagaaaagtcaggcgaaaggcctgccgttcaccacattggtgatcgccgtggcactggtggtcgtttttgtcggcggcctgttctatctggtccataacaaaaaaagtcagaccgcttctgacagcatcattccgcctgcgcatcagcagagtaccggtaacggtctcccgccgatcccggaggagcgctggcgttatatcaaagagctggaaaaccgcgaagccggggtaccggaacagtattactccaacccgcaggcaccggccaaccgcattgatccgaatgccaaactgacccaggaacagcggctgctgctggagcagatgcagtctgatatgcagcaggcaccggttcagttacaggaagtaccggcaaacggcacggttccgcgctctcaggttgtggttaccggccaggatccgcagctgcgtatgcagccggaaacccgcccggcaccgcagccggccgaaaaaccggctgagaaaccaaaaccggtacaggaaaaaccgcaggctgcgcctgagcgctggttaatccagtgcggatcattccgtgagagtggtcaggcagaagaagtccgcgccggtctcgccttctccggtatcgaaagccgggtgtcccagggcggcggctggtatcgtgtgatgctcggcccgtatgaaaaatccgccgcgcagtcggtgaaaagccgtgccgctgatgccggcgtaacaaattgtattcttcgctccgccgggggttga

SEQ ID NO: 276155 - DNA, 1029 bp, Morganella morganii
atggaaccacgccgtaacgataccggcgcgacaatgaaagatgtcgccagagccgcaggcgtctcgaccgcgaccgtgtcgcggacactgatgaatccggagaaagtgtctgtgcagacacggcagaaagtggaaaatgctgtcctggaagtggggtattacccgcacaatctgtcccgggggatgaaacgtaacgaatcccgcactattctggtgattgtgccggatatcggtgatccgttttttaccgatattattgtcggcatcgaggaaattgccgccaaacacggctatctggttctgatcggtgactgccgttatcagcacaagccggaacacacctttgtgaatctgattgtcaccaaacaaattgacggtatggtgctgctcggctccgatgtgccgtttgacagccgccacgatgaacagcgtcacttcccgccgatggtgatggccaacgaatttgccccggagctggagctgccgacggtgaatattgataacctgaccgccgcctttaatgccacccattacttacagtcactcggacacacccgtatcgcctgtatttccgggccggaagaactgccgttgtgtcagtaccgtgtcgaagggtatattcaggccatgcgccgtatgggaatgccggtacgggaagagtatctggtgcgcggggatttcacccacgagagcggcgcggaatgtgccgcacagctgctggcactgccggaaccaccgaccgcgattttctgccacaacgatattatggctatcggcgttctctgggcagccagaaaacaggggctgacactgccgcaggatctctcggttgtcggtttcgatgatttaccggctgcacaatactgttcgccgaccctgacgactatcgcacagccccgttatgaaatcggccgtcagtctttcttactgctgctggaacagttgcagggacacaccgtggcaaaaggctcgcgcctgctggattctgatttaatcatcagagaaagtgcctgtgcgcctaaaagctag

SEQ ID NO: 276156 - DNA, 2202 bp, Morganella morganii
atgacagtcgtccgggtgatattaccagtacctctgacacaaacatttgactatttactgcctgataatatgccccgcccggtaccgggggcacgggtgattgtgccgttcggacggcagaaacaggcagtcggcattgtggctgaactggcggaaaccagcaccttcagcccggagaaactcaaaccggtcattgcctgtccggatgatgacacgctgtttcccggtgatctgtggccactgctgaactgggcggcgcagtattatcattatccgttaggggaagtgctgtttcatgccatgccgattttgctgcgtcagggcaaagaggccgcctttgcaccgctgtggtgctgggaagtgacgccggaagggcgggagattgatatccacaccctcaaacgctccccgaaacagcagcaggcactggcctgtctgcgccgtcagcctgtttaccgccatcagactgcggaatatgaactcagcgacagtgcattgcagggactgaaaaagaaaaacctgatcaccctgaacgatgtgcagccggagagcaaaccctggcagccgggatttgccgtcaccggcgaacgactgaaactcaataccgagcaggccaccgctgtgggagcgatccgcgcagagcagcatcagttttccccctggctgctggacggtgtgaccggctccgggaaaaccgaggtgtatctcagtgtgctggaaaatgtgctggctgaaggccgccaggccctggtactggtgccggaaatcggcctgaccccccagaccatcgcccgtttccgcgcccgttttcaggcaccggtggatattctccattccggcatgaatgacagcgaacggctggctgtctggctgcgggcaaaacgcggggagaccgccattgttatcggtacccgctccgcgctgttcacgccgtttacctctctcggcatcattattatcgatgaggagcacgacggctcctataaacagcaggatggctggcgttatcacgcccgtgatctggccgtgttccgcgccaagaaaaatgatattccgattgtgatgggaacggcgaccccgtcactggaaaccctgtttaatgtccggcagaaaaaatacaaagtcctgccgctgacgcagcgggcgggaaatgcacagcttgccgatcagcatctgctcgacctgaaagggctgccgctgacctccgggctgtcacaaccgctgatcaaacgcatccgccaccatctggccgcagataatcaggtcattctgttcctcaaccggcgcggctttgctccggcaatgctgtgccacgagtgcggctggatagcggaatgcccgcgttgtgaccatttttacaccctgcaccagaaccaccgcatgctgcgctgccatcagtgtgacagccagcgcccggtaccgaaacagtgtccgcagtgcggctccacacagctggtgccggtcgggctgggtaccgaacagctggaggagagcatcaccccgctgttcccggatattccggtcacacggctggatcgcgacaccaccagccgcaaaggcgagctggagcagcatctggcggatgtgcatcagggcggcgcacgcatcctgatcggtacccagatgctggccaaagggcatcactttccggatgtcacccttgtcgcgctgctggatgtcgacggcgcactgttctccggtgatttccgcgcggcggagcgctttgcacagctctacacccaggtctccggccgggcggggcgtgccgggaaacgcggcgaggtcattttacagactcaccatccggagcatccgctgctgaccgtgctgctggaaaaaggctatgccgccttcgccgcacaggcactgaatgagcggcagagtgtctgtctgccaccttataccagccaggtgatgatccgcgccgaagatcagaataatcagcgggcgaatgcattcctgcagacggtacgccagttattcgaatcccatccgctgcgggatgagcatttctggctgatggggccgctgccagctatccaggccaaacgcggcggacgtttccgctggcagttgctgttacagcatccgtcccgcagtcagctgcagaaaattgtcgcgcaggccattccgtatattcagcagatgccggaaagccggaaagtccgctggaatgtggatgtcgatccgaccgacggctga

SEQ ID NO: 276157 - DNA, 216 bp, Morganella morganii
atgaaaaaaggtattcatcctaactacgcagaaatcactgcaacctgctcttgcggcaacgtaatgaaaattaactctaccgcaggtcacaacctgaacctggacgtgtgcggcgaatgccacccgttctacaccggtaaacagcgtgacgttgcaagcggcggccgtgttgatcgcttcaacaaacgcttcagcgttccttctgcgaagaaataa

SEQ ID NO: 276158 - DNA, 318 bp, Morganella morganii
atggctgaatggaacggcgaatatatcagcccttatgctgagcatggcaaaaaaagtgagcaggtaaagaagattacagtttctatcccgttgaaagtgcttaaaattttaacggatgagcgcacgcgccgccaggtgaataacctgcgtcatgccaccaatagcgaactgttatgtgaagcatttctgcatgcttttaccggacagccactgcccgatgatgatgatctgcgcaaagaacgcagtgatgaaatcccggaagtggcgaaagaaattatgcgccagcatggggtcgacccggatacgtgggaatattga

SEQ ID NO: 276159 - DNA, 1161 bp, Morganella morganii
atggcacgcaaacccgcgacagcggcaattcataacggactcaatgaagagacccaattcggctgtgtcataccgccggtgtatctctcatcaacctataattttccggccttcaacagcccgcgtgaacatgattattcacggcgcggcaatcccgggcgggatatcaccgggcgtacgctggcggagctggaaggtggcgccggggcggtggtgaccagcagcgggatgtcagcactgcatctgctgtttaccgtgtttttgtcaccgggggatgtgattgtggcccctcatgactgctacggcggcacttaccggctgctcgacagttgtcagcagcgcggccattttaccgtccgctttgcggatatgaatgacgaggcatcgctcagtgccgcgctggcggaaaaaccgaagctggtactgattgaaacgccgggtaacccgctgctgcgtatcacggatatcgcggccgtcagtgagaaggcgcatcaggccggggcgctggtggcggcggataacacgtttctcagcccggcattacagcagccgctggcgctgggggcggattttgttattcattcctgtaccaaatacctgaacgggcactccgatgtggtggccggtgtggtgatcgccgcagacgcggagcactgcgaaacactggcgtggtgggccaataatatcggtgtgacgctgggggcgtttgacagctatctgctgttgcgcggtatccgcacgctgatcccgaggatcaccttacaggaaaaaaatgccggaattctggcggattatctggtgcgccagccgctggtgaaaaaagtgtattatccgggactggtgacgcatcccgggcatgaactggccgcaaagcagcagaaaggattcggcgcaatgctcagttttgacattaatggtgatgaagctgcaatttcccgctttttatctcacctgtctctctttacactagcagagtcattgggcggggtggaaacgctgatttcccatgccgcgaccatgacacatgcgggaatgccggagcaggcgcggcatgcagcgggaatttcagacagcttattacgtatttctgcggggattgaggacagcggtgatttgattgctgatctggatcgcgcatttcagtcagtgactaaggggtaa

SEQ ID NO: 276160 - DNA, 2433 bp, Morganella morganii
atgagtgcgttggcgattgatgaaaaagggcgtcagttacataaattcggcggcagcagcctggcagatgcaaaatgctatctgcgggtggcgaatattatggcgaactacagtgagccggatgacctgatggtcgtgtctgccgccggcagcaccaccaaccagctgattaactgggtcaaactgagtcagagtgaccgcgctgccgcagagcaggcgcaacagaccctgcaacgctatcagacagcccttatcagtgatttgctgccggagattcaggccaatgtcctgattttccagtttaatgatgatattcaccgcctggcggaactgctgaaacacccgctgaatgatgtgatttacgcggaagtggtcggccacggggagatctggtctgcccgtctgatggcgcatgtgcttcaggagcagggcatggcagcgcaatggctggatgcccggacatttctgtgcgcggagcgggcggctcagccggaagtcgatactgcgcggtcgcagccgctgctggcagagctgctggcgctgcatccgggtaaacgcctggtggtgaccgggtttatctcccgtaaccgtgccggggaaaccgtgctgctcggccgtaacggcagtgactattccgccactcaggtcggtgcgctggccggggtgaaaaaagtgactatctggagtgatgtcgcgggggtttacagctcggatccgcgcaaagtcaaagatgcctgtctgctgccgctgctgcgtctggatgaagccagtgaactggcacgtctggcggcaccggtgctgcatacccgcactttacagccggtgtccgtcagtgatatcgatttacagctgcgctgcagttaccagccggaacagggctcgacaaaaattgagcgtgtgctggcatccggcaccggggcgaagatcgtgaccaaccatgatgaggtttgtctgattgatatccgcctgccggccggggatgacgccagagcgcgttataaaagtattgatctgctgcttaaacgcagccagatccgtccgctggcggtcggactgcataatgatgacaatcttattcagctcagttataccgccgaagtggcagacagcgccctgcatgtgctggaaagcgccggactgccgggcacactgacactgcgtgacggcttctcgctggtggcgctggtcggggcgggggtctgtaaaaacctcctgcattaccaccgtttttatcagcagctcaaagatcagccggtggagtttatctggcaggccgaggacggcatcagcctcgtggctattctgcgcacccgtcagaccgggcatgtgattcagggtctgcaccagagcctgttccgtgcggaaaagcagatcggcctgatggtgttcggcaaaggcaatatcggcagccgctggctggaactgtttgcgcgtgagcagagtaatctctctgcccgcagcgggtttgaatttgttctcgccggggtggcggacagcgaaagagcgctgctcagctatgacgggctggatccgagccgcgcactggctttcttcaatgaggaagcagagccgatcgccgatgaggacaccctgtatctgtggatgcgcaaccatccgtttgatgacctggtgattatcgacctgactgccagccaaaccctggcggaaagctacgccgattttgccgcgtacggtttccatgtcatcagcgccaacaaaattgccggggcggcaaaaacccgcgattaccgccagatccgcgatgcattccgcaaaaccgggcgtcactggctgtacaacgccactgttggtgcgggactgccgatcaaccactgtgtgcgggatctgcatgaaagcggagacagcattattgcgatcagcgggatcttctccggtacgctctcctggctgttcctgcaatttgacggcactgtgccgttcagtgaactggtggaacaggcctggcagcaggggctgaccgaaccggatccgcgtattgatttatccggccgggatgtgatgcgcaagctgattatcctcgcccgtgaagccgggtatgaaattgagccggaagatgtccgtgtggaatccctggtgccggaagcggcacaggaaggcacaccggatcacttcttcgagaatgtcactgcgctgaatgaacagatggcctgccgcctggaagctgcccgtgaaatgggcatggtgctgcgctacgtggcccgttttgatgccaacggcaaagcgcgggtcggggtggaagcggtccggcctgatcatccgctggccgcactgcagccgggggataatctctttgcggtggaaagccgctggtaccgcgataatccgctggtgatccgcgggcctggagccggacgtgatgttactgccggggcgattcagtcagatttaaaccgtctggcacaattgctgtaa

SEQ ID NO: 276161 - DNA, 2634 bp, Morganella morganii
atgaatcaacaatattccgcaatgcgcagtaacgtcagtatgctcgggaaactactcggagacacgatcaaagaggcccagggtgaacatattctcgagaaagtagaatccatccgtaagttatccaaagcgtcacaggccggtaatgaaatccagcggcagaagctgctgatgacactgcaaaatctatccaatgaagaactgctgccggttgcccgcgcatttaaccagttcctgaatttaaccaacgtggcggagcagtatcacagcatttcgccgcacggtgaggcggccagtaatccggttgccctggcggcgctgtttgatcagctgaaagccaaaaactttaccaatgaagagatgcgcaaggccgtggatgagctctctattgagctggtgctgaccgcacatccgaccgaaattgcccgccgtaccctgatccacaaactggtggcggtgaacacctgtcttgcacagctggatcatgatgacctggctgattatgagcatgatcgtattatgcgccgtctgcgtcagctggtggcacaggcctggcacactgatgaaatccgcaaagaccgtccgacaccgcttgatgaagcgaagtggggctttgctgtggtggaaaacagtctgtgggaaggagttccggcgttcctgcgcgagtttaacgagcagctcgaggcatcactggattacaacctgtccgtggaagccacaccgatccgctttacctcctggatgggcggtgaccgtgacggtaacccgaatgttacggcagatatcacccggcgcgtgctgaccctcagccgctggaaggctgctgatcttttctataatgacattcaggtgctggtctccgagctctccatgagcgagtgcacgccggagctgcgtgagcgcgtgggtgaggatgccgccgagccgtaccgcgttatcaccaaacagttgcgtgcccgtctgaaaagcacactggactatctggagcgctgcctggccggtgaaccggctatcaaaccggataacctgctgaccgataacgaagagctatgggagccgctgtatctctgctaccgctcactggttgagtgcggcatgaagattattgccaacggtcagttgctggataccctgcgccgtatccgctgcttcggtctgcagctggtgcgtattgatgtgcgccaggaaagtacccgtcataccgaagcgctgtctgaactgacacagtatctcggcctcggggattacgccgcctggccggaagaggaaaaacaggaattcctgttgcgtgaactccagtcaaaacgtccgctggtgccgcagaactgggagtgcagtaatgaaacccgcgaagtttttgatacctgccgggtgattgccgaatcaccggaaaattctgtcgcctcctatgtgatttcgatggcaaaagtgccgtcggatgtcctggcggtcaaactgctgctgaaagaatccggcagcccggtcacattgccggtcgcaccgctgtttgaaaccctcgatgaccttaataacgcagagagtgtcataacccgcctgctgagcatcgactggtaccgcaatctgattaatgaccgccagatggtgatgatcggttactctgactctgccaaagatgccggggtaatggcggcgtcctgggcacaataccgcgctcaggatgcactgattaaagtctgcgcccgtgaaggcgtgacactgacgctgttccacggacgcgggggcaccatcggccgcggcggtgcaccggcacacgccgcactgctctcacagccgccgggaagcctgaaaggcggtctgcgtgtgacagagcagggtgagatgatccgctttaagtttggtctgccgcaggtcactatcagcagcctggcaatgtatgccagcgccagcctggaagccaatctgctgccgccgccggagccgaaaccggagtgggccgcgattatggatcgcctctctgatgtctcctgtgagatgtaccgcgactatgtccgcgaacagccggattttgtcccgtatttccgtgcggccaccccggagcaggagctgggtaaactgccgttgggatcccgtccggcaaaacgccgtccgaccggtggtgtggaaaccctccgtgcaattccgtggatttttgcctggtcgcaaaaccgtctgatgctaccggcctggctgggtgcgggcgcggctctgaaaaccgccgtggatgaaggcaaccgggcaatgctggaagtgatgtattaccagtggccattcttcagaacccgtatcggtatgctggaaatggtgtttgccaaagtcgatttatggctggcggaatactatgaccagcgcctggtggagccgcgcctgtggccgctgggggcaaaattgcgcgaacagttatcacaggatattaagagcgtcctgatgatttccaaagatgagcagttaatggcggatctgccgtggattgcagaatctatcgccctgcgtaacgtatacaccgacccgctgaacgtcctgcaggccgaactgctgcaccgctcacgtgaatgcgagcagtcagatccgcaggtagagcaggccctgatggtgactattgctggtattgctgccgggatgcgtaataccggctga

SEQ ID NO: 276162 - DNA, 336 bp, Morganella morganii
atgtcctactacaaagatgtgatcaaagatatcgccggcaacatgcaggaattacacaaaaatattccggacgtgatgggagcatttatgtccatcatgcaaagcagcaccgctgacggcgcactggataaaaaaaccaaagagctgatagccgtggcgattgccgttgccaaccgctgtgacggttgcattggttttcataccaaaacgctggtggagctgggggtaacagagcaggaattatcagaagccctgggtattgctatcggcatgggcggcgggccgtccgtgatgtatgcggcgaatacattaaaggcatttaaagagttctcataa

SEQ ID NO: 276163 - DNA, 900 bp, Morganella morganii
atgagttttttacatatagaccagcacgaagcactgaatcagaacctggcagaactggccggccgtgtggccgtatcctttgaattctttccgccgggcacaccggaaatggaaaaaaccctgtggcagtccatcgaacgtctcagtgtgctgaagccgaaatttgtttccgtcacttacggggcgaactccggcgagcgggaccgcacccattcggtgattaaaagtatcaaagagaaaaccgggctgattgctgttccgcacctgacctgtattgatgccacccgtgatgagctgaaaactatcgccggagattactgggataacggcatccgccatattgtggcgctgcgcggcgacctgccggacagcagcagcaaaccggatatgtatgccgctgacctggtcggtttgttaaaatcggtcgccgattttgatatttccgtcgccgcttacccggaagtgcatccggaagcacgcagtgcgcagtcagacctgattaacctgaaaaagaaaattgatgccggtgcagatcgcgctatcacgcagtttttctttgatgtcagcacctatctgcgtttccgtgaccgctgcgcggcggcggggattgatgtggagattgtaccgggtattctgccggtctctaacttcaggcagttacaacgctttgcaggaatgactaatgtccgcatcccgggctggctcggcaccatgtttgaagggctggatgatgacccggaatcccgcaagctggtcggggcttccgtagcaatggagatggtgaaactgctcagccgtgaaggcgtaaaagatttccacttctacaccctgaaccgtgcggaactgacttacgctatctgccataccctgggtgtccgcccggcggcctgcgtggcataa

SEQ ID NO: 276164 - DNA, 1161 bp, Morganella morganii
gtgaatattaaattacctgcatttattgagatttatcgtcagctcatcgcggcaccttccatcagttccacggaagcggaatctgatcagagcaatgaaactgttatcaatctgctggcgacctggtttgaaaccctggggtttgatgtcgaggtgcaacccgttccggaaacgcgcggcaagttcaatctgctcgcgagtctcggagatggcgacggcggtctgctgctgtgcggccacaccgataccgtcccgtttgatgaaggccgctggagcaaagatcccttcaccctgacagagcagaacaacaagctgtacgggctgggaacggcggatatgaaaggtttcttcgcctttatcctcgatgcactgcgtgatatcagtgtgaaggatttgcagcacccgctctatatcctcgccaccgcagatgaagaaaccaccatggccggggcgcgctattttgccgccaatgccgctatccgcccgtcctttgccattatcggcgaacccacctcgttacagccggtgcgggcacacaaaggccacctctccaatgctatccgcattaccggtcagtccggtcattccagtgacccggagcgcggtgtcaatgcgattgagctgatgaatgaatccatcacgcacctgatgtcgctgcgtaacgagctgaaagaaaaattcaataacccggcgtttgttatcccgtatccgaccatgaatttcggtcatattcatggtggtgatgcggcaaaccgtatctgcggctgctgtgaattgtatatggatatccgcccgctgccgggcatgaccctcagcgatattgatgacatgctcaataccacgctggagccggtgaaacaacgctggccgggacggctggcgattgaggagctgcatgcgccgatcccgggttacgcctgcccgacggatcataaaatggtcggtgtgattgaaaacctgctcggcgaaaaagcgcagacggtgaattactgcaccgaagcaccgtttattcaggatctgtgcccgaccctggtgctcggccccgggtcgattgaacaggcgcatcagccggatgagtttctcgaaacccgctttattgagccgacccgcgaactgctggcccagcttgtcacccatttctgctgcaaaacccccgaataa

SEQ ID NO: 276165 - DNA, 1011 bp, Morganella morganii
atgttgaaaacgctgattatcggtgccagcggatataccggtgcagagctcgctgcttatatccggcgccacccgcagacggaactgaccggcctgatggtttctgccaatagtgcggatgccggaaaatgcttttcggatctgcatccgcagttcagaggcctggtggatctgccgctggagccgctgacagacccggctgccgttgcacaaaataccgatgtggtgttcctggcaaccgcccatgaggtcagccatgacctcgtgccggttttccttgcggcaggttgcacggtgtttgatctttcaggcgcttaccgcgttcagcaggataatttttacccacaatactacggatttgaacacaaacataccgccttattggcgcaggccgtgtacgggctggcggaatggcagcatgacaacatccgcaccgcgcagctgattgccgtgccgggctgttatccgacggtctcccagctggcgctgaaaccgctgctggataatgacttactgaatctgacccaatggccggtgattaatgccaccagcggcgtgagcggcgcggggcgtaaagccgcgctgaataacagtttttgtgaggtgagtctgcaaccctacgggctgtttactcaccggcatcagccggaaattgccgcgcatctcggcaccccggtgatttttaccccgcatctcggcaactttaagcgcgggatcctggcaaccatcacctgcagactgaaaagcggcgtcaccgcagagcaggtcagcgcggcctatcacaaggcctatgacgacaaaccgctggtgcgggtgtatgaccacggcgtaccggcactgaatgccgttgtcggccagccgttctgcgacctgggctttgccgtgcagggagagcatctgattgtcgctggcgcagaggataatctgctcaaaggggctgctgctcaggcggttcagtgcatgaatattcgttttggctttaatgaaacgctgtccctgctgccacagtaa

SEQ ID NO: 276166 - DNA, 774 bp, Morganella morganii
atggaaccattagtcatcaaattaggcggtgtgttactggacagcgaagaagctctcgggcgtttattcaccgcactggccgcataccgggcgtcaaatgaccgccgcatcgtcatcgttcacggcggcggctgcgtggtggatgaactgatggcgaaattacagttaccggtggtgaaaaagcagggactgcgggtcaccccggcggatcagatagatattatcaccggggcgctggcgggcagtgccaacaaaacactgctggcgtgggcgacccgttatcagctcaacggtaccggcttgtgtctcggggatggtcagagtgtgaaagtcacaccactaagtgatgaactgggccatgtcggtaaagcggaacccggcagcccggttctgctgaatctgttactgaacaacggttttctgccggtcatcagttccatcggcatcacggaagacggactgctgatgaatgtgaatgcggatcaggcggctaccgccattgcggaaacgctgggcgcggatctggtcctgctgtcggatgtcagcggcatcctggacggcaaaggacagaaaatcaaagcactcgatggtgtacatgcacagaaaatgatcgacgacggcattatcaccgacggcatgattgtaaaagtgaatgcggcgctggaagcggcggccacactggggcgcccggtggatatcgcctcctggcgtcatgcggatcagctgcatttattatttgatggcgaagccatcggcacgcggatttccgcgtaa

SEQ ID NO: 276167 - DNA, 1224 bp, Morganella morganii
atgacagaggcaaaaaaaacaggcattaaaaaaatcgtactggcttactccggcggtctggatacatcggcgattattccgtggctgaaagagcattatgataactgcgaagtggtggcatttgtcgccaatatcggccagagcgcggaagatctcgacggtgttgagcagaaagcactgaactccggcgcatcttcctgctatgtcgtcgatctgcgcgaagaatttatcaaagattttgtctatccggtgctgaaaagcggcgcactgtatgaaggtaaatatctgctcggtacatcgatggcgcggccgattatcgccaaagcccaggtggagctggcactgaaagtcggcgcggatgccctggcacacggtgcgaccggcaaagggaatgaccaggtgcgttttgagggaacctacaccgctctggcgccacagctgaaagtcattgcgccgtggcgtgagtgggatctgcgttcccgtgaggctctgctggattacctgaaagtccgtaatatcccgaccaccgcgaccctggaaaaaatctacagccgtgatgaaaatgcgtggcatatctctaccgaaggcggcgtgctggaaagtccgtggaatcagtcgaatgccgattgctgggtgtggaccgcagatccgcaggaagccccggatcagccggagctggtcactgtcaccattaaggccggtgaagtcaccggggtgaacggcaaagcgctgtctccgtataactgcctgaatgccctgaacgaactgggtgcgaaacacggtatcggccgcatcgatattattgaaaaccggctggtgggcatgaaatcccgcggctgttatgaaaccccggggggcaccatcatgatggcggcactgcgcggactggaagaaatcatccttgaccgcgacagcttcaaatggcgtcagcagattggtctggagatgtcctatgtggtgtatgacggccgctggtttgccccgctgcgtaaatccattcaggcagctgcggattccctggcggaagaggtcagcggtgaagtggtgctgaaactctataaaggacaggtcacggcgattcagaaacaatccgccaacagcctctattccgaagagttcgccactttcggcgaagatgacgtgtatgaccacagccatgcgggcggctttatccgcctgtattcactctcctcgcggatccgtgcactgaaagcgcagaaataa

SEQ ID NO: 276168 - DNA, 1380 bp, Morganella morganii
atggcactgtggggcggacgcttcagtcaggaagcagatcaacggttcaaacaattcaacgactcgctgagattcgactatcgtctggcggagcaggatatcaccggctctgtggcctggtcgaaagcactggtgacggtcaatgtgctgaccgcacaggagcaggcggcgctggagcaggcactgaatgagctgctggcggaagtgcaggctgacccgcgtgccattctgcgcagtgatgcggaagatatccacagctgggtggaaggcaaactgatcggcaaagtcggcgatctggggaaaaaactccacaccggacgcagccgtaacgaccaggtggccacggatttaaaactgtggtgcaaagaggcggtcagccagatcctcgcggcattgcaggaattacagcaggcgctggtgctgacggcagaacagaatcaggatgcggtgatgccgggctacacccacttacagcgggcacagccggtgacatttgcccactggtgcctggcgtacagtgaaatgctggcgcgggatgaaagccgtgtccgcgatgccctggcgcgttttgattacagcccgctcggctcgggtgcgctggccggaaccgcgtatgccatcgaccgggaacagctggccggctggctgggattcgccggtgcgacccgcaacagcctcgacagcgtgtctgatcgcgaccatgtgctggaactgctcagtgatgcggcgatcagcatggtgcatctctcccgctttgctgaagatatgattttcttcaacagcggcgaagcagcgtttattgaattatccgaccgcgtcacctccggctcttctctgatgccgcagaaaaagaacccggatgctctcgagcttatccgtggcaaatgcggccgggtgcagggcgcactgaccggcatgatgatgaccctcaaaggtctgccgctcgcctataacaaggatatgcaggaagacaaagaagggctgtttgatgcactcgacagctggctggactgcctgcatatggcggcactggtactggaaggcattcaggtgaaacgtccgcgctgcgaggaagcggccaaacagggctatgccaacgcgacagaactggcggattacctggtggcaaaaggcgttccgttccgcgaggcgcatcatattgtcggtgaagtggtggtcggcgcgatagcaaaaggtgtggcgctggaggaaatgccgctgacagaattgcaggaattcagtccggtaattgccctggatgtgtatgacatcctgtcacttcagtcctgtctggaaaaacgctgtgcgaaaggcggtgtttcaccggagcaggtggctgcggctatcagtgaagccaaaatccggctgaaactggtgtga

SEQ ID NO: 276169 - DNA, 222 bp, Morganella morganii
atgagtaaagcacaagactggcatccggcggatattattgccgccatcaaaaaaagaggaacatcattgtcggcactgtcgcgtaatgccggattacggccatcgacactgaataatgcccttgcccggcgctggccgaaaggagaaaagattattgcggatttcctgaatgtatcaccggccgaaatatggccttcgcgttatatgcaaaaaatatactga

SEQ ID NO: 276170 - DNA, 777 bp, Morganella morganii
atgaatattcaaagtatcgcaatggaagaattatgtaataatctgacaaatgatttttctcaatattttgattggaatgatatgggtattaattattccagaattaatctttctgaaaaatctgtcaatgtattatccagtgactacgactggctgctgacattctggggggatgatatggatttacgtatcggtgaacgcctgagtgcaggaattcagtactggagcaactacagtgatgagtacagaacggttttacggaagggaaaaaacagtcagtttaaagtagatttctgtacgaagcacggcgatttatttgagattgtgtccattaactcaggagaaaaattatctgtcgcggatatgatgaccatctataaatggaagccggttatttctgattacgcagacaggctctggcagaaaaaagaagaattaattttaccgttgcgggcagagataaatgaatctgataatgaaagtgaccggataaataatgactctgctgatattttagatatccaccaatatatgcgtttcggcaatatccgttttacccgcaaagaaatcctcaccatccggttattattatcccatcgtaaagtaaaagagatcagtgcagtgcagggatgttcagaagcatcagagcataaacgtattcagcggataaaagaaaaactgggctgcccgcatgcctcgtccggcggggtgtttcatgcactgaaagaaaacgggatcacactggcgtgcctggatacgctggtgagtctgccataa

SEQ ID NO: 276171 - DNA, 1203 bp, Morganella morganii
atgaaatggagataccggctgggtgccgtggcagggaatgcactggagtattacgatatcgcggtttttgcggcaatctccgtatatctcagcgctgaacttgaaaggctgggttatgaatcagcaaccgaaatggtctggggaatatttgcgctgcgttttctggcacgtccgatcggcggctatattatcgggcgttatgcggacagagcagggaaaaaagcggcattggttttaaccagccagattaccggcgttgcaacattatgtatggcgctgttacccgttcatttgctgggttcttatacaccgattgcgattctgctgctgcagatggtgttgtctttcagctttgccggagaaaatccgtcgctgatgacatatttattcagtgatgcaaagaaaaatgaatatgccagaatttccgccctgattgtcggcagttctgttaccggcgttattgtgtctctcggattggtgctggtactggaaaatatgctcacacctgagatgatgcaaactgtcggctggcggataccgctgctggtcggggtgctcaatattattatgagtttttggtttcgcaccaggttacctgcactgccggtacaatcggttatcacaacgcgtgttgacggcctgcgggcattactgattttcctgatgaccgtgccggggtctgcggtattctattcttataatatgtcttcttcacttgtacgggatcatatcggggcggaatccctgaaaagcagttatgcgattttttcatcctgtttatatctgtgctgtattctgacctgcgggtggctgacggataaatacagctcagcagaaaaggtgtttaaaagcgcgtcagcggcactggtcattttttctgtcccgctttatttcttactcagcagcgaacaaaccgccctggtcattaccgctcagttgatcctgaccattaatgcgtcctgtatctcctgcacactggcatcggtgatcgccggtatttcccgtggtcacaccaccaccttaagtctgggttataacctggcatccaccctgatcggcggatttaccccgttaattatcggctggctggtgtcatataacctgacatatgccggggtgtatattgccgcctccggtctgaccgtcatgctttcttaccggttaatgcggaatggtgatgtaaaggtatacgcttaccggtaa

SEQ ID NO: 276172 - DNA, 912 bp, Morganella morganii
atgaatatccgggatttggaatatctggtggcactttctgagcataatcactttcgccgtgcggcagatgcctgtcatgtcagccagccgacactgagcggacagatccgcaagctcgaggatgaactgggtgtgatgctgctggagcgaaccagccgcaaagtcctgtttacccagcagggaatgctgctggtggatcaggcccggaccattctgcgtgaagtgaaaatcctcgaggaaatggcctcccttcagggagaaagcatggcagggccgctgcatatcgggctgatcccgacaatcgccccgtatctgctgccgcatatcattccggaactgcaccggctgtggccgaagctcgagatgtatctgcatgaagcccagactcatcagttgctggcacaactggacagcgggaaactcgactgcgcgattctggcgcgggtaaaagaaaccggcagctttattgaagagccgctgtttaatgagccgatgaaactggcgatttatgatgagcacccgtgggcatcccgtcaggaagtggaaatgcatgaactggcgggggaaaaactgctgatgctggaagacggacactgtctgcgtgatcaggcgatgggattctgtttccaggcaggggcgcgggaagatacccacttccgggcgacgagtatggaaaccctgcgcaatatggtggcggcaggcagcggtatcacgttactgccggacctggcgattccgccggagcacaaacgcgacggcgtgtgttatctctcctgcacgaatcctgagcctttccgtgaagtgatcctggtttaccgtccggggtcgccgctgcgcagccgttacagccagctggcagaggctatccgtgcaaaaatgtgcgcttattaccagcaggagcctgcggcttaa

SEQ ID NO: 276173 - DNA, 1401 bp, Morganella morganii
atgcaacagaaccagtttgacgccattgtcatcggctccggcccgggtggtgagggtgtggcaatgggacttgtgaagcagggaaaacgggttgccgtaattgagcgttatgatgacgtcggcggcggctgtacccactggggaacgattccttccaaagcgctgcgccacgcggtcagccgtattatcgaatttaaccagaatccgctgtacagtgataactcccgggttctgaaatcttcattttccgaaatcctggctcacgccggccgggttattacccagcagaccggcatgcgccgtggtttttacgagcgcaacggctgtaccatgttctgcggcgaagctaaattcaccgaagagggtgatgtccgtgtgcgctacagtgacggcagctgcgatattctccgcgcggagaatgtggttatcgccaccggttcacgcccgtactgcccgccggatgtggatttcagccactcccgcatttataacagcgacaccattctgtcactgacacatgaaccgcgccatgtcatcatttatggcgccggggttatcggctgtgaatatgcctctattttccgtggcctgagtgtgaaagtggatctgatcaacacccgcgaccgtctgctggcgtttctcgaccaggaaatgtcggacgcactcacctatcatttctggaacaacggcgtggttatccgccagaatgaagagtatgagcggattgaaggtacggatgacggtgtgattattcacttccgctccgggaaaaaagtgaaggctgactgcctgctctttgccaacggccgcaccggtaacacggatagtctcggtcttgagcatgtcgggatcaccgctgacagccggggactcatcagtgtcaatgatacttaccagaccagtaatccggcgatttatgcagtcggggatgttatcggctacccgagcctcgcctcggcggcctatgaccaggggcggattgccgcccgtgctattactcatgacggcaatgcgccgctgcatctgatagaggatatcccgaccgggatttacaccattccggaaatcagctcagtcggcaaaacagagcagcagctgacggcgatgaagatcccgtatgaagtgggccgggcacagttcaaacatctggcgcgggcgcaaatcgccgggctggatgcgggcagcctgaaaattctgttccaccgcgaaacccggcagattctggggatccactgcttcggcgagcgtgcggctgagattatccacatcggccaggcgattatggaacagaaaggtgaaggtaataccatcgattatttcgtcaataccaccttcaactacccgacaatggcggaagcttaccgggttgccgcactgaacggacttaaccgcttattttaa

SEQ ID NO: 276174 - DNA, 660 bp, Morganella morganii
gtgagtaacgtgattggtgtaagagcaaaacagaaagaaaaaacccgccgggccctgattgaagccgccttcagtcagctcagcgccgagcgcagcttcaccagtctgagcctgcgcgaggttgcccgtgaagccgggatcgctccgacctctttttaccgtcatttcaaagatgtggatgaactggggctgacgatggtggatgagagcgggctgatgctgcgtcagctgatgcgtcaggcgcgtcagcgtatcgccaaaggcgggagtgtgatccggacatcagttgcgacatttatggagtttatcggtaataaccccaacgctttcaggttattattgcgtgagcgctccggcacatctgcggaattccgtgcagcggtcgcacgggaaatccagcattttattgcagaactggcagactatctggaactggaaagtaaaatgccgcgtcagtttactgaattgcaggcagaatcgatggtgaccatcgttttcagcgccggtgcggaagcactggatattgatccggaaaagcgggcgcacctggaagagcggctggtattacagctgcggatgatcgccagaggcgcgtattactggtaccgccgcgaacaagagaaaatgcatgaccccgattacaacaccccattaatctga

SEQ ID NO: 276175 - DNA, 375 bp, Morganella morganii
atgacggaacaacatcgccgtgacaaaggaaccttactgctcgcatttattgtcgggctttcagtacacggtactttttcagcactttttaattccgcagtccatttttcggtttttccggttctggcattgtgccttgcggtctattgtttccatcagcgttaccttaaccagatgctgccggaaggtatgccgaaactggtgaccggtacgttcttcctgggtctgttctcctataacgccctgatgcgcgcagaatatccggaagccggatcaaactacttttctgccgtctttattgtgattatcgccttgtggctttaccgggcgatgaaacagcgccgtgccaccgggcaggatgaagtaacagagtaa

SEQ ID NO: 276176 - DNA, 1473 bp, Morganella morganii
atgcacttttcacaacaaacgtcgcaccgccctgtctggttttgggtcactgcttatgccacgctctggattattgtcagctacggattggatccgacggtaccctacgatgccgtggaagccctgaactggggcaaaaccggtgaatggggtgcaccgaaaaatccgtggctggtcggtatgctgatgtacccggtcattgccttccctgaccttattgccgccgatttttactggtacttcattcattttaccggcatcggtattggtatgtgcggggtgtggtatctgacacaccgcctcacacagcgttctgattatgcctggctggcactgttgtcactgaatctgtcggggatcattaatttcgatttaatcccttacaatgataactatatcctggtcaccttctggccgtggatgctgtacttttttgtccgcgccgtttatgacaatccggcctggtggattggttttgcactgacatccggactggcgaccatggggaaatattccacgctcgcactcaccgggatggcctttctcttcaccctgtttgtgccgaaagcgcgggaaagttaccgttccccctggttttatgctgcgatagctatctggtttgcactggtcgtcccgaatgttatctggctggtaaataatgattttgccgcctttaaatgggtcgattcacagattaaaaccggcctgaccctgaaaaccaccggttcgctgtttacggtgttctatccgctgatcattattgccgtcattatccgcctgaaaggcggccgtttcggctggccgaaagaacaggcacggcggcttattaatattatgattctggcaccactcgcggtgatttatgtctggttcaccttccataaaggcggacgtattaccgagtggctgcaaccttttgttctgctgtgcattccggcactgatctgctctgtggtcacgccgccggtaaaaccgctgaaaaacgtgatgaacgggctgatagtctttgcggttatcgttatcacaggctatgccgcagtgatgagcctcaatatccgcgatgccgggcaaaaaaatatcgggatgaaaacttttacggctgaggcagaaagctggtgggaacaggaaaccggaaaaccgctgaaatacaccggcggggaatatctgcatgaatgggtaacgttttacggtaaacatcagccggaaacacttcagccatggctcaatgagtttggccatgattaccgggcaaccaatatttataatctgcatgtcacccgggatgatatccgccgtcacggtgcgctgctgatcggcaaaataaaccggacctgtgcagacgagccgtttaccggtgccctggaagactggccggatctggttatcgcaaagcgtaaacaggtggtctatcagtcacagccgggcgccaaagaagaggcggtctgcctggggattgtccggccggaacaataa

SEQ ID NO: 276177 - DNA, 504 bp, Morganella morganii
atggccgctatttcaaaaaaaccagcccggtcacggacaccaaagaaaagccgtgaggagctcaacgcggaaggccgtgaacgcaaacggcagaaaaaacaccgcggtaatccgtccggtgcccgtcagcaggatgatgcccgcaagaccggccgtggtgcggagaatgcggttgctgatccgcgtatcggcagtaaaaaaccggttccgctgtttgcggaaggtaaaacctccgtcaaaccggtggtaaaaaaaccggctgagccggtcaaagccagactgtctcctgaagaggaactggcaaaactcgagaatgatgagcgtctcgatgcactgttgctgcgcctggagaacaacgaaaccctgaccgcagaagaaaacacctacgttgataccatgctggaacgtatcgacgcgctgatggaaaaactcggtatttctcttgatgaagatgatgatgaagagaaaaccgacgacatcatgcaactgctgaaagggcgctga

SEQ ID NO: 276178 - DNA, 1371 bp, Morganella morganii
atgtctgacgcgatcatctgggatctggcattgatccggaaatataactattccggtccgcgatacacttcgtatccgaccgcactggaatttaatcagcagtacagtgacagtgattttatcgcctcagcaaaccgctatccggagcgcccgctgtcgttatatgtacatatcccgttctgccataaattatgttacttctgcggctgtaataaattagtcacacgtcagaagcataaggcggatgaatatctggctgtgctggagaaagaaatcaccgcccgtgccccgttgtttgccggacgcgaagtgcatcagatgcactggggcggcggtacgccgacctatctcgataaagcacagatcagccgtctgaccggcatgctgcgtcagcatttctgctttgcgccggatgctgagctttccattgaaatcgatccgcgtgaaatagaattggacgttatcgaccatctgcgggcggaaggatttaaccgtctgagcatgggggtgcaggatttcaacaaagaagtgcagcgcctggtcaaccgcgagcaggatgaagcgacgatttttgcgctggtggagcgcgcccgggcaaccgggtttgaatccgtcagtatcgacctgatttacgggctgccgaaacagaccccggaaagttttgcctttaccctgaaacgggtggcggaactgtcaccggatcgcctgagtgtctttaactatgcccatctgccgaacctgtttgccgcccagcggaaaatcaaagatgaagatctgccttccgcagagcagaaactgacgattttacagcagacgattgaaaacctgaccggcagcggttatcagtttatcggcatggatcacttcgccaaaccggatgatgagctggcggtcgcacagaataacggcatcctgcaccgtaatttccaggggtacaccacccatgaggagtgcgatttgctgggctttggtgtctctgcgatcagcatgctgggtgaccactatgcccagaaccagaaagacctgaaaacctggtatgcacaggtggaagagcgtggcaacgggttgtgccgtggtctggtgctgacggaggaagactgcctgcgccgcgatgtgattaaggcgctgatctgcaacttccggctggattatccgcagattgaaaagcagtataacctggattttaaaacccatttcgccgaagatttgcaattattgcagccgatggcggatgacgggctgattgagatccgcgacgatgctctggtggtcacaccgcgcggacggctgcttatccgtaatatctgtatgtgttttgatacctatctgcgcaaccagatgcgtcagcgtcagttctcccgcgtgatttaa

SEQ ID NO: 276179 - DNA, 1455 bp, Morganella morganii
atgcagccgggaaaaatctgggtcgttgatgatgacagcgcgatccgctgggtgctcgagcgcgcactgagcagcgccggttatgcctgtgtctgttttgacagtgctgaaaatgcccttgcggccctgaacagcggacagccggacgtgctgatctccgatatccggatgccgggcatggacggtctgtctctgctggcggcggtcaaacagcataacccgttactgccggtgattattatgaccgcccattccgacctggatgccgcagtgaatgcttaccagcagggcgcgtttgattatctgccgaaaccctttgatattgatgatgcagtcacgctggtggcccgcgccctggaacattaccgcgagcagcatctgccggtacggcaggaagcggccgccgatccggtgtccggcattatcggtgaatccgctgccatgcaggaggtataccgggtgataggccggttatcccgctcctccatcagtgtgctgattaacggcgaatccgggaccgggaaggagctggtggcgcacgccctgcaccatcacagcccgcgggcggatgctccatttattgctctcaatatggcggcgatcccgaaagatttgattgaatcagaactcttcggccatgaaaaaggcgcatttaccggggcatcacaggtgcggcaggggcgttttgagcaggcggacggcggctcgctgtttcttgatgaaatcggcgatatgccgctcgatattcagacacgactgctgcgtgtgctggcagaaggccagttttaccgtgtcggcggttatgcgccggtaaaagtggatgtgaggattattgccgccacccatcaggatctggagcggctggtggcggaaggtaaattccgtgaagacctgttccaccgcctgaatgtgatccgcatgcagctgccgccgctgcgggaacgaccgggagatattccgcgtctgacacgccattttctgcagaaaaccgcaaaagagctgggaacagaagcgaaaaccctgcatccggataccgaagcgctgctgatgcagctgccgtggtccggtaacgtccgtcagctggaaaacgtctgccgctggctgaccgtgatgtcctccacccaggaagtgctgccgcaggatctgcctgccgacctgaccatgaccgctgccggagaacatatccgcagtgagcacagccataatccggcagccggcaactgggatcagcagctggcgcagtgggcggatgcacagttacgggccgggaaaaccgatctgctggcggatgctctgccgctgtttgaacgtaccctgctgcagtgcgcactgaattacagcaacggacacaagcaggatgccgcccgcctgctgggctgggggcgtaatacgctgacgcggaaactgaaagaagccgggattgatgacgctgcatcaaccccggaaacagattaa

SEQ ID NO: 276180 - DNA, 1050 bp, Morganella morganii
atgaacccggataacaaaccgcaggcagagcagctccttgattcactgatcaactgtgtcctgctgctggataatgatttgattatccgttacgccaatcaatcggctatgcagttattcgcccagagtgcccgtaaactcaccggcacgccgctccctattttatacagctacctttccctcgataccgccacattgcagaccacactggcagaaggccacagctttactgacaacgatgtgaccctggtggtaaataaccagatgcacgctctttcgctgagtgcccagccggtatccggcgattttattctgctggaactgacaccgctcgacagtcaccggcgcattacccaggaacaattacagcaggcgcagcaggctgccgcccgtgatctggtacgcgggctggcgcatgaaatcaaaaatccgctcggcgggttacgcggtgccgcacagctgttatcccgcgcgctgccggatccggcacttcaggaatacacacaggtgattatcgagcaggccgatcgcctgcgggcgctggttgatcgtcttctcggcccccagcatccggggcagaaaagcctgcagagtattcaccatgtggcggagcgggtttttcagctcatcaatctggaaaaaccggacaatatcacgctggtcaaagactacgatcccagtttgccggagttatcgcattatcccgaccagatcgagcaggttatcctcaatattatgcgcaatgccctggaggccctgcattccgcaggcggcacaattattctgcgtacccgcaccgcattccaggtaatgctgcacggagaacgctaccggctggccgccaggattgatattgaggacaacggcccgggtattccgccgcatatcctggataccctgttctacccgatggtcagcggccgcgaaggcggttccgggctgggtttatccattgcccgcaatcttatcgatcagcataacggcaaaattgagttcagcagctggccgggtcacaccttattttcactttatctgccaatccgtcagtaa

SEQ ID NO: 276181 - DNA, 1410 bp, Morganella morganii
atgtctgttgaacatgtattgaccatgatggaagagtacaacgttaaattcgtggacttacgctttaccgataccaaaggcaaggaacagcatgtgtcgatccctgctcatcaggtagatgaagatttcttcgaagacggaaaaatgtttgacggttcctcaatggccggctggaaaggcatcaacgaatctgacatggtactgatgccgattgcggaatccgccctgatcgacccgttctttgaagtcccgacactggttctgcgctgtgatgtgttagagccgaacaccatgcagggttatgaccgtgacccgcgctctatcgccaaacgtgccgaagatttcctgcgcaccagcggtattgcggatacagtcctgttcgggcctgaacctgagtttttcctgtttgatgacatccgtttcggtgctgatatctccggtgcttactatcatatcaatgatattgaagctgcctggaacaccggtactgtctatccggaaggcaacaaaggtcatcgtccgcgcgtgaaaggcggttacttcccgctgccgccggtcgattcctcacaggatctgcgttctgaaatgtgtctggtcatggaagagatgggtctggtcgtggaagcacatcaccacgaagtcggtactgccggccagaacgaaatcgccacccgcttcaataccatgacgctgaaagcggacgaaacccagatgtacaaatatgtggtgcagaatgtggcgcaccgctacggcaaaaccgcgacctttatgccaaaaccactggtcggcgataacggctccggtatgcactgccatatgtctctgtcaaaagacggcgttaacctgttctccggggataaatatgccggtctgtcagaaatggcactctattacatcggcgggatcatcaaacacgcccgtgccctgaacgcctttaccaacccgaccaccaactcttacaaacgtctggtgccgggctacgaagcaccggtcatgctggcttactctgcacgtaaccgttcggcctcaatccgtattccgattgtgtccagcgcgaaagcccgccgtattgaagtccgcttcccggacccggctgctaacccgtatctggcctttgccgcacagctgatggccggtctggacggtatcatcaataaaattcatccgggcgatgccatggataaaaacctgtatgacctgccgccggaagaagcgaaagaaatcccgacagtcgcaccgtctctgggtgatgcactggatgcgctggcagcggatcatgagttcctggtgcgcggcggtgtgtttaccgaagatgcgattaacacctatatcgacctgctgcgtgctgatgttcagcgcctgaatatgacaccgcatccggttgaatttgatatgtattacagcgtgtga

SEQ ID NO: 276182 - DNA, 1821 bp, Morganella morganii
ttgtctatcgagaaattaagaaatattgccatcatcgctcacgttgaccatggcaagaccacgctggtcgataaattattacagcagtccggtacgtttgatgagcgttcaaaaccggaagagcgtgtaatggactccggcgatctggaaagagagcgcggcattactattcttgcaaaaaataccgcgattacgtggaacgactatcacatcaacatcgttgacaccccggggcacgccgatttcggtggtgaagtagaacgtgtgatgtccatggttgacagcgtactgctgctggtagatgcgatggacggtcctatgccgcagacccgctttgtaacgcagaaagcgtttgcaaacggtctgaaaccaatcgtcgttatcaacaaaattgaccgtccgggcgcacgtcctgactgggttatcgaccaggtgtttgacctgtttgacaacctcggcgcaactgacgagcagctcgacttccctatcatttatgcatctgcgctgaatggtattgcgggcaccgattataacgatatggcggatgacatgaccccgctgtacgaagctatcgttaagtatgttgagccgcctcaggttgacctcgacggcccgttccagatgcagatctcccaactcgattacaacaactatttaggtgttatcgggattggccgcatcaagcgcggtaaagtcaaaccaaaccagcaggttactgttatcgatgcggaaggtaaaacccgtaacggtaaaatcggtaaggttctcggtcatttaggtctggatcgtatcgaaacggaagttgctgaagccggtgatatcatcgcgctgaccggtctgggtgaactgaatatctcagatactatctgtgataccaactgtgttgaagcattaaaaccactggccgttgatgaaccaaccgtcagcatgtatttctgcgttaacacctcaccattctgcggtaaagaagggaaatatgtgacttcccgtcagatccttgaccgtctgaagaaagaactggttcacaacgtggcactgcgcgttgaagaaactgaagacccggatgcattccgtgtatcaggccgtggtgagctgcacttatctgttctgatcgaaaacatgcgccgtgaaggttttgagctggcggtatcccgtccgcgcgttatcttccgcgacatcgacggccgtaaacaggagccgttcgagcaggtgactctggatatcgaagagcagcaccagggtgatgtgatgatggcactgggtgagcgtaaaggcgaactgcgtgacatgatgccggatggcaaaggccgcgtacgtctggattacagcatcccgagccgtggtctgatcggtttccgtactgaattcatgaccatgacttccggtaccggtttactgtatgccacattcagtcactatgatgatgttaaacagggtgaaatcggccgccgtcagaacggtgtgatgatttccaacggtcagggtaaagcagttgcatacgcactgtacagcctgcaggatcgcggtaagctgtttgtcggtcacggtactgaagtgtatgaaggccagctgatcggtattcactcacgttcaaacgacctgacagttaactgcctgaccggtaagaaactgaccaacatgcgtgcatccggtactgatgaagctaccacactgactccgtttatcgagaaaaccctggaacaggcgttagaatttatcgatgacgacgaattagtggaagtaacgccgaagtccatccgtctgcgtaaacgccacctgactgaaaacgaccgcaaacgcgcacaccgcagcaaagattaa

SEQ ID NO: 276183 - DNA, 618 bp, Morganella morganii
atgctttatatttttgacatgggtaatgtcattattgatattgattttaaacgtgttttatcagtctggagtaatctgagcggcaagccgctgtccgaactgagcagtgattttatttacggcgaaacctttaaacagcatgaatgcggcaaaatttccgatgttgaatttgccgaagccattaatgaccagctggatatgtcgctgagtttcgatgagtttgccgaaggctggcaggctatctttatctctgtccgccctgatgtgattgatatcatgaacaggctgcgtgagcagggacaccgcgtggtggtgctctctaacaccaaccgtctgcatcaggattactggccgcagcactatccggaaatcgctgcttccgcggatttcctgtatctctcccaggatctgggactgcgcaagccggacccggatatctatcagtatgtgcttgagaccgaagaatttgagccgcaggatgccgtgttctttgatgatgtccgcgaaaacgtggatgcggcagtggcactcggtatcaaaggcgtgtttgtcaccgatcgtgatacagtctcccgttattttgcagagtatgatttttcagcagaagtgactgagtaa

SEQ ID NO: 276184 - DNA, 438 bp, Morganella morganii
atgattgcattaatacagcgtgtgacccgcgcagatgtccggatcgccggggaaattgccggtgaaatcggtcccggattgctggttcttctgggcgttgagcgggatgacgacgaacaaaaatcaaaacgtctgagtgagaaagtgatgggttaccgcattttcagtgatgcggacgggaaaatgaacctgaatgtggcgcagtccggcggtcagctgctggtggtgtcacagttcaccttagcagcggaaacacaaaaaggaatgcgcccgggattttcaaacggcgcggcaccggaaaaagccaatgccttatatgagcactttgtagcacagtgccgtgcagcaggaatggtgacggaaacaggccggtttgcggcagacatgcaggtcagtctgacaaacgatggtccggtcactttctggctgcaggtatga

SEQ ID NO: 276185 - DNA, 918 bp, Morganella morganii
atgtatcatttacgtgtaccaaaaaccgatcaggagctggaaagctattttcatttccgctgggcgatgctgcgcaagccgctgaatcagccgcaggggtcggaaaaggacggttatgatacctatgcacatcatcagatggtggtggacgaaaccgggcagcctgtggctgtcggccgtttgtatatcaatgcagaaaatgaaggcgcgatccgctttctggcagttgatccgcagatgcagggacgcgggctgggcacactgattgcacgcgcactggagtccgtggcgcgtcaggaaggtgttaagcggattgtctgcagtgcccgtgaggaagcggtcgcattttttgaaaaatcaggttttgaaaacagaggaccgattacaggcccgcaaacgacgcctgttcgtcatttttttatgattaaatccgttgaaaccctcgatgcgattctgcatcgccctgactggtgtgccgaattacagaaagcatggtatgaaaccattcccctgagcgaaaaaatggggatccgcattacacagtataccggtcaggaatttatgaccaccatgccggaaggcccgaaccagaacctgcatcagaccatttttgccggcagccagttctcgatggcgacactgaccggctgggggcttatctggctgctgttacaggaaaactctctggacggcgatattgtgctggtggatgccaatatccgctaccgcaaggcagtggcaggcagaccggaagccattgcttcccgcgataaactcagcggcgacttggatcgcctggcacgcggcagtaaagcgcggattaagctggaagtgactgtcgggcagggggatgaagtcggtgcggtctttaccggtacttacatggtgctgcccggccagaaacacagcgcggagtaa

SEQ ID NO: 276186 - DNA, 1764 bp, Morganella morganii
atgaaatggttgggacgggctgttttctggctgataacactggtcattattcttatcgttgccactgcccttgtggtgcagacatcatggggcacaaaacaggtttcagccctcatcagtgacaacacccgctacaaagtctcgctttccgcgataagtcactcgctctcctccccctcacttatttcactcagtgatgtcagcatcagcacggtttccggtgattttgccctggaagcggccaatgttgagctgaccctggactggcgcagtttttctgaacccggctggtttgcccgtatcattgtgcagaaaggggatatcgaaatttctgatgctgctgacagcagcactctgccggtcagtgccgggttattacagctcaatcagaccgcactccgccgcaccgacggcaaccgggtaattgacgcggaaggtgttaccggcgggatcacgccgtggcagccgcagggcagtgacctgaccggaaacggcaaataccagttttccgccaacagcctgaactactacgggctgccgctgaaaaatatcctgacgcagggcgaggtcagcggaaaacaattcacgtttgataacctgaccgccactctggaaaacgggctgatcaccgccaccggacgccgcagcgccgaaggtcagtggcagctggataacctgctgcttaatgatatccgctggcagacaccgcaaacactgacacagctgacagacagcacagaaaatctgccggatattcaggccagaaatatcaccgccaccaatatcaagctcgaaggccatcagtgggcggtaaactatctggaaggcacagtcaaaaatctggcctttaaacaagggcgctggcagacggataacggacaggcagatatcgccgccgcggatctgacactcagcggacagcatttttctgacattatcagtaccctggaactgcgcggcgatcagattgctgtcaaccgcctgaccggacgctatgacaaaagcattctgcgctttaccggggagtggaaccgcgccacccggacactggatatcaccagcggtgtcgccgacaacctgctgtacagcttcccggaacagtggttcgccgcattacaggaagccgccccgcagggaattgatactatccgcttacaggatattaaagtctccaatgccctgctgattgatacacagccggttttcccgttccagctcaccaatgtgaacggctacatcaaaaccatgcagatcctgaaatccggtcagtggggattatgggacggcgagctttctgtcagtgccggcaatgccacctttaaccgggtcgaactgcaccgcccgtatctgactctgactgccggaactgacagcgcggcaaccacacagtttgccgcctctgccggggaagggttgctgaaaatgcagtttcaggccacgccatccggtactgcgcctttcagtttcacattacaggcaaccggtgcggacagtcagatcctgtcacaatggggctggcaacctgctccgctgaccggcagcgccaattacaccctgcgtctgaacgggcagttgcgggcagaggatatccgcagcacactgagcggcatgctctccggacaggacaaacagggggatcagataaaccgggctatcacacagggacagatgagcaaccccccgggatccgcagagccggtaccttctgccccgcctgcacagcgtgtgatcccggataacagcgaaaccggagaaattctgtaa

SEQ ID NO: 276187 - DNA, 1386 bp, Morganella morganii
atgaactctgcaatttctgacaaaaccagtgtaactcccgcaactaacacaaatagtgaactcatctaccgtctggaagatcgtccgccgctgccgcagaccctctttgccgcctgccagcatctgctggcgatgtttgtggcggtaattacgccggggttgcttatcgctcaggcgctcggcctttccgcccatgatacccagcggattatcagtatgtcgctgttcgcttccgggctggcctcgctgctgcaaatccggacctgggggccggtcggctccgggctgctctctatccagggcaccagctttaactttgttgccccgctgattatgggcggtatggcactgaaaaataacggtgtggatacagaaggaatgatggcggcgctgttcggcacactgatgctggcggcgatgacagaagtgatcctctcccggttcctgcatctggcgcgccgtattatcacgccgctggtgtccggtgtggtggtaatgattatcggcctgtcattaattcaggtcgggctgacttccatcggcggcggttacggcgcaatggcggataacaccttcggctctgccgataacctgatcctcgccggtattgtgctggcggtgattgtgctgctgaaccgccagaaaaacccgtatctgcgcgttgcctctctggtgctggcaatgacagcgggctatctggccgcctggtggatgggcatgctgccggagaaccatacggaaattccaaaggaaatgattgtgatcccggcaccgctctattacggcttatccattgactggaacctgctgctgccgctgatcctgatctttatggtgacctcgctggaaaccatcggtgatattaccgccacatctgatgtctccgaacaaccggtgtctggtccgctctatatgaagcgcctgaaaggcggcgtactggcaaacggcctcaattccgccctgtctgcggtctttaacaccttcccgaattcctgtttcgggcagaacaacggcgtgatccagctgaccggcgttgccagccgttatgtcggttatgtggtggcactgatgctgatcgtgctggggttgttcccggccgtggccggttttgtgcagcacattccggagccggtactcggcggtgcaaccattgtgatgttcgggacgattgcagcgtccggggtacggattgtctcccgcgaaaccctgaaccgccgggcaattatgattattgcgctgtcgctggctgtcggcatgggtgtttcccagcagccgctgatcctgcagttcgcaccggactggctgaaaaccctgctttcttcaggaattgcggccggtggcctgaccgcgattgctctgaacctgattttcccgccggagaaataa

SEQ ID NO: 276188 - DNA, 1233 bp, Morganella morganii
atgtatcaactcgacgtttacggcacgctggttgcggccacactcgtcctattactgggacgtaaactcgtaaaaactgtaccattcctcgaaaagtatactattcctgagcctgtggccggtggtcttctggtcgcgattgtattattggggctcaaatccggtatggatctggaagtgaaatttgatgattcactgaaagacccgctgatgctggctttcttcgccaccatcggcttaaacgccaacttagccagcctgaaggcgggcggtaaaaccttatttatctttgtgattgccgttgtgggcttactgattgtgcagaacagtgtcggtatttccctggcgaaaatgatggggcttgacccgctgattggtctgctggccggttctatcacactttccggtggtcacggtaccggggcggcatggggtaaaattttcagcgacagctatggtttcacctctgcaacagaaattgcgattgcctgtgcaacatttggtctggtgctcggcggcctgattggtggtccggtggcccgtttcctgatcaaaaagacagccatgagcgatgtgaaactccaggatgatgaagcaccgaccgcgtttgaacaaccgcaggccggacgcatgatcacttcaatggttctgcttgaaacaattgcactgattgctatctgtttgctggcagggacgtatctgtatggtgttctgacggatttcttcacgtcgatgcagtggaagttccagatcccggcattcgtgtgtgtgctgtttatcggggttatcctgagcaacagtctgtcactgatgggcttctaccgtgtgtttgagcgggcggtgtcggtgctgggtaacgtcagtctgtcattgttcctggcgatggcactgatgagtctgaaactgtgggaaatcgcgtctctggcggtaccgatgctggtgattctggcggtacagaccgtggtgatggcgctgtatgctgtcttcgtcacttaccgggtgatggggaaaaactatgatgctgcggtactggctgccggtcactgtggtttcgggatgggcgcgacaccaaccgcgattgccaacatgcaggcggtaactgatcgcttcggtccttcccatgtggccttcctggtggtaccgatggtaggggcgttcttcctggatctgattaacgcactggttattccgttcttcctggcgttacctgtttttccggctgcgggcgggtaa

SEQ ID NO: 276189 - DNA, 2082 bp, Morganella morganii
atgaaaggtcaactgcttgatgctatcccactcacgactttacacggcgtcggggccgggcaggcgggcaaactggccggtatcggtctgcacacccttcaggatctgcttttccatctgccgctgcgttatgaagaccagacccggctctataccatcactgacctgttacccggaatttatgccaccgtcagcggcgaagtgctgcgcaccgatgtggtctttggccgcaaacggatgatgacctgccagataagcgacggtaccggcatcttaaccctgcgtttctttaacttttcggcggcgatgaaaaatgcgctggcgaccggaaaacaggtcaccgcttacggcgaaatccggcgcggcaaaaacgggccggaaattttccaccccgaatacaaagtccgccaaagtgatacttccgttgaattacaggaaacactcacccctatctacccgaccaccgaaggtgtccgccaggccacgctccgcaaactgctcgaccaggcgctggagctgctcgatacctgcgccatcaatgaattactgccgccggaactgacccgctctatgatgagtctgccgcaggcactgaaaacactgcaccggccaccggcggatacacagcttgccgaactggaaagcgggcagcatccggcactgaaacggattgtgctggaagaactgctggcgcatcacctcagcatgctggccgtcagagcaggggcacagcgttatcacgcgctgccgctgtcaccgcaggaaacactgaaaaatcagtttctgtcgcaactccccttctcgccgaccaatgctcagcagcgcgtggtagcggaaatagagcaggatctggcaaaaccggtgccgatgatgcgcctgattcagggggatgtcggctcagggaaaacgctggtcgccgcactggcagcactgcgcgctatcgcacacggcaaacaggtggcgctgatggcaccgacagaactgctggctgaacaacacgccaatacgttccgtcagtggctggagccgctgggtatccgtgtcggctgggttgccgggaaacagaaaggcaaggcacgacaggcacaggaagacgccatcgctgccggtgatgtggccatggttatcggtacacacgctatttttcaggaacatatccgttttcattccctggcgctggtgattatcgatgaacaacaccgctttggcgtccaccagcggctggcgttgtgggagaaaggcgaacaacagggattccatccgcatcagctgattatgaccgccacgccaatcccgcgcaccctggcaatgacagcctatgcggatctcgacacctcggttatcgatgagctgccgcccggcagaaccccggtgaccacggtggcaattccggacagccgccgccatgagattattgagcgggtgcgtagtgcctgtcaggatgaaaagcgccaggcttactgggtctgtaccctgatcgatgaatcggatctgctggaagctcaggcggctcaggtcacgtttgatgatctgtccgccacgctgccggatctgcgggtcgggatggttcacggccgcatgaaaccggcagaaaaacaggcggtaatggcgcagttcaaggccggtgagctggatctgctggttgccaccacggtgattgaagtcggggtggatgtgccgaacgccagcctgatgattatcgaaaacccggaacggctcgggctggcacagctgcatcagctgcgcggccgggtcgggcgcggctctgccgtctcccactgtgtgctgctgtataaaaccccgctcacccagacagcaaaactgcgtcttcaggtactgcgtgacagcaacgacggctttgttatcgcgcagaaagacctggaaatccgcgggccgggggaactgctcggcacacgccagaccggcaatgcggaatttaaagtggcggatttactgcgcgatcagggcatgctgccggaagtacagcgcgtggcacggcatctgcaccagaattatccggaacaggcgaaagccctgatagaacgctggctgccggaacgcacacaatacaccaacgtataa

SEQ ID NO: 276190 - DNA, 654 bp, Morganella morganii
atgcgccagcccgacctcactctgtgtctcgaagaagtgcataagccgcacaatgtctccgctgtgatccgcagcgcggatgctgtcggtatccatgatctgcatgcagtctggccggaaaaaatcaaaacgctggtctcttccgccgccggcagcaacagctgggtgaatgtgcataaccacgacacactcgctgatgccgtgaccctcctgaaatcacagggtatgcagattcttgccacgcatctgtctgacagcgcggtggatttccgggcgatcgattttacccgcccgacctgcattatcatgggctcggagaaaaccggtatatctgcggaagccatccggctggcagatcagcatattatgatcccgatgtccggcatggtacagtcactgaacgtgtctgttgccgctgctgtgatcctctatgaagcacagcgtcagcgtgaagccgctggtctctatgagcatccccgcagtgccctggcgcaggatgaacagcagcgcctgctgtttgaacgcggttatccggtgctggctcaggtcgcccgtgagaaaaaactgccccgtccgcagattgatgaacagggccatatcattgcgccggacagctggtgggctgccatgcaacagaagaaaccatccgcctga

SEQ ID NO: 276191 - DNA, 2106 bp, Morganella morganii
ttgtacctgtttgaaagcctgaaccatattgttaaggattatctgccgaaagagcagattgatctgttaaaacaagcctatgtcgttgcgcgggatgctcacgaagggcagacccgctccagtggcgaaccgtatattacccatccggtcgctgttgcctgtatcctggccgagatgcgtctcgacctcgaaacactgatggcagcactgctgcacgacgttattgaagatacgcctgccacctttcaggatattgaacaactgttcggcaccacggttgccgggctggtggaaggggtatcgaagttagacaaactgaacttccgcgataaaaaagaagctcaggctgaaaacttccgcaaaatggtcatggcgatggtgaaagacatccgtgtcattctcatcaagctggcagaccgcacgcacaacatgcgcacgctcggatctctgcgtcccgataagcgtcgccgtattgcgcgcgaaacccttgaaatctacagtcctctggctcaccgtctcggtattcaccatatcaaaacggagcttgaggagctgggattcgaagccctttacccgaaccgctaccgcgtcatcaaagaagtggtgaaagccgcacgcggcaaccgtaaagagatgatccagaagattttatccgaaatcgaagggcgtctgacggaagccgggatcagctgcaaagtcagcgggcgggaaaaacacctctactccatctaccggaaaatgcacctgaaagagcagcgttttcactcgatcatggacatttatgcattccgcgtgattgtaagtactgtcgacacctgttaccgcgtattaggtcaggttcacggcctgtacaagccgcgtcccggccgcgtcaaagattatatcgccatcccgaaagccaacggctatcagtcattacacacctcccttatcggccctcacggggtgccggtggaagtgcagatccggaccgaagatatggatcagatggcggaaatgggggtggcagcacactgggcttataaagagcacggtgaatccggcaccaccgcacaggtgcgtgcccaccgctggatgcagagcctgatagaacttcagcaaagcaccggcaacacctttgaatttattgagagcgtgaaatccgatctcttcccggatgagatttatgtcttcacaccggaaggccggattgtggagctgccgaccggcgccaccccggtggatttcgcctatgccgtccatacggatataggtcactcctgtgtcggtgcgcgcgttgaccgccagccgtacccgctctcccagcaactgaccagcggacaaaccgttgaaattattaccgcaccgggcgcacggccgaatgccgcgtggctgaactttgttgtcagctcaaaagcccgggcgaaaatccgtcagttactgaaaaacctcaaacgggatgattctgtcaacctgggccgccgtctgctcaaccatgcactcggtaacggccgtaagatcacagatatcccgcaggaaaatatcagccgtgagctggtgcggatgaaactggcgactctggatgacctgctggcggaaatcggcctggggaatgccatgagtgtggtggttgcccgtaacctgctgaacgagccggaaagtaataccgaagagagcaccacccgcaagctgccgatcaaaggcgcggacggggtgcttatcaccttcgccaaatgctgccgtccggtaccgggtgacccgattatcgcccatatcagtccgggtaaagggctggttatccaccatgaatcctgccgtaatatccgcggatatgaaaaagagccggaaaaattcatggccgttgagtgggataatgatatcgacaccgattttattgctgaaatcaaagtggatatgtttaaccaccagggcgcgctggctaacctgactgccgcaattaatgatgccaactccagtattcagagcatgaataccgaggagaaagatggccgcgtttactgcgcctttatccgcctgaccgcaaaagaccgtatccagcttgcgaatattatgcgtaagatccgcattatgccggatgtcctgcgcgtcagccgcaaccggaattaa

SEQ ID NO: 276192 - DNA, 276 bp, Morganella morganii
atggcacgcgtaacagtccaggacgcagtagaaaaaattggtaaccgttttgacctcgtattagtggcagcacgccgtgcgcgtcagttacaggccggcggcaaagagcctctggttccggaagaaaacgataaagtcaccgtgatcgccctgcgcgaaatcgaagaaaatctgatcaacggccagatccttgacgcccgtgagcgccaggaacaacaggagcaggaagctgctgaaatgcaagcggtttctgcaatcgccgaaggacgtcgttaa

SEQ ID NO: 276193 - DNA, 624 bp, Morganella morganii
atgacccaaggtacgttatatattgtctctgcgccgagtggtgcgggaaaatcgagtcttattcaggcattactgaaaacacagcctttatatgacacccaggtttctgtttcgcacaccacccgtggtatccgcccgggcgaagtgcacggagagcattatttcttcaccactgaagatgaattcaaaagcatgatcgaccgtaatgaatttcttgagcatgcctgtgtcttcggaaattactacggcactgcccgtaaaacagtggaagatatcctgaactccggtgttgatgtatttcttgatattgactggcagggagcccgccagatccgggaacagatgccggcagcccgcagtatctttattctgccgccgtcccgtgaagaattgctgcgccgcctgcgcggccgtggtcaggacactgacgaggtcattgccggacgtatggcacaggcagtcagtgaaatgcagcactatggcgagtacgattatctgattgtgaacgatgattttaatgtcgcgctgaccgatttacagacgattatccgtgcggaacgtctgcgttcaggtcgccaggttcagcgacatgatgctttaatcgccaaattattggcacagtga

SEQ ID NO: 276194 - DNA, 618 bp, Morganella morganii
atgttactcagtatcctgtacattattggtattaccgctgaagccatgaccggagcactggccgccggccgccggaaaatggatgttttcggcgtaattattatcgcctccgccactgctatcggcggcgggtctgtccgcgatatgctgctgggccattacccgctgggctgggtaaaacatcctgaatatattattacggttgcctgtgctgccgttattactatctgggttgcgccgatgatgaaacatctgcgccgtcttttcctgatcctggatgccatcgggctgatggtattttccattatcggcgctcagatagcactcgatatgaactacgggccgatcattgcggctattgccgccgttatcaccggtgttttcggtggtgtgctgcgcgatatgctgtgtaacaccattccgctggttttccagaaagaattatatgccggtatctcctttgccgccgcctggctctatatgggattactgttttacacgccgctgccgcgcgatgccgtcattattattaccctggtggccggcctgacatcccggttaattgccatccgctaccgcctcgggttaccggtctttaattacgaaaatcaggattaa

SEQ ID NO: 276195 - DNA, 1308 bp, Morganella morganii
atggtatacaaagagagtatcactctaatgaatgaatatcagataacaacaacaccccgtcaccatcagcttactaatattaatgtatggacgccggatagccaatggctggtttatgatgtccgccctcaggggtcttcgtttaccggtaaaacgatagaaaaaattcatgtgaatacaacagaaatccgtgaaatttaccggggaaccgccggggcctgtgtgggtgtggtgacggtcagccctgaattaccggtgcgctatgcctttatccgcgggccgcttaatccggatcagcagtggcagtatgatttccatcaccgtcagggggtgatggtcagtgatgatgtaccgggtgttgcacacaatattgatgctttctgtattacgccgccttatcagcccggcgctctgcgcggtggtacacatgtgcatgtgttcagcccggacggagaatggctgagtttcacttataacgaccatgtgctgcatgagcgggatccggcactggatctgcgtaatgtggcggtggcggttccgctgcatccggtatgtaccgggaaacatcacccgcgtgaatatgacggggagtttttctgctgtgtggtctcgcggacaaccccggcgccgcagcccggcagtgatgacatcagccgtgcatacgaagagggctggattggtgagcaggggtatctgcgggctgacggctcccgtcagcggcgtgcgattgcgtttatcggggatacccggtcagaaaacggtgaggtgatcccggagattttccgcctcgatctgccggaacggcctgaagattataccgttgccggcgatctgccgcttgagggaaccgacagtacgatgcctgctccgccggccggtgtcagccagacgcggctgacatttacctatcagcgccggtatccggggctggcaaaacagccgcgtttctggctgcgcagctcaccgcagggcgacaaaattgcgtttctgatgcaggacgatcagggaattgttcagttgtggacgatttccccgcagggcggggagccgcatcaggtcacttccggcagtgacagtattgaatctgcattcagctgggacagcaccgggcggtatctggcttttgtccgcaaaggattggtcatggtgtgcagtgctgaaaccggggtatgccgggcggtgactgcaccatcagcagaaccggtttcaggggatgcggtagtgttttcaccggataacagccgggtggcatttctgcgccgcacaaacggctggcagcaaatctgggtggcagacaccgggctgtaa

SEQ ID NO: 276196 - DNA, 339 bp, Morganella morganii
atgacacgcaaatgtatgataataagcggattgctgggactgagtacgatactcagcggctgctcaagtattatgacccggaccggcccgacagagggctactatcccgggaccaaaaacagtatcgccatgttgcaggatgacgaaaccggctgggtaatgaagccgattgtcgccattgacctgcccttctccgctgttctcgatacccttctggccccggttgattatgccaccgacggcaaagacaacagtaagtcatcccctgcggaacgggtaaaacgcctggaagcagcggaaaccgcccataacgccccggcaccattaccacaggagtaa

SEQ ID NO: 276197 - DNA, 573 bp, Morganella morganii
atgtcactgtccgccgctgctcagacccgctgtgcgtgggttactgatgacccgctctatattcagtatcatgacaccgaatggggtgtccccgagcgggataaccataaattatttgagatgatctgccttgaaggccagcaggcgggtctttcctggctggtaatcctgaaaaaacgggaaaattaccggcagtcgttctttcagttcgatccggaaaaagtggcagccatgacagatgccgatgtggataaactgatgcaaaacccgggaattgtccgccagcgggcgaaaatcaatgccattatcagtaatgcaaaagcctatctggcgatgcagcaggccggtgaggatttcagtgattttctgtggaatttcaccggtaacacgccgctggttaaccaccatactgacagcagcaccatccccgcggatacgccgctgtcccatactctggcaaaagcgctgaaaaaacgcgggtttaaattctgcgggccggttatctgttattcctttatgcaggccgtcggcatggttgatgatcatctgccgcactgttgcagccgccggtaa

SEQ ID NO: 276198 - DNA, 909 bp, Morganella morganii
atgcaaaagtttgataccaaaaccttccagggtcttatcctgacattacaggattactgggcgcgccagggctgtaccattgttcaaccactggacatggaagtcggcgccggcacttcacacccgatgacgtgtctgagagcgttagggccggagccgattgcggcggcctatgtgcagccatcccgtcgtccgacggacggccgttacggggaaaacccgaaccgcctgcagcactactatcagtttcaggtcatcatcaaaccgtctccggataacatccaggagctgtatctcggttccctgaaagagctgggtattgacccgacggttcatgacatccgttttgttgaagataactgggaaaacccgacgctgggtgcctggggattaggctgggaagtctggctgaacggcatggaagttacacagtttacttacttccagcaggtcggcggcctggagtgcaaaccggttaccggggaagtcacttacggtctcgagcgcctggcgatgtatatccagggcgtggacagcgtttacgatctggtctggtgtgacggcccgctgggcaaaaccacctatggtgatatctatcatcagaacgaagttgagcaatccacgtataactttgaatacgccgatgtggacttcttattcacctgtttcgaacagtatgagaaagaagcacagtccctgctggcactggaaactccgctgccgttaccggcctacgagcgtattctgaaagcggctcactctttcaacctgctcgatgcgcgcaaagcgatttcggtgacggaacgtcagcgttatatcctgcgcatccgtaccctgaccaaagccgttgccgaagcttactatgcctcccgtgaggcactgggcttcccgatgtgtaaaaagaactaa

SEQ ID NO: 276199 - DNA, 2070 bp, Morganella morganii
atgacacaacagactttcctgacggaaatcggcacagaagagttaccgccgaaggcgcttcgttctcttgctgaatcttttgcggccaacctgactgcagaactggccgctgctaacctgactcacggtgatgtgacctggtatgccgcaccacgccgcctggcggtaaaaattgccggtctggcggaatctgccgctgatcgcgaagtagaaaagcgcggccctgcgattgcccaggcatttgatgccgaaggcaaaccgaccaaagcggcggaaggctgggcacgcggttgcgggatcaccgttgatcaggctgatcgcatggtcaccgacaaaggtgaatggctgctgtaccgcgcggtggaaaaagggaataaagccaaagaattactggcagatatggtcagccgtgcgctggcaaaactgcctattccgaaactgatgcgctggggtgataaagagactcactttgtgcgtccggttcatacggtcacgatgctgatgggcgcggatgttattccgggtgaagtccttgggatcacctctgaccgtgttatccgtggtcaccgttttatgggtgaagcggaattcactatcgcacacgcagacgagtatccggccattctggaaacccgcggtaaagtgatggcggattacgatgcccgtaaagccatgatcaaacgtgatgcggaaaaagcagcactggcactgggcggcgtggctgacctgactgacagtctgctggaagaagtcacttcactggtggaatggccggttgtgctgacagcgaaattcgaggaaaaattcctcgcggttccgtctgaagccttggtttacaccatgaaaggtgaccagaaatacttcccggtttacgacaaaaacggcaacctgatgccgaactttatctttgttgccaatatcgagtcttctgacccgtcgcagatcatcgcaggtaacgaaaaagttgtccgtccccgcctggcggatgctgagttcttcttcaaaaccgactgcaaaaagcgtctggaagataacctgccgcgcctgagcaccgttctgttccagcagcagttgggtacactgcgtgataaaactgatcgccttgaagcgctcgcaggctggattgccggtcagattggcgcggatgtgaatcacgctacccgtgcaggcctgctggccaaatgtgatctgatgaccaacatggtctttgaattcactgacacccagggtgtgatgggcatgcactatgcacgccatgacggtgaatccgaagacgtggcgctggcactgaaagagcagtatcagccgcgttacgccggtgataacctgccgtcaacgccggtgtctgatgcgctggcgattgctgacaaaatggataccctggcggggatcttcggcatcggccagcatccgaaaggggataaagacccgtttgctctgcgccgtgccgcactcggtgtgctgcgtatcatcgttgagaaaggctacaacctcgacctggaaacgctgacacaggaagctgcccgcctgtatggtgataagctgacgaacgcgaatgtggtcactgacgtggttgatttcatgttaggccgtttccgcgcctggtatcaggagcagggttttgcgattgatactatccaggcagttctggcgcgtcgtccgacccgtccggcagactttgatgcccgcatgaaagcggtcactcacttccgtacactggaggaagccgctgctctggccgctgctaacaagcgcgtttccaacattctgtcgaagagtgatgatgcactgaatgataccgttctggcatcattaatgaatgcaccggaagagattcgcctggcagcctatgtgactgacctgaaaacacagctggcaccgctttatgcggaaggcaaatatcaggaagcactgactgaactggcctctctgcgtgaagcagtggatgcgttctttgatagcgtgatggtgatggataaggatgacaatatccgccgtaaccgtctgacattattaaatgaactgcgcaacctgttcctgggggttgcggatatttcgctgttgcagtaa

SEQ ID NO: 276200 - DNA, 1278 bp, Morganella morganii
atgccaaaaatagtaaagctgtccgttatcagcagtacccttttcctcgctcagttcgcctctgcagcggatattaccgttaatcctgcatcatcagagacgactcaggtcgtccgtcaggggagcaacaccaccatcaatatcgcaccggcaaacacgcaaggtgtttcttataatgcctatgatcagtttaacgtcgggaaaaacggtgtggtatttaataaccgcgaatccggcgccggaatgattattaacgaggtgctttcaaccgaaaaatcacaactgcgcggtaatatgcatgtggatggcaaaaaagcccatctcattatcgctaacccgaacggtattgcctgtaacggatgcagtgtttccggcgcggatcagttaacactgaccggcggaaaaatagtattctctcaggacggagaattaccgggttatcacaatagtaaaaataacagcaacattcgcattagtaacaccactgaaaatgcgttttcttccgtaaacaaattcaatgtgattgctgaaaatatcactattcgtaacagtgaaatcagtacgcccaatctggtgatgttcagcggccatgaattagtaaagtattcaccagatacagtccggggtttggaagccttacccggcagcagtggcacgcaaaaaagcaaactgactgtaagcaaagacagccatattaaaacggataatatgtatatcagtgcaaataacactgatataaaaaatcacggtatgattacagttggtgatgtacaaaagcaacatgcggtgaatagtcaactgacgttggatttggtcaattcacacctgatgaatggcagcaaaggtaatatccgtgtaactgatgcggattcaatcctggaaaacagccagattaccaacaacggcaatatccatattgataacaagcataaaatgctgacaataggcagtgctgttatccataacaaagggaatatgtcatcagatatcaccgaaattaccagtttgaataatgttaaatccggtgttggtattaataactatggcaatctgacaggcagtttattggttaaagcaaatcaaatcgcatttaacaataaaaaatatctggaagcattggatatatctgcggatagtgatgttcttgcctatattaatgatggcgagataatgaatgaaacggctaagttcagagcttatgaactctatcattcaggtaatggaaaaatcacatccgggcctgtatttgaatctgagataaaaaaaccacttcagtaa

SEQ ID NO: 276201 - DNA, 1554 bp, Morganella morganii
atgataaaaaaaacagcggctgctgttgtgatggcggcggcctgtggctgcgcatggggcagcacttacacttcttctccgccggtttctccggcctcctgcgccatactgtcagaggtggtgattaagcagcgtgaattaattgagccctcttatctggctgatgaatttgaaaaaagcattaccggacactgcctgacatcagaacagatggcagaagcggtaatgaaactggagtcggcggtgcatcaggccggttttatcactgcacaaatcagtgtgccgccgcagaatgttagtgacggtaccctgacacttcactatcagcccggttatctgagcggctatcgcgataaagagagcggagatacgcatttcgggctgaacctgattttcccgcagcgggcagacggacagctgaatatccgtgatactgaactgggaatgtcccatctgaatcaattgcccggtctgggggctcaggccgccgttgaaccggatccgcagaaccccggcaacagtgtaatcaccattgcccggcagaaaaaacgcagcatcagcggctcactggaaatcagcaatcacggcagtccgtcaaccggcagcaggcagataactaaccggctcagtcttgaaaatccgttacagctgtatgaccgcctgtttatttatactctgcgggatatggaccgcgaccattccgccggggtgaaatttatttatggccagtaccggatccctttccggtactgggaatttaccgcaggcggcagttacagtgagcagaagcagcaatacccggtatatcaggggtcactggactattttacccgcagcaaaacactggatctgagcctcggccgtaagctccttctgaccccggcgcatgatatcaccctcagcagcggtatttctgcgctgacccggcatgtcacactcggacatgcgccgctgataatgcctgagcgccggtctgtttactggaataccgggctgaatcaccgctggtatctgccggatttcaccttgcagtatcaggtgcagtataagcattcactgaaccgctttggtgcactgccggtaacagaaaaaaagctgaaaccgacgcggcagctgatggcagaaacaacactgacagtaccgttccgtctcgccggtcagccgttttactatgacggtgttatgcgcggctttattaatgcggataaagcggatgagatggattatgaatccctgagcggccgttattcggtacgcggctatcctttttcccacagtatgagtgctgcgcgggtttttatcagccgtaatgaggtggtctggcagcaggtattgccggggcataatctgtatctggcagcggatgccgggttgccgggggcaaaaatttccggcggtgcgcgatctcatagtctggcgggaactgagatcgggatgaagggattttataactcactgagctatcagatctttgccggtctgccgctgaaagaggcggagcatgtacgggccttttcaccggtgggtggattttctgtcagtgtcagttactga

SEQ ID NO: 276202 - DNA, 1617 bp, Morganella morganii
atgatgagaagcgccaaacgtaagacaggatttgcgaagctgggcattacactggttgctctggcggtatccgccagtgttaatgcggcgggaacgctggttttttgttctgagggatcaccggaagggtttaacccgcagctgttcacttcgggaaccacttatgatgccagctccgtgccgctgtataaccggctggtggagtttaaagccggtaccacagagctggagccgggcctggcggaatcctgggatgtgagcgaagacggaaaaacctatacgttccatctgcgtaaaggggtgaaattccacagcagcaaggatttcaaaccaacccgtgatttcaatgcggatgatgtggtctttacctttgaccgccagaaaaacccggataacccgtatcacaaggtctccggcggtagttatgaatatttcagcggcatggatatggataaaatcatcgataaagttgagaaagtcgatgacaacactgtccgttttcagctgagccgctctgaagcgccgttccttgcaaacctcgggatggacttcgcctccatcctttctgctgaatatgcggatcagatgctgaaagccggtacaccggagaaagtcgacctgaacccgatcggcaccgggccgtttgtgttgcagcagtaccagaaagattcccgtatcctgtataaagccaatgacgattactggaacggcaaaccgaaaattgaccgcctggtcttctccatcaccccggatgcctctgtccgttacgccaaactgcagaaaaacgagtgtcaggtaatgccgtacccgaacccggcagacctggagcgtatgcgtgaagataaaaacattgtcctgaaagagcagccgggcctgaacgtcggctatctctcctataacgtcacgaaaaaaccactggataacgtcaaagtacgtcaggcactgaatatggcagttaataaagatgccatcattgacgcggtgtatcagggcgcaggccagaaagcgaaaaacctgatcccgccgaccatgtggggctacaacaacagcattgaagactatccgtatgatccggaaaaagccaaagcgctgctgaaagaagcaggtatggaaaacggctttgaaatcgacctgtgggcgatgccggttcagcgtccgtataacccgaacgcccgccgtatggctgagatgatccaggcagactgggcgaaagtcggcgtgaaagccaagattgtgacctatgagtggggcgagtacctcaagcgcgcaaaagcgggcgagcctcagactgtcatgatgggctggaccggtgacaacggggatccggataacttcttcgccacactcttcagctgtgcggccaaagagcagggctctaactactcgaaatggtgtgatcagtcctttgaaaacatcattcagcctgcacgtaccacggctgatccgaaagagcgcgccaagctgtatgagcaggctcaggtggtgatgaaagagcaggcgcctgcactgatcgttgcacactccacagtgtttgagccggtgcgcaaagaagtgaaaggctatgtggtggatccgctgggtaaacaccactttgacaatgtgtctatcgaaaaataa

SEQ ID NO: 276203 - DNA, 1020 bp, Morganella morganii
atgctgcaatttatcctccgacgggtcgggatggtaataccgacatttatcggtattacgttactgacgtttatatttgttcatctgattccgggagacccggtcactatcatggcgggtgagcggggaatttcccctgaacgccacgcccagctgatggcggccctggggctggatcagccttactggaaacagtaccttcattatatcaatggtgtcctgcacggtgacctcggtctctctctgaagagccgtcagccggtgtgggaagagtttgttccccgttttaaagccacgctggaactcgctgcctgcgccatgattttcgccatttctgtcgggattccggtcggggtgctggcagccgtcaaacgcggatcgatctttgatcacactgctatcggggtctccctgaccggctactccatgccgattttctggtggggcatcatgctgatcatgctggtgtcggtgaacctcgatctgacaccggtgtcagggcgcttatcggacagtgtgttcctcgatgacagtcagccgctgaccggatttatgctgattgataccctgatctggggcgaggacggcgattttcatgatgcggtgatgcatcttattctgccgtccattgtgctcggtactatcccgctggcggtgattgtccgtatgacccgctcggcaatgctggaagtgctgggtgaggattatatccgtaccgcccgcgccaaagggctgagccgcatccgcgtgattgtggtgcatgcactgcgcaacgcgctgctgccggtggtgaccgttatcggcttacaggtcggcgtgatgctggccggggcgattctgaccgaaacgattttttcctggcccggtatcggccgctggctgattgatgcccttcagcgccgtgactatccggttgtgcagggcggcgttctgctgatcgccattctgattatcctggttaacctgtgcgtggatttactctacggcgtcgttaacccgcggatccgtcataaaaaataa

SEQ ID NO: 276204 - DNA, 903 bp, Morganella morganii
atgtctgagacgacaaatactaccgtgacccgcgcgcctgagccgctttcccctctgcgcgaattctggcactacttccggcgcaacaaaggcgcactgatcggcctgatctatattctgctgatgctgatgatcgccgtttttgccccgctgctcgccccgcatctgccggatgagcagttccgtgatcatttattacagccgccggtctggcaggaaggcggctcatggcagtttattctcggtactgatgatatcggccgcgatattctgtcgcgcctgatgtacggtgcacggctttcactgctggtcggttgcctggtggtggcgctgtcgctgctgctgggggtggtgattggcctcgctgccgggtatttcggcggctgggttgatgccctgatcatgcgtatcgtcgatatcatgctggcactgccgagcctgctgctggcactggtgctggtggcgattttcggcccgtcgattgttaatgcctcgctggcgctgaccttcgtggcactgccgcactatatccgtctgacccgcgcggcggtgctgacggaagtgagccgcgactatgtgaccgcttctgcggtggcgggcgcaggcccggtgcgccagatgtttgtcaatattctgccgaactgtctggcaccgctgattgtgcaggcatctctgggtttctccaacgctattctggacatggccgcattaggtttcctcgggatgggcgcacagccgccgacaccggaatggggaaccatgctgtccgatgttttacagtttacgcagagcgcatggtgggtggtgaccttcccgggcctggcgattttactgacggtactggcgtttaacctgatgggcgacggattgcgtgatgcccttgatcctaagcttaagcagtag

SEQ ID NO: 276205 - DNA, 984 bp, Morganella morganii
atggcgttattaacagttgataaattatctgttcacttcggtgaaaaagagatgccattccgcgctgttgaccggatcagctatcaggttgaggaaggtgaagtgctcgggattgtcggggaatccggctccggtaaatccgtcagttcgctggcgattatggggctgattgatttccccggcagggtgatggcagataaccttgagtttgacggccgccatctgctgaccatctcggaaaaagagcggcgcgagctggtgggcgcggatgtggcaatgattttccaggatccgatgaccagcctgaatccctgctataccgtggggtatcagattatggaagccctgaaagttcaccagggcggcaaccggaaaacccggttacagcggactatcgacctgctgacgctggtcggcattccggatccgaaatcacggctggatgtttatccgcatcagttatccggcgggatgagccagcgggtgatgattgcgatggcgattgcctgccgtccgaagctgctgatcgccgatgaaccgacaacggcgctggatgtgaccattcaggcgcagatcattgaactgctgctcgagttacagcagcaggaaaacatggcactggtgctgatcacccatgacctcgcgctggtggcggaagcagctcaccacattattgtgatgtatgcggggcaggtggcggagtccggcaaggcgtcggatatcttccgcgcgccgcgtcatccgtatactcaggcactattacgggcgctgccggaattcgccggtaacaagagccgtctggcatcacttccgggagttgtgcccggtaaatatgaccggcctgagggctgtctgctgaacccgcgctgcccgtatgccacggatttatgccgcagcacggaaccggaactgcgtactgtcggggcgcgtcaggtgaaatgtcataccccgctggatgatgaagggagaccgggccatgagtga

SEQ ID NO: 276206 - DNA, 999 bp, Morganella morganii
atgagtgaaaccacacagccgctgttacatgtcagtgatctgaaaaaatattatccggtgaagaaaggctttttctcaccggaacggatggtgaaagccctcgacggagtctcatttgatctgaaccgggggaaaactctggcggtggtcggggagtccggctgcgggaaatcaaccctcggccgtctgctgaccatgattgaaaaaccgaccggcggggagctgttttatcaggggcaggatctgctggtggcggataaacacgcggagaaactgcggcggcaaaaaatccagattgtgttccagaacccgtacggctcgcttaatccgcgtaaaaaagtcgggcagattctggaagagccgctggtgatcaacacctccctcagtgcggcagagcgcaaagagaaagtgctggcgatgatggcgaaagtcggtctgaaaaccgaacattacagccgttatccgcatatgttttccggtggtcagcgccagcgtattgccattgcccgggggctgatgctggatccggatgtggtgattgccgatgaaccggtatccgcgctggatgtgtccgtccgtgctcaggtattaaacctgatgatggatctccaggatgagctgggcctgtcgtatgtgtttatttctcatgacttatctgtggtggaacatatcgcggatgatgtgatggtgatgtatctggggcgttgtgtggaaaaaggtaccaaagcgcagatttttgagaatccgcggcatccttacacacaggcgctgctctccgcgacaccaaggctcaatccggcacagcgccgcgagcggataaaactgaccggcgagctgccgagcccgctgaatccgccgccggggtgcgcctttgccgcccgctgccgtcatgcattcggcacctgtactcagttccggccggagcttaaatcctacggcggacagctgattgcctgtttcgcggtagacagggaagaagaggcaaaaatttccgcataa

SEQ ID NO: 276207 - DNA, 708 bp, Morganella morganii
atgcgtgtaaaagtcagaaagtcactgactatcaaacagatgtcagttgtcgctgcggtgactttggtgacgatcgcactttttatgacgcttctgttatcacatctgatacaacagcggaaagatgattacatcaatcagctttataattcgtcagtacaggtcaggaaaccgctggcagatgccttgttagggtcggacttaaacgcaataaaatcgacgctgataacattgcgggccagcgggattttaggacgcgcgattgtgatgacgccggaaaatgttcaggtgataagcctggattttgccacacaccgtcctattcccggcacagcaaaaatgattttcgggatcccggttgagattaaggttccgctttacgcctacggcgtggcacataccggcaaacccccgcagggttatcttattcttcaggtggatgataaccgcatataccgcttcgcgatgaatgtcgtggcactgatggtgaccagttatctgttactggcgctggtgctggtgatcgcgataagctggtgtattaaccgcctgatcgtgcggccgctgcgtaatatggcccgtgagctgaacagtgatgagcctgcagagcagctcagttgttcagcatatcatgaggatgatgaacttggtttgctggcgaaggggtaccggaaccagctgaacaaacataaaacggagtcatcataa

SEQ ID NO: 276208 - DNA, 1680 bp, Morganella morganii
atgcaacgctcttatttacgtgttttactcggtggcgtcctgattgccgtcacatctcagttacacgcagaagcattacagccggacccggcatggcagcagggtaaactggcaaacggattcagctggcagctacttcagacgccgcagcgcccgaatgaccgcatacagatgcgcctttctgttcagaccggctccatgatggaaaaaccggctgaaaaagggttcgcttatctcatcccgaaagtggtgatgtttaacagccagagcctgaacacacagcagctatcgaacctgctgcgtaacggtataagcccggatatgccgctgccgccggcgattgtttcctatgatttcacactctataacctgagcctgccgaataataatcctgaggtgctgaaagcggcactgagctggatggcggatgtctcaggtcatggaatttttaatcaggaaaccgttgctgccgctctggctgcgccggattctcctgttgccacctatccgccgaatatcaatgatcctatctggcgtgcccggttaaaaggcaccaccctccaggggtttgacccggtgccgccgcctgcgggcaaaattgatgttgaggcactgaacagtttctatcagcgctggtacacaccggatatggcgacgctctatgttgccgggccggttgataaacgcgcgctggaagacggcatcagcaaagcattcggctccctggaaggtaagcgtcagacaccggtcagtgttgccacactgccgccgatgaaacctcgctcagtccatgctgtgaatgaaaatcagaaagacgatatgctggcgctggtctgggatctgaactggtcttccgtcaaagattcagatgcactgaaccgctactggttaaatgacctcgcccgtgaagcgctttttggtgcattacagcagggtatcggcaagaaaaatgaaaaattcatggccatgaatatggattgccggatgcagtatcagcgtgccagctgcatgctcagcctgcgtgcgccgaatgaaaaaatgccggtgattgtctctgaactggccggtgaactggctgtgctgaaagaaaaagggatttccgctgagaattttgatgcgctgattgccctgaaacaggctcagcttcagcagctatttgctatttatgcccggactaccacggatattctgatcaaccagcgtctgatgtcccagcagagtaatatcattgatattccgccggagcagtatcagcgtctgcgtcaggcgttcctgaataacctgacaccggatgtgctgaacgcagaaattcatgcaattttagagcaggataccgcattcttctttattcagccgaaaggtgagacagaaatgaatgtggatcagctgcgtgctcagttcgataagataatgcatccggagaaagcggttgctgcggcagagaaacaggctgcggcggatgcggaatccgctgagaaagcggcagccgaaaaagcagcggcagaaaaagccgccgcagagcaggccaaagccccggcggtaaccccggaagcggcagcgccgtcacaggaagcgaaaccggcagaaccgaaagcaccggctccggctaaaaaaggcgggcaaaacggcaacagcgagcaaccggcggcagataataacaccgacggtgtcagtgcctga

SEQ ID NO: 276209 - DNA, 1029 bp, Morganella morganii
atgccggcacggaatttatcagccctgctgcaggatgttcagccggacggttttgccacggcattctgtttcaccggcgaagggtgtgaattaccggacggtgcggcacacggcggactgagcaaaaacgacagcacgccggtcaccccggataccccggtgcggatcgccagtaataccaaaacgtttaccgcggcggcagtgctgcgcctgtatgaacagcagaagctcagtctcagttcaccggtcgcgccgctgctctccccgcagtatgtccgctggctgacagaggcgggttatgatctgaatgccatcacggtgcagcatctgctcagtcacagcagcgggctgtatgatcatgccgatgagaagtatatccgtgatgtgctcgcggatcccggccatctctggacacgggatgaacagatccgcctgtatgtcagccggggctatccgctgatgaaaccgggcctctgtttcctctattccgataccggttatctgctgctgggcgatattattgagcgggtaacgcaactgccgctggcgcaggcgatccggcagttactgcgttttgatgcaccgggcatggaatccgcttactgggaactggaagagcctgcgccggcgggtcttccgccacgggcacaccagtatctcggtaatattgacggagagaccatcagcccgaccatggatctgtggggcggcggcgggttgattatgtcggtaaacgccctggcggtgtttatggcgaatctgtttgagggccgtatttttgacacgccggacacccttgaaaccatgctgaaaccgggcagccatgacggcgcggaggattaccgctgcggggtgatggtgactgagcgggacggccagacactctggtatcaccttggattctggggaaccgccgcttattatcacccgcagaaaaaaatcgcggcagcggggtttgtgaacaacagggacacccggccgtggctgatgaatctgctggaaagcagcttgtgtcaggacgatgaatag

SEQ ID NO: 276210 - DNA, 1641 bp, Morganella morganii
ttgaaaacaatatcaggaatatggatatcattgctgctcagtttccccgtctgcgcggctgttcttctggatggtaaaacactgacccctgccctgattgccgggattgcggatggtgaaccggtccgcattgcgccggattcactggcagccatgcaccgatcacatgagattctgataaaaaccgtcggtacagagcagccggtatatggcctgacacggggcgttggtctgaataaagacaaaaaagtgactatgcccgccacggaatttaatctgcatttactccgtgctcacggcggagggacaggaaagccactgagtgtcagacaaacccgggcggtgatggcaacacggcttaacatgctgctgaccggcggcagtggtgcacatccggatctggccgggatgtatctccgttttctcaatcagtttattacccccctggttccgtccgcaggctctgtcggagaggcggatatcacacagctcagccatatcgggcttgccatgtcaggagaaggtgatgtggattatcagggaaaacagatgaaagccgcagaggcactgaaagcagccggtattcctcttttcaggcctgcagcgaaagatgcgttgtccgttatcagttccaatgcggtttcatctgccatggccgctctcgcactttatgatgccgcccgtctgacggatttaagttttgcggtttatgcgctggcactggaagcacttaacggcaatatccatccttttaccgcagaggtattacagcagcggccttatccggcagtgactgagagcggacagatacttcgcttattactcagaggctcatcactgtcagaaccggatccggaccgccggttgcaggatccgctcagtttccgctccgccctcttttttctggccgacttgagggacagttatcagcgtgcataccaccagttacttattcagcttaacagcgccgatgataatcctgttgttattcctcccggtaaaaattatcccgccggggcggttattccttccgctaattttgagccgctgccgtgggtgatggcttttgagcagctcagtctgtctgtcgcccgctactctctgctcagtgcgcagcagttgattgtattaaacacacccgcatttaccggtctgagccgctttttggcaacggaagaaaccgtacacgccttcggggcgattgaaaaagacatgatggcgctcgctttgcataataaaagtctggcaatgccgctttcactggattacctgcctgtcgccggaggaattgaagatatcgccacccgggctcccgcagtgacgcagcatctgcagcagcaaattgataactgttatgaattattgagtattttgcttattcacagtgcacaggcggttgatctgcgcagacaacagaatccgcatttcaggctcgcacaacacacagcttcactctatgatgtggtaagagcatcagccgcctttatgcagtctgacaaagcaatacggcctgatgttcagacacttgccggtatcctccgggatcatcataacgacatcatcaggagcctctatgccattcatcaatatccgcatcaccaaagaaggtgcgaccgcagaacaaaagcaaaaactgattga

SEQ ID NO: 276211 - DNA, 993 bp, Morganella morganii
atgacccgggaaaacgacacaccggaagatgacaacagcacatcatcattaaaacccctgcggaagaattttgatgaaggattaaaacaggggaaaaaagccctgaaatggagtgtgaaagccgggaattatatccgcaatattccgtttattgcccatctgatccgcaccgccacccgctttaatgacagaatgggcagcccgttcggtgcagcgattacctatttctcgtttttatccatgatcccgattctgatggtctcttttgccgccgccggttatgtgctggcctttaatccggaactgctgaccagacttatccgcggtgtcgccaacagtatcagcgacccgacactcgccgccaccattgagcgcagtattgataccgcaatccgccagcgtgcgaccgtcgggttaaccggtctggcactggcactctattccggggtgaactgggtgggcaatctgcggatggctatccgggcgcagtaccacgaccagtgggagccggatatcgaagtcaaagagaacatgttcctgcgctatctgcgggatttcctggcgctgatcggtctgctggtggcgctggtggttactctctcgctgacctcaattgccggtgccgcgcaagcccggattgtcgcgtttctcggcctggatgctgtcgaatggctgcgtcccgcgtggacaactatcggcctgaccatctccattctcgccaactatctgctgtttacctggattctctggatcctgccgcgcatgaagctgagccgccgctctctgctgaaaggtacactgctggccgcaataggctttgagatcctgaaaaccattatgacctggctgctgccgaatatggcggcctccccgtccggtgctgcgtttggttcggttatcggcctgatggcctttttctatttcttcgcgcgcctgaccctcttttctgccgcctggattgcgactgacatccaaaaaaataaagccgtctga

SEQ ID NO: 276212 - DNA, 390 bp, Morganella morganii
atgacacgttttacaactgctgcactggctctgggtgcattactggtaagcacctccgcgctgagtgcgcagaatggctgtgatatcaaaaaaagcaaaattcaggagcagctcagctacgccaaagctcacggcaatacacaccgggtgcaggggctggagcgggctttgcagaatgtgaatacttactgcacaccaaacagcctgcgtgatgatgcccgcgatgaagtcagcgaccggacaaaagaagtggcagagcgcaaagccgatttacagaaagccatcgataaaggcgatatcagtaagattgccaaacgcgaacgcaaactggccgaagctgaagctgaattaaaagaagcgcaggcggaactggattcattattaaagtaa

SEQ ID NO: 276213 - DNA, 843 bp, Morganella morganii
atgcttagttaccgccacagctttcacgccggcaaccatgcggatgtgttaaaacacaccgtccagagtctgatcattgaatcattaaaagagaaagacaaaccctttttgtatctggatacgcacgccggtgccgggcgttatcagctcagtggtgagcatgcggagcgtaccggggagtacctggaagggatcgcccgtatctgggcgcaggaatcggtgccggaagaactgaaaacgtatcttgaagccgtcagtgcactgaatccgcgtggtgacctgcgtttttatccgggttcgccgctgatcgccgcacatttgctgcgtgatcacgacaaattaaatatcagcgaactgcatccgtccgatttcccgctgctgcgcaatgaattcagccgtgataaccgcgcccgtgtggtacgggaagatggttatcagcagctgaaatcacagttaccgccgttatcccggcgcggatttgtgctgattgacccgccgtatgaactgaaaagtgattatcaggccgtggtgaaagggattcaggaaggtcaccgccgttttgcgaccgggacttatgcggtctggtatccggtggtgctgcgccagcagatcaaacggatggtaaaagatttccaggcaaccgggatccgcaaaattctgcaaatcgagctggcggtgcgccctgacagtgatcagcgcggtatgaccgcatccggcatgattgtgattaacccgccgtggaagctggaatcacagataaaatccgtgctgccgtggctgcataaagtgctggtaccggaaggtacagggcatacactggttgaatggatcacaccggaataa

SEQ ID NO: 276214 - DNA, 1353 bp, Morganella morganii
atgagcaaacattacgattatattgcaatcggcggcggcagtgccggtattgcgtctgtaaaccgggcagcaatgtacgggcagaaatgtgccctgattgaagcaaaagcgctcggcggcacgtgtgttaacgtcggttgtgtcccgaaaaaagtgatgtggtacggcgcgcagattgcggaagctatccgccagtacggcccggattacgggtttgataccaccatcaatcatttcagctgggacaaactgctggaaagccgttctgcgtatattgatcgtattcaccagtcttatgagcgcgttctcggcaataacaaagtggatgtgatcaccggatttgcccgttttaaagatgcacataccgtggaagtgaacggtgaaacgtacactgcggatcatatcctgatcgctaccggcggccgtccggttccgccgtccatcccgggcgcggaatacggtattgattctgatggtttcttcgcattgaaagctctgccatcacgtgtggcggtggtcggtgccgggtatattgccgtggaactggccggggtactgaatgcactgggcagcgaaacacatctgtttgtccgcaaacatgcgccgctgcgtaattttgacccgctgatcacagaaacactggttgaagtgatgaacaccgaagggccgtcactgcacaccaactctgtaccgaaagcggttgtgaaaaatgccgacggcagcctgaccctgcaactggaaaacggccacgagcagactgtggattgcctgatctgggctatcggtcgtgaaccggcaacagacaatatcaatctcggtgtgaccggcgtgaaactcagcgatcgcggttatattcaggtggataaataccagaacacctcagttccgggcctgtacgcggtaggtgacaataccggtgctgtcgaactgacgccggttgcggttgccgcaggccgccgtctctctgagcgcctgtttaacaacaagcctgacgagcacctggattacaccaatatcccgactgttgtcttcagccacccggctatcggcaccgtgggtctgaccgaaccacaggcgattgagcagtacggcgcggataatgtgaaatgctacaagtcctctttcaccgccatgtataccgctgtcaccagccaccgccagccatgcaaaatgaagctggtgtgtgcgggtaaagacgaaaaaatcgtcggtatccacggcatcggctacggtatggacgaaatcctgcagggctttgcggttgcactgaaaatgggcgccaccaagaaagatttcgataacaccgtggccattcacccgacagcagcggaagagtttgtgacaatgcgctga

SEQ ID NO: 276215 - DNA, 309 bp, Morganella morganii
atgacaaaacacacagatgagcagcatcctgtgtccggcgtgaatatcacccgttcaacactgaatttgcgcatcaaaccggaagataaaattctgattgatcgtgcagcgcatgctgccggtaaaaacagaaccgagttcgtactggaagctgcgcggcgtgccgccgaagaaacactggcaaatttacgggttattgatgtcagtaccgatgtctatcagcagtttattaccagactggatatggcaccacagtccggtgaagcgctgaggaagaccatgctgacgaaggcgccgtgggagaagtaa

SEQ ID NO: 276216 - DNA, 507 bp, Morganella morganii
ttgaacttaacggcaccggaacccctgcagcagcatcatgattttaccgtttttcagtcaggtgaggagtcccttaatcattggctgaaaacccgcgcattgcaaaatcagcaatccggcgcttcacggacatttgtcgtctgccaccataaccggataatggcctattatgcattatcgacaggtgttattacctgttcacaggcggcggggcgcttcagacgtaatatgcccccggaaattccggttatcctgctgggacgtcttgctgttgatgaaagtgtaaaaggcagagggatcggacggggtctgataaaagatgccgcactgcgggtcttgcaggcagccgggattgtgggtatccgcggtattgttgtccgtgctttatctgataatgccagacgtttttatgagtataccggttttatgccgtcaccggctgacccgatgctgctgatgattacattacgggatctgcagctggtaaccggcatctattctgaatag

SEQ ID NO: 276217 - DNA, 171 bp, Morganella morganii
atgacactgatgacagaagaacgtgcgccttccgcgcaggagtactgcgcgctgcgcattaaagccggattgtcggaaaaatcactgaaagcggctgagatcgggttgcatcgggggctatcttacatccgccacacccgaaggttcttatatcccgatggtcgcggataa

SEQ ID NO: 276218 - DNA, 522 bp, Morganella morganii
atgagtgacgaactgattctggtcgatgaacatgataataccctcgggtatgacgaaaaactccgcgttcatcagctcggattactgcaccgtgcgttttctgtattcctgtttaatgatgcgggtgagctgctgatccagcagcgcgcactcagcaaataccattccggcggattgtgggccaacagctgctgcagtcatccccgccgtggtgaatcgctggaacaggcgacacagcgccgtctgcaggaagagctggggatcaccagcccgttacagaccgccggccatatcatttatcgtgcggatgtcccgccgtcactgactgaacatgaatatgatcacctgtttaccggtcactataacggcccgttttccctgaatccgcaggaagtcgctgccgtgcgctggatatcactcactgacctgaaaaaagagatgcatgaccatccgcagcaatttgccgaatggtttaaggtcatcgcgaaaaaattcccgctgttacagataacaacgtcatga

SEQ ID NO: 276219 - DNA, 303 bp, Morganella morganii
atgaaaaagtatttcgtcaccgcgtgtctggttgctgcaagtgcattttcctcagtggctctcgctgaacctgctgatattcaggtacccgataaaatgacctgcaaagaattcgttaatctgaacccgcaaagctgggcgccggttgccctgtgggtgatcagcaaagacacacaatacccgggcggtgactttgtggcactgtcagaaaaagggattgcagaagcaccaaaaatcgttgaattctgtaagaaattccctgaaggcacccttcaggattacctggctgcccgcaataaataa

SEQ ID NO: 276220 - DNA, 1098 bp, Morganella morganii
atgatgatgcaactcagcggctgtattcttgccggcggccgggccacccggatgcagggacaggacaaaggtctggtattactgggcgggatcccgctttatcagcacagtgtaaaactactcgctccgcagacagacgatatttttattaatgccaaccgcaatacacaggattatcacgccaccggcctgcgggtggtcgccgatacattaccggattttccgggcccgcttgccgggatgctggccggtcttgaaaatgccctgcacgactgggtgctgttcgtgccctgtgatgtaccgcagttcccggcggatctggcagaaaaactctggcagcagaaaggtgatgccctgtgcgcttatgcctgtgatcaccagcgggcgcatccggcctttgcgctgtgtcaccgctcgctgatcacgccgctgacagaatacctcaccggcggcgatcgcaaacttctgctgtttatggataacatcggcgcaaaagccgtcatatttgatgcaaatcccggtgattttattaatctcaataccctcgcggagtgccgggaatgggaaaaacagcaccggctgccgcacccggtaccgctgctggccgtcactgcctacagcggcaccggcaaaactaccctgctgaaaaagctgatcccgcaactgcgggaaagcgggctgcgcatcggtctggtcaagcacacgcatcacgatatggatgtggatacgccggggaaagacagctacgagctgcgtaaagctggtgcttatcagacgctggtggtcagtcaggagcggtttgcactgatgacagaaaccccgggtggcgcggatcctgatctgatgcagctggctggccgctttgatacacgggagctggatcttatcctggtggaagggttcaagggggaatccgtaccgaaaatcgccctgttccgcgatgtgactgatcgtccgtatcagacactgctggatgaatttgttattgcgtttgcgtcagataagccacggcaggatgtcactgtgccgcagctggatatcaacaatatcactgccatccgcgactttattgtcagctggctggaaaataatccgtaa

SEQ ID NO: 276221 - DNA, 270 bp, Morganella morganii
atgaaatgtcatcgtcttaatgaggttatcgaacttctgcaccctgtctggcagcaacattctgatctgaacctgatgcagatgttacagaaactggctgacgaagccgggtttgagggtgaattatctgacctgaccgatgatattcttatttatcacctgaaaatgcgcggttctgaggcaacagacgccattccgggtctgaaaaaagattacgaagaagattttaaaaccgccctgttacgtgcacgcggcatcatcaaagagtaa

SEQ ID NO: 276222 - DNA, 996 bp, Morganella morganii
atgcagacgattaccccgccggttttcacttttcaggatttccggcctgaccgcctgatcgacagcctgagccgttacggtatctggcttgattccggtctgacggaactgaacagctatgaaaaccgcgtatatcagtttacggatgaaaaccgtacccgctatgtggtgaaattctatcgtccggcacgctgggatgaggcgcagatccgtgaggagcacgacctgaccctgacactggctcaggccgggctgccggtcgcggcaccgctggcctttgacggcgacacgctgctgtcacaggacggttatctgttcgcgctgtttccgtcgatcggcgggcgggcatatgagacggataaccttgatcagctggaaagtaccgggcggttgctcggacggctgcatcagataagccgggagcgctgttttgagcaccggccggcgatcggactgcaggaatatctgctgacaccgcgtgaaatcctcgcacagtgtccgctgatcccgcaggcgcgtcgtgacagctttatcgcggcactggataccctgatccgtgagacatctgcccgctggcacgacgactggcatgccatccgtctgcacggggattgtcatccgggtaatattttatggcgtgatgaaccgtggctggtggatttcgatgatgcccgcaacggcccggcggtgcaggatttgtggatgctgctcagcggggatacggattcgcgccgttatcagctggatattctgctcgatgcctatcaggagttttgtgacttcgatacgcgggagctggcactgattgaaccgctgcgcgccatgcgcatggttcattttttatcctgggtggcacgccgctggcaggatcccgcttttccccgggcatttccgtggatggcggaaggtgatttctggtcacagcagcaatcactgatgactgaacagacagccgtactggcggagcctccgctgacgcgctttctgccttattga

SEQ ID NO: 276223 - DNA, 624 bp, Morganella morganii
atgaagaaactttggttagcgctgattggatttgcgatgtcattcagtgtctttgcaaacccggtatccggaaaagagtacaccgaactgagcaccccggtaacaaatcagcctgacgtggtggagtttttctccttctactgtccgcactgctaccagtttgaagaaaacttcaaagtaccggaatccatcagcaaaaatctgccggaaggggctaaacatgaacgttatcatgttgatttcctcggcggtccgatggggcctgaactgaccaaagcgtggtctgtggcaatggcgatgggtgttgaggacaaagtgactccgctcctgttcgaaggcattcagaaaaccggcacaattaaaaccccggccgatgtccgtgacgcctttatcaaagcaggcgtgaccggcgaggattatgattccgctgctaacagcatctttgtgaaatccctgattgccaagcagcagaaagcggctgcggattacaaattacgcggtgtgccggcagtctttgtcaaaggtaaataccagatcaacaatgccggtctggaagtcaaagatgtgaatgaatacggtaaagcgttctctgatacggtcaattatctgctcaaacagaactga

SEQ ID NO: 276224 - DNA, 2793 bp, Morganella morganii
atggctcagattgcagacaaccctttgattttagtcgatggttcatcgtacctctatcgtgcttaccacgcattccctccgctgactaacagcgccggacaaccgaccggtgccatgtacggcgtgctgaatatgctgcgcagcctgataatgcagtatgaacccagccatgttgccgtggtatttgatgccaaaggtaaaacattccgtgatgaattgtttgaagcctataaatcacaccgcccgccgatgccggatgatctgcgtgagcagatagcgccgctgcatgacatggtcgtcgcgatggggatgccgctgttatctgtttccggcgtggaagcggatgatgttatcgggacactggcgaaacaggcggcggcagaaggccgtgccgtgctgatcagcaccggtgataaagatatggcgcagctggtgaccccggatatcaccctgatcaataccatgaacaatactattctcgggccggaagaggtggaaaccaaatacggtgttccgccgtcactgattattgattatctggcactgatgggcgattcctccgataacatcccgggcgtgccgggcgtcggcgagaaaaccgctcaggccttattgcaggggctgggcagcctggatgatatctatgcggatctggataaaatcgccggactgagcttccgtggtgctaaaaccctcgcgccgaagatggaaaccaacaaagagatggcatatctctcttacaccctggcgaccatcaaaaccgatgtggaactcgaccgcacctgggattccctggcactgacggaaccggacttagataagctgcatgcattattcacacagtatgaatttaaacgctggataagtgatctggaaaacggcggctggctggcgaagaaaagtacccgcagtgcgccgtcaaaagcagcggtaactgccgcagtacagaccccggcaacaccggtgggcacaccggaaatcagcagcgaaaactatgaaaccattctcgatgaagaggcgctgaaccgctgggcacaaatcctgcgtgaagcaggtgagtttgcgtttgataccgaaaccgacagcctggataatctctccgcacgtctggtcgggatgtcgtttgcggcgaaagcaggccatgcggcgtatgtgccgattggtcatgattatctggatgcgccggatcagttgttaactgagcaggtgctgcgggtgatgaaaccgattctggaagatgaaaaaatacggaaaatcggtcagaacctgaagtttgaccgcgggattatggaaaattacggcgtggaactgcgcggaatcgccttcgataccatgctggaatcctatgtgctcaacagtgtcgccgggcgtcatgatatggacagcctggccgaccgtcatctgaattacaaaaccaccacctttgaagatatcgccgggaagggcaaaaaacagctgacgtttaatcagatcccggtggaagaagccgccaattatgcggcggaagatgcggatatcacactgctgctgcatcaggcgctgtatccgcagctggaagccgaaaaatcgctgctgcatgtctatcaggatattgaaatgccgctggtgccggtactctcccgtatggagcggaccggggttctgatcgatgccaatgtgctggctgcacagtcagcggagctgacagcccgtctggatgagctggaaaaacaggcatttgcgattgccggagaagagttcaacctctcttcaccgaagcagctgcaaaccattctgtttgaaaaactgaatctgccggtggtgaagaaaaccccgggtggtgcaccgtcaaccaatgaggaagtgctggaagagctggcggataaccatgaactgccgcgcgtgatcctcgaacaccgcagcctgtccaaactgaaaactacctataccgataaactgccgctgatggtggatccgaaaacccgccgtgtgcatacctcgtatcaccaggcagtgaccgcgaccggccgtctttcttcccgtgacccgaacctgcagaatattccggtcagaaccgatgaaggccgccgtatccgtcaggcgtttattgcccgtgacggttactgcattatggccgcggactattctcagattgagctgcgcatcatggcgcatctgtcacaggacaaagggctgctgaaagcctttgccgaaggtaaggatatccaccgtgctaccgccgccgaagtgtttggtgtgccgctggacgaagtgacagctgatcagcgccgcagtgcgaaggcgatcaacttcggcctgatttacggcatgagtgcatttggtcttgcccgtcagctggggatcccgcgcggcgaagcgcagcgctatatggatctttattttgagcgctatccgggtgtgctggaatatatggcccgcacccgcgaacatgcggcagaaaaaggctatgtggaaacactggaaggccgccgtctctggctgccggaaatcaattcccgtaacggtatgcgccgcaaggccgctgagcgcgaggcgatcaacgccccgatgcagggtaccgcagcggatatcatcaaaaaagcgatgattgccgtggatgactggctgcaaaaagagaatatcgatgcactgatgattatgcaggtgcacgatgaactggtgtttgaagtcagaaaagaacaacaggcagagatggcagagaaaatccgcgggctgatggaagcggcgatgaagctggatgtaccgttaaaagtagaagcgggggtaggcgccaactgggacgaagcccactaa

SEQ ID NO: 276225 - DNA, 513 bp, Morganella morganii
atggcattactgacattacggcattttcctgatccctgcctgcgggaaacggcccaacccgtcacggtttttgatgacgaactgaaaacatttgtcacagatatgacagaaaccatgtatgccgagcggggcatcggccttgccgcgccgcaggtgggtgtctgtaagcgtgtgattatcgtggatatctctgaaaaccgcgatcagccgatggcgctgattaatccggaatttattcagtgcgatggcgaaatgatgatgatggacggctgcctgtccctgccggaaagctacacagaaactcagcgctactccgctgttactgtccgttatcaggatataagcggtgcagagcatacccttgaggcggaagggttacaggcgggctgccttcagcatgaaatcgaccatctcaacggtaagttatttatcgaccatctctctccgctgaagcgccagcgtattgagaaaaaagtgaagaaaaccctgaaaatgcgggaagaaaacgcataa

SEQ ID NO: 276226 - DNA, 624 bp, Morganella morganii
ttgaccattaaaacgcacaactaccaagcgacccattttgtcatcagcgcaccggatatccgccatttaccggaagatacggggatcgaggtggcgtttgccggtcgctccaatgccggaaaatcgagtgcactgaatgcactgacacagcagaaaagcctggcgcggaccagtaaaacaccggggcgcacccagcttattaacctgtttgaagtcactgagggctgccgtgtggttgacctgccgggctacggttacgccgaagttccggaagcgatgaaacgcaaatggcaggcagcactgggtgaatatctgcaaaagcgtgattgtctgcgcggtctggtggtgctgatggatatccgccatccgctcaaagacctggatatgcagatgattgaatgggccgtggccatgcaggtaccggttctggcactgctgaccaaagccgacaaactggccagcggcgcacgtaaaaaacagctgatggcagtgcgtgatgcactgactgatctgagtgaaaccggcgatattcaggtggaatatttctctgccctgaaaaaaatcggcattgataagttacgtctgaaactggacacctggttcagcgaaagcgacgcagagtga

SEQ ID NO: 276227 - DNA, 567 bp, Morganella morganii
atgttaaaacgtgttttagttacatttgtggcagcctgtaccctcagtgcaacgtcgctggcgttcgcggcggagcagacgcatgttaaatttaccaccaccgcaggcgattttgaaattgcgctggataatgaaaaagcgccgaaaaccgtggaaaattttaaacagtatgtcaccgataaattctatgacgatacaacattccaccgtgtcatcccgggctttatggtgcagggcggcggctttacggcggatatgaaccagaaacagacccgcccgccggtaaaaaatgaagcggataatggtctgcgtaacctgcgcggcaccattgcgatggcgcgtaccgcagataaagacagtgcaaccagccagttctttattaacgtagcggataatgcattcctcgaccacggtcagcgcgatttcggctatgctgtgtttggtaaagtcgtgaacggcatggaagttgtcgataaaatctcaaaagtgaaaacggaaaacatcggtccgtaccagaacgtgccatcgacaccgatcaaaattatttctgcaactatcgtaaaataa

SEQ ID NO: 276228 - DNA, 576 bp, Morganella morganii
atgctattaattatcgataattatgactcatttacttataacttgtatcaatacttctgtgagttaggtgcagatgtacaggttaaacgaaatgatgccgtcagcctcagtgatattgagcaattatcgccatctcacctggtgatctcaccgggtccctgcacgccgtcagaagccggtatttcgctggatgcagtcagccatttcgccggtgaaatcccgatcctcggggtgtgtctcgggcatcaggctatcggccaggcattcggcgcgcaggtggtgaaggcgcgtaaagtgatgcacggcaaaaccacagcaatccatcataatcagcagggtgtgtttaaagggctgaaccgtccgctgaccgtcacccgctatcactcgctggtgattgccccggaaacattgcctgcctcgtttgaggtcaccgcatggagtctgcatgacggcaatgtggatgaaatcatggggatccgccataaaaccctgccgattgaaggtgtgcagttccatccggaaagtattctcagtgaacaggggcatgaactcctgaataatttcctgaaatactaa

SEQ ID NO: 276229 - DNA, 1221 bp, Morganella morganii
atgacaaaacagaatgcggttacgcgcggcacttatgatgaagtgatgctgccaatttatgcaccggctgattttattcctgtcagaggtcagggaagccgggtgtgggatcagaacggcactgaatatgttgatttcgccggtggtattgccgtactggcgctgggtcattgtcatccggcactggtcgcggccctgaaagcccagagtgaatcgctctggcatgtcagcaatatttttactaatgaaccggcgctgacactggcgcagaagctgataaaacatacgtttgcggaacgggttttctttgccaactccggtgcggaagcaaatgaagccgcattcaaactggcgcgacattatgcactgacccgtcatcatccttataaaaccaaaattatcgctttccatcacggcttccacggccggacactctttaccgtttctgtcggcggccagccgaaatatgccgatggtttcgggccgaaaccggctgatatcattcatgtgccttttaatgaccttgatgctgttaaagcagtgatggacgatcacacctgtgccgtggtgctggaacctgtccagggcgagggcgggatcacgccggccacaccggcctttatgcagggcctgcgtgaattgtgtgataaacatcaggcgctgctggtatttgatgaagtgcagagcgggatggggcgcagcggtaaactgtttgcctatatggattacggcattgagccggatattctgaccacggccaaagcgctgggcggcggtttcccgatcagtgccatgctgacaaaacaggatattgcacaggtgatggtacccggtacgcacggtacaacctacggcggcaacccgctggcctgtgcggtcggtaatgcggcctttgatctgatcaacgacccggcattgctggcgggagtgaatgagcgccaccagtggtttgcggatgcactgcaatccctgaacagtacatttggtgcatttgcggagatccgcggaaaagggctgctgattggtgccgaactggcgggtatttaccgcgatcagtcaaaaaccctgctgggactggcagccaaaaatggtctgatgctgcttaacgcaggtaccaatgttctgcgtttcacgccatcactgattattgaaaaagccgatgtggatgaaggaatgaaacggctggcgaaaaccctgaatgatttccgggaaatgcagtaa

SEQ ID NO: 276230 - DNA, 147 bp, Morganella morganii
atgtactcaaaacgcgacatttctgagataaaaaaaatgagtatcaaagagcgtaaaatagcagcaatgcgtcagttgaaagcctcttttgatcaagctggccgtgaaggaaagctgcgggttcgcagagctgatatttttcagtaa

SEQ ID NO: 276231 - DNA, 633 bp, Morganella morganii
atggttctcggcaagccacaaacagaccccacgcttgaatggtttttgtctcactgccatatccacaaatatccatccaaaagcacgcttattcatcagggcgaaaaggcagaaacactctactatattgtaaaaggttctgttgcggtgctgatcaaagatgaagaaggcaaagagatgattttatcctatctcaaccagggtgatttcatcggtgaactcggattatttgaggaaggacaggaacgtacagcgtgggtacgggcaaaaagcgcctgcgaagttgcagaaatctcgtacaaaaagttccgccagcttatccaggttaacccggatatccttatgcgcctttccgcgcagatggcaagccgcctgcaaaccacatcagaaaaggtcggaaaccttgcattccttgatgtgacaggccgcatcgcccagacattactgaacctggcaaaacagccggatgcaatgactcatccggacggcatgcaaatcaaaattacccgtcaggaaatcggccagattgtgggatgttcccgcgaaaccgtcggccgtattctgaagatgctggaagatcagaacctgatctccgcacacggtaaaaccattgtggtatacggcacccgttaa

SEQ ID NO: 276232 - DNA, 408 bp, Morganella morganii
atggaagcgcgtgtaaagtgggttgagaacatgactttcttaggggaatccgcgtcaggacaccagattacaatggacggtaatgccggtgaaaaagccccgaacccgatggagatggtactgatggcaaccggcggctgcagcgctattgatgttgtctctattttgcaaaaaggccgtaatcaagtcattgattgtgatgtaaaactcaccgctgaacgtcgtgaaaccgcgccacgtttattcactcatattaatctgcattttattgtgaccggccgtgacctgactgaaaacgttgtcgggcgtgccgtgcaattatccgctgagaaatattgctctgtttcattaatgttaggcgaaagtgttaacattacgcatagttttgaagtaaagaatattgaatga

SEQ ID NO: 276233 - DNA, 876 bp, Morganella morganii
atgtcacggacccacccgattatcgccgttaccggctccagcggagccggtaccactaccaccagtcaggctttccgtaagattttccagcagctggatgcggttccggccattattgaaggtgacagtttccaccgttacacgcggccggaaatggatgccgccatccgcaaggcccgcgagcagggccgccacatcagctatttcgggcccgaagccaacgattttggcctgctcgaaagcacattccgccagtacagcgaaaacggcagcggcgagcgccgcaaatacctgcatacctatgatgaagccgtgccctataatcagttgcccggcaccttcaccccccgcgaggcacttcctgccgggacagatgtgcttttctatgagggattacacggcggcgtggtcacgccggaacatgatattgccggacatgtggatctgctggtcggcgtggtaccgatagtcaatctggagtggatacagaagttagtccgtgacaccaatgatcgcggccattcacgggaggcggtaatggattctgtcgtgcgttcgatggatgattacatccgctatatcaccccgcagttttcccgcacccacattaacttccagcgggtgccgacggtggatacctcaaacccgttctcggccaaatcgatcccgtcacaggatgagagctttaccgtgatccgcttccgcggcctgaaaaaaatcgatttcccctatttgttatccatgcttcagggctcctttatttccgcctcaaataccatcgtcgtccccggcggaaaattagggctggcgatggaattaataatggcaccgctggcagagcaattattgcagggaaaacaaataaacaagcgataa

SEQ ID NO: 276234 - DNA, 219 bp, Morganella morganii
atgattattccctggcaggatatcgcgccggaaacactggaaagtatcctggaaagtgtggtgctgcgcgaaggcaccgattacggcgaacatgaaaaatcactcagtgataaagtggcggatctttacacgcaactcaaaaacggcgacattgtgattgtctggtcggaattacacgaaacactcaacatcatgccgtcggcacaattccgcggctga

SEQ ID NO: 276235 - DNA, 987 bp, Morganella morganii
atgtctagtcattttcaaccgatttcctgggcaaccaatccgcacctgcaaacgttgctgccccggattttccgccggaaaccgacgataaagccattctggcagcgcctgacactgccggatgatgattttattgatcttgcatggagcgaagatcccgataccgcacgccataaaccacggctggtcatctttcacgggctggaaggcagtttccgcagcccgtatgctcacggtatcctggctgcggccgcccgtcagggctggttgggggttgtcatgcattttcgcggatgcagcggcgagccgaaccgctccagacggatttaccactccggtgaaaccgaagatgcccgttatctgctgaactggttgcaggatacctacgggaaagtaccgaccggtgcggtcggttattcactcggcggcaatatgctggcctgttatctcgccgaagagggtgagaatgccgcagtggatgcaggtattgtggtttccgctccgctgatgctggagccgtgctctttcaaaatggaaaaaggcttttcccgtttttatcagtggtatctgctgaaggggctgaaacgtaatgccacccgcaaactggttcgctacccgaattcactgccgacaaacctgctgcatatccgcgcgattaaacggatccgcgaatttgatgacattatcacctcacggatccacggcttccgcgatgcctcggattactaccgccggtgcagtgccctgccgaaactccctgccgtacgtaagccgatgctgatcatccacgccaaagatgatccttttatggcacaggaagtggtgccggatctgtcacaactgccgccgtgtgtggagtaccagatgaccgaacacggcggccatgtcggctttgtgtccggcagctggcgccgtccgcgtttatggctggaggagcgcatccctgaatggctcgcgccgcatctggccgcaaaggagacaccatga

SEQ ID NO: 276236 - DNA, 660 bp, Morganella morganii
atgaaaaacatactggtaattttccgggaagaaaatgaccacgttgccggattactcatgaccgcacatctttttatctcgctttccgtatttatgtttatcgcggcagtcacgcccggccccaataatatgttactgaccgcctccggtgcacagctcggctttcgccgtacgctggtactgatggctggtattatgctcggcatgcagacggtattatacctttcagcctttggtgttgcggctattttactgatttatcccaaattgcatactgctatgaaaattgcgggtagtctttaccttctgtggcttgccaaaaaactggccaccgcaccgtatcagcagcttaatgaaccgcaggtcagtaaggcggtcacctggtatcagggggcgctgttacagtttatcaatcccaaggcctggctgatgggactgggggctgtcggcagttacagcctgagcggtgatgcgtatatgctgtctgtcggggtgatgagtattgtgatggtctctgtgaatctggttgccgggcttatctggatcggattcggtgcctttatcggccgttttctgcgcagccgcaatgcctggttcaccttcaatattgtgatggggttactcaccgccgcctgtgtgccgctcatctggtttgaatag

SEQ ID NO: 276237 - DNA, 279 bp, Morganella morganii
atgattaagatcagtacgctgagtgccaggcaccgtaaaacgatggctgatatactgacaacaccaccaaagtcaggaataaaatgggatgatgtcagcagcctgattggtaatcttggcggtaaagtgaaaaacggaaacggctcccgcaggaggtttgttttgatgggggccgtgtacctgactcatcagcctcatcccggaaatgtgatggacaaaggggcggtggcgggtctgaaagagtggtttgagaataatattggggtggaacatgattaa

SEQ ID NO: 276238 - DNA, 354 bp, Morganella morganii
atgattaaaagcacaaatatcatgactatcgaaggtcaccctgcatccgtagcttatgaggatgaaattaaggcattccgcggtaagtttttggatgtaaacgggtattgcgattttgtatctgacagtattgaaggcctgaaaaaagaaggcgcagcgtctctgaaggaattcatacaatcttgtactgaagaaggcattgagccttttaaagagactgataaattaaaggcttttacactgcgttatccgggctggcttgagtcgcggctgaatgctgccacaacagcgaattcggtctcaaagaaccagtttattgttcagttactggagcaggcgcttatttcccgctga

SEQ ID NO: 276239 - DNA, 1446 bp, Morganella morganii
atggctaaaatcagtcagtcaaccatcatacagattctggatgccatcggcggtccgggtaacgtggcacagagcggtaactgtatgacccgcctgcgtctgacactgaacaacacacagctggcggataaaatcgccatcaaaaaaattgagggcgtgctgggtgtgattgaaagtgatgagcagttccagattgtgctggggccgggcaaagcacaaaccgccgcagagctgatgcagaaatatctggatgagcatgtgccgggcagtgaaccggacagccgcagcctgaaagaaattgccgctgatcagaagcagcatctgaaagaaaaacagacaaacccggtacagcgttttctcgccaaattcgccactatttttaccccgctcattcccgggtttatcggtgtgggtctgctgctcggctttgccacactgtttgaatcgctctgggtcaccggaaatccgtccccgaacggcactctcgtggaagtgctcagttacatgaaggtcttcggcaaagggctgtttacctttatggggatcctgatcggctataacgcgcagaaagccttcggcggatccggcgttaacggtgcaatcatcgcggcgttgtttatcctcggttatgatccgcaggcgaccaaaggtttctactccggtatggaaacgttcttcggtcacggcattgacccgcgcggtaacattatcggtattctgatcgccaccatcaccggtgcctgggtggagcggcaggtgcggcgttttatccctgcgaacctggatatcattctgacctccgccatcaccctgctgattatgggcgcactgacctttattgtgattatgccggtcggcgtctggctgtttgacggcatgtcctggctgtttatgcacctcaacgccaacccgttcggtgctgcggttctcgccggtctgttcctgattgcggtgatgttcggtatccaccagggctttatcccggtgtataccgcgctggtcggcactcagggttttaactccctgttcccgatcctcgccatggcgggtgccggccaggtgggtgctgcgctagcactgtatgtccgtgcgaaaaaagactcggtgctgcgtaatcaaatccgcggagcgattatcccgggcttcctcggcatcggcgaaccgctgatctacggtgtgaccctgccgcgcgtgaagccgtttatcactgcctgttgcggcggtgcggcgggcgggttctttatcgggcttgtcgcctggttcggctatccggtcgggctgaataccgttttcgggccatcggggattatcgccattccggtgatgacatccgacagtggtatcttcatggggatggcggtctataccggcgggttactcgtcgcctatctggccggattcctgtttaccctgctgttcggcagtaagaatgtggatttaagctga

SEQ ID NO: 276240 - DNA, 912 bp, Morganella morganii
atgaagattgacttaacctcaatgattaccgagagccgcaacccggccagcgcggatatcgacagcctgccgacattagatatgctgcgggtgattaaccgtgaagaccagaccgtggcccttgccgtggaaaaaacgctgccgcaggtggcgcaggtggtggatgcggtggcacaggcattccgcctgggcggacggctgatttatatgggcgcgggtacctccggccgtctcgggatactggatgccagtgagtgtccgccgaccttcggtaccccggcagagcaggtggtcggtctgattgccggtggtcacaaagctatcctgaaagccgttgaaaatgcggaagataaccgcgaactggcggtgagcgatctgaaagccctgaatttcagtgagaaagatgtattagtcgggatcgccgccagcggccgtaccccctatgtgctgggcggtatggaatacgcactgtcactcggcgcaaccgttgccgctgtcagctgtaatccggacagtgaaatgagccgtctggccggtatcgccatcacaccggtggtcggcccggaagtcattaccggttcctcccgcatgaaagccggaaccgcccagaaactgatactcaatatgatcaccaccggcgccatgatccgctccgggaaagtgtacggcaacctgatggcggatgtggaagcgaccaacgccaaactggttgagcggcagaaacgtattgtgatggccgcaacggaatgtgacagagcgaccgcagaacaggcccttgccgcctgtgacggacactgcaagaccgccatcgtgatgatcctggcacagctgagtgccggtgacgccaaagccctgctggcacagcatcaggggtttatccgtgacgcgctgaccggcgcggcgcactcttaa

SEQ ID NO: 276241 - DNA, 861 bp, Morganella morganii
atgacgatcctgacaaaaatcagctgggtaaaagcagagctggcgaccaatcagcagcatattgccgattttatcctggcgcagccggaagaaaccgtcacactctcctcccaggtactggcagagcgggtgggcgtgagtcagtccgctatagtgaagtttagtcagaaactgggatttaagggatttccggcactgaaagtcgctatcagcgaagagattggccgcaaccgggtgctggcagccaatcagcagcaggcgctgcataaccggatagaagcacatgatccgctgctggtgatcgcgcagaaactggcgcaggaaaaacagaactccattacggaaaccacacggcagctcgattttgaacagatggcagagattgtcgcctgtctggataatgcccgctgtattcaggttgccggtatcggcggctccgggctgacggcgaaagatctggcctataagctccagaaaatcgggctgatgacactggcggaagccgaccaccatatccagatcgccttttcccagacgctgaccgaaaaggatgtgctggtggtattgtcattcagcggcaaacgcaaggatatgctggtcaccgccgccacggcgaaaaaacagaatgccacgctgattgcgattaccgggaaccgtcagtcaccgctggcaaaaatggcggattatgtgctggaaacggtcgcggaggaaaatgagtggcgcagttcgtccatttcctcacggacggcgcagaatacagtgacggatttgctgtttatggcgctgttacagcggcgggaagagcaggcgcggcagttggtgatcaatgcccgcaccatgattaacagcctggacggctga

SEQ ID NO: 276242 - DNA, 1929 bp, Morganella morganii
atgattgttttctcttcacttcaggttcgccgcggcgtccgtgttctgctcgacaacgcaacggccaccatcaatccgggccagaaagtcggactggtgggaaaaaacggctgcggtaaatccacgctgctggcactgcttaagggcgaattacaggccgaggcaggcagtgtgtcatttccgggaaactggtccatggcctgggttaaccaggaaaccccggcactggatgaaccggcgatcgagtatgtcattgacggtgaccgcgaattccgtgagcttgaggcaaaattacagcaggcgaatgaacagaatgacggccacgccattgccgtgatccacggtcagctcgataccctcgatgcctggactatccgttcccgtgccgccacactgctgcacgggctgggattctcgcaggaacaactggacacgccggtacgggccttttccgggggctggcggatgcgcctgaacctggcacaggcactgatttgccgctctgatctgctgctgctcgatgaaccgaccaaccacctggatctcgacgctgtgatctggctggaaaaatggctgaaaagctatcccggcaccctgattctgatctcccatgaccgtgatttcctcgatccgatcattgataaagtcctgcacattgaacaaaacggcctgtttgaatacaccggtaactactcctcctttgaggtgcagcgcgccgagaaaatggcccagcagcaggcacagtatgaaagccagcagttacgccgcgcacatctgcagaaatatgtcgatcgtttccgcgctcaggcgaccaaagccaaacaggcgcagagccgtctgaaaatgctggagcgcatggagatgattgccccggcactggcggataacccgttccgtttcagtttccgtccgcctgaagcactgccgaacccgctgctgaaaatggaaaaagtcagcgccggatacggtgagaaagtggtgctggataatatcaaactgaacctggtgcccggttcgcgtatcggcctgctcggccgtaacggcgcaggtaaatccaccctgattaaaatgctcgccggtgaactggagccgttacagggcaaaattggtctcgccaaaggcatcaaactgggttacttcgcccagcatcagctggaatttttacgggcggatgaatccccgttacagcatatggtgcgcctggcaccggatcagaccgaacagcaactgcgcgattacctcggcggttatggtttcaaaggtgatcaggtgaccgataacaccggtcgtttctccggcggggaaaaagcgcgtctggtactggcgatgattatctggcagcgcccgaacctgctgctgctcgatgaaccgaccaaccacctggatctggatatgcgccaggcactgaccgaagccctgatcgaatttgagggcgctatcgtcgtggtttcccacgatcgtcacctgctgcgatccaccaccgatgatctgtatctggtgcatgatggtcaggtcgagccgtttgacggcgatctggatgattatcagcgctggctggcagacagccagaaacagatgcgccagagtgcagagccggcggcggaaaacggtgaggaaaaaaataccgtcaccgcgcaggatcgcaaagagcagaaacgccgtgaagcggaattccgccagcagactcagccgctgcgtaaagaatctgagaaactggaaaaaaccatgagccggttatcggacgccattgccgtgattgaggaaaaactcggtgacagcggcctgtatgatcagtcgcgcaaagccgaactgaatacctgtcttcaggaacaggcgcagttcaaagctgagctggaagaggcggaaatggcctggatggagattcaggaaaacctcgaagccatgacacaggcatttgaaaaccagtaa

SEQ ID NO: 276243 - DNA, 567 bp, Morganella morganii
atgataaataatccgaccatattactgatttacgcccatccggaaccgcatcactccatcgccaacaaggcgcttatctctgcggcgtcggaactcgggcatgtgacggtgcacgacctgtacggcacctatccggacttttttatcgatatccgccatgaacaggaactgctgcggcagcacgacatcattgtgtttcagcacccgctgtacacttacagttgccctgcgctgctgaaagagtggtttgaccgcgtgctgacccgtgatttctccggtgagcagggcggcagacagctgtccggcaaatactggcgtcaggtgatcaccaccggggaaccggcggaagcttatcagcacggcggctataaccgttttccgatcagcgagttactgagaccgtttgagctgacggcggcactgtgtgaaatgcactggctggcaccggttattctctatgccgcgcgccgccagggaaaagccatgctgcatgagcaggcgcaggcgtattgtgactggcttcgggcaccgcaactgaccggagggcgtaaaaatggagccaactga

SEQ ID NO: 276244 - DNA, 1854 bp, Morganella morganii
atggagccaactgacggcaacctgctgcatgcaggcattgtgtttctcgcggcagccgtggtgatggtgccggtggcgcagcggctgcgtatcggcgcggtactggggtatctgctggcagggattgctatcggcccgtgggggctgggctttatcaagaacgtcaatgagctgctgcacttctctgaacttggtgtggtgttcctgatgtttcttatcgggctggagctgaatccgcgtgagctgtggaaactgcggcgatctattttcggtaccggcaccgcgcaggtggtgttctccgccctgatcctcggggtactgctctggctgacggatttctcctggcaggcggcagtggtcggcgggctgggaatggcgatgtcctccacggcgatggcgttacagctgatggatgaaaagggcatgaccaacaacgacagcggtcagatgggattctcagtgctgctgttccaggatatggcggtgatccctatccttgcggttattcctctgctgggcggggaaacggcgggcagtgactggtatcgcatcggtatcaagattctggcctttgccggactgctgatcggcggacgctatctgctgcggccattgttccggctggtggtaaaatccggggtcagtgaagtctttaccgccgcctcgctgctggtggtgataggctcggcggtgtttatggagcagctcgggttttccatggcgctcgggacatttattgcgggtgtgatgctggcggatacggaataccgccatgagctggagatcaccatcgagccgtttaaagggctgctgctggggatgttcttcatttctgtcggtatgtcactgaatatcggcgtgctgtggcagtatctgccgcaaattctgctgggtgtgattgtgctggtgagtgtcaaaatgacggtgctgtatctgctggcacatctgacctgccggcgcagcgggcgcttacagtttgccggggtgctcagtcagggcggggaatttgcgttcgtgctgttctcagcagcgctggccagccgagtgattacggaccatcagatggcgctgctgctggtggtggtcaccctttccatgatgaccacgccgctgctgatgcagggcatcgatatgattctggcgcgccgttacaataatgccgaaccgggaacgggcgaaactccgtttgtggaggataaccacccgcatgtgattctggtcggtttcgggcggatggggcaggtcatcggccgtctgctgatggcaaacaaaatacatccgacggtactggaaaaagatgtcagtgcggtcagcgccatgcgccgttacggctataaggtttattacggggatgcgacaggactcgcattgttgcgctctgccggggcagagacggcaaaggtgattgtcattacctgtgataagccggaagataccatgacaatcgtgcagttgtgtcaggagcacttcccgcacctgcagattattgcccgcgcccggggacgggtggaggcacacgagctgcttacacacggcgtaacacagttcagccgcgaaaccttctcgtcagcgctggaactggcgcgcaaaaccctgatcgggctgggcacgcatccggcggaagcacaccgggcgcagcaattattccgcaggctggatatgcaactgctgcgtgagcttatcccgcaggcggaagaggaaatttcgcatatctcccgcgtgaaagaggcgcggcgcgagctggaaaatctgtttgataatgaaatgaaacgggaaaaacatctgccggacagctggaacctgacggaagactcaccgggcagcggacggacagagacaggagcagaaaaatga

SEQ ID NO: 276245 - DNA, 204 bp, Morganella morganii
atgagtaaccggaaacggtttattgcaggtgcggtatgccctgagtgtcaggcgcaggacacccttgccatgtggcgtgaggataatgtggacgtggtgcaatgtgtgcagtgcggccaccttgagcgccgggcggatgcgcatgcggagcagcatgtgcgcaaagatgaacaggtgattggtatctttacaccgggggaataa

SEQ ID NO: 276246 - DNA, 630 bp, Morganella morganii
atgaaagtagcaaaagacctggtagtgagcctggcttatcaggtaagaacagaagacggtgtattagttgatgagtctccggcaagtgctccgttagactatctgcacggtcgcggcgcgctgatcagcgggctggaaagtgcactggacggccgtgttgccggtgatgtgttcgacgtcgatgtcggcgcaaacgacgcctacggtcagtatgacgaaaacctggttcagcgcgtaccgaaagacgttttcgtcggtgttgatgagctggaagtcggcatgcgtttcctggcagacaccgatatgggtcctgtgccggtcgaaatcaccggtatcgaaggtgacgaagtgatcgttgacggcaaccatatgctggccggtcagaacctgaaattccacgtcgaagttatcggtgtgcgtgaagcaacagcagaagagctggagcacggtcacgttcacggtgaagaaggcggctgctgcggtggtcacgaccacggcgaagaaggcggttgctgcggcggcggtcacggccacgaccatgatcacgaacacggtgaaggcggctgctgcggcggcggtggtcacggtaaaggtcacggccacggtaacggcggctgcggttgtcactga

SEQ ID NO: 276247 - DNA, 219 bp, Morganella morganii
atggaccttttggaacttgaacaacgcctcgaacaacttgaaagcaaaaccgcctttcaggacctgaccattgaggaactcaatcaggtggtaacacagcagcagatggatatcacccggctgaatgaaaggctccgcctgctgaccgaacgcctgaaagccacccctggctcaaatgtggcaccgctgtctgaagaagtgccgccgccgcactactga

SEQ ID NO: 276248 - DNA, 759 bp, Morganella morganii
atgaaatcactgtttaaagcgactgttgtcgcaacctcgctggcaatgacattaggtatgtcacaggcttatgcggataccgcgccgaaaaaagaagaagtgaaactgaacagcgcatttaaaaccgcaagtcagcagaatgcttatgcgctgggtgcgtcactgggccgttatatggaaaatgccctgaatgagcagaaatccattggcctggatctggatcgcgatcagatgatggcgggtgttcaggatgcattcaataacaaaagcaaactgagtgatgaagagatcaaccagacgctgcgcggctttgaagagcaggtgaaaggtgccgctcaggaaaaaatggcgcgtgaggcgactgaaaacaaagcagccggtgacaaataccgtgccgcattcgccaaagaaaaaggcgttgaaaaaaccaagagcggtgtgctctacaaatctgaaaaagacggtaacggcgcatctccgaaagagactgacactgttgttgttcactataaaggtgcattaattgacggtacccagtttgacagctcttacgaccgtaacgagccgctgactatccgtctggacagcgtaattaaaggctggaccgaaggtctgaagcagatgaagaaaggcggtaaagccaaactggtcatcccgccggaagcagcttacggcaccgacggtgttccggggatccctgccaactccaccctggtctttgacgtcgagttactggatatcaaacctgcggccaaataa

SEQ ID NO: 276249 - DNA, 702 bp, Morganella morganii
atgtctaacccagtattatttaatgacaatgattcggattacattgtaaatcatccgtttactgaaacggattatgaaatcctgaaatcctatgaggcggctgttgatggcctggcgctgctcatcggtgagcactgtgaaatcgttctccactcactggaagacctgaagcgctcagcggtgaagatcgcaaacggtcatcacaccggccgtaaagtcggttccccgattaccgacctcgcgttgcgcatgctgcacgacattacagatgaagactgcagcacctcgaaagcctatttcacgcgggcgaaaaccggggcactgatgaaatcgctgacgattgctatccgcaataaatcacgccgtatcatcgggctgctgtgtattaacatgaacctggatgtgccgttctcccagatagttcagacgtttatcccgaaagagctggcagaagagacctccaatgtgaacttcgcctcttccgttgaagacctggtggcacagacgctggaacagacgattgaagaagtgaatgccgaccgcaacgtggcaaacaacgcgaagaacaaacaggtggtactgaacctgtatgagaaagggatatttgatatcaaagatgccatcaaccttgtggcggtgcgtctgaatatctccaaacacacggtttatctctacatccgccagtttaaaaacggcgagtaa

SEQ ID NO: 276250 - DNA, 396 bp, Morganella morganii
atgacaccgttatcttactgcctgctggtcaccggcccggcctacggcacacagcgtgccggcagcgcgttgctgtttgcacagcatgtgattgcggccggacaccggattcagtgtgtgtttttttaccgcgaaggggtcagcaacgccaatgtgctgacatcaccggccggggacgaaaccgacatgatacgtcagtggcagcagcttgcccgcgataacggtattcagctggcagtctgtgtggcagcggcgctgcgccgcggtgtcaccgataccgcacaggcggagtcactgaaactggcagcagccaatctggcggacggtttttccctcagcggcctgggaactctggcggaagccatgatgacctgtgatcgcgttatccagttttag

SEQ ID NO: 276251 - DNA, 360 bp, Morganella morganii
gtgaaacgtattgcatttgttttcagaagtgcacctcacggcagcagcagcggccgggaagggctggatgcactgctggcaaccagtaattatacggaagaggttgcggccttttttgtgtctgacggggtatttcagttattaccggaacagacaccggcaaaaattctcgcccgtgattatatctccaccttcaaagtcctgccgctgtacgatatcggtgagtgctactgctgtgcggaggatatggctgcacgcgggttatccccggagacggcgtatatcctgccggttacctgcctgagtgcggcggaactggcccggaaactggcggcatttgacgccgtggtgtcattttga

SEQ ID NO: 276252 - DNA, 375 bp, Morganella morganii
atggcaacgattaatcagctggttcgcaaatcccgtagctcgaaagttgtgaaaagcaacgttcctgcactggaagcatgcccgcaaaaacgtggcgtatgtactcgtgtatataccaccacacctaaaaaacctaactcagcactgcgtaaagtatgccgtgtacgtttaaccaacggttttgaagtttcttcatacatcggtggtgaaggtcataacctgcaggaacacagcgtgatcctgatccgcggtggtcgtgttaaagacttaccgggtgttcgctaccacactgttcgcggcgcactggactgttccggtgttaaagaccgtaaacaagctcgttctaagtacggtgtgaagaagccaaaagcttaa

SEQ ID NO: 276253 - DNA, 471 bp, Morganella morganii
atgccacgtcgtcgtgtaattggtcaacgtaaaattctgccagatcctaagttcggatcagagctgctggccaaatttgtaaatatcctgatggtagacggtaaaaaatctaccgcagaatcaatcgtatataccgcgcttgagaccctggctcagcgttcaggtaaagagcacctggaagcattcgaaatcgcactggataacgtgcgtccgacagtcgaagttaagtcccgccgtgttggtggttctacttaccaggtgccggttgaagttcgtccggtccgccgtaatgcattagcaatgcgctggatcgttgaagctgcccgtaaacgcggtgataagtccatggctctgcgcctggcaaatgaattatccgatgcagctgaaaacaaaggcactgccgttaagaaacgtgaagacgttcaccgtatggcagaagctaacaaggcgttcgcacactaccgttggtaa

SEQ ID NO: 276254 - DNA, 2127 bp, Morganella morganii
atggctcgtcaaacacccatttcacgttaccgtaatatcggtatcagtgcacatatcgacgccggtaaaaccaccacaacagaacgtattctgttttatacaggtgtgaaccataaaattggtgagacccacgaaggttcagcaacgatggactggatggagcaggaacaagagcgtggtattactatcacctccgcagcaaccactgcgttctggtccggtatgggcaaacaatttgaaccacaccgcatcaacatcatcgacaccccggggcacgttgacttcacaatcgaagtagaacgttccatgcgtgttcttgatggtgctgtaatggtttactgtgccgttggtggtgttcagccacagtctgaaaccgtatggcgccaggcaaacaaatatcatgtacctcgtatcgcgttcgttaacaaaatggaccgtatgggtgcaaacttcctgaaagttgttgatcagatcaaaactcgcttagcggctactccggttcctcttcagttagctatcggcgctgaagaatcattcaccggtgttgttgacctggttaaaatgaaagcgattcagtggagtgaagaagaccagggcgttaccttcgtctacgaagatatcccggcaaacatgaaggaattagctgacgagtggcaccagaatctggttgaagccgcagctgaagcttcagaagagctgatggaaaaatatctcggcggtgaagaactgactgaagctgaaatcaaatcagcattacgtcagcgcgtactggcgaacgaaattatcctggtaacctgtggttctgcatttaagaacaaaggtgttcaggcgatgctggatgcggttgttgagtacctgccatctccgacagaagttcctgcaattaaaggtattctggacgacggtaaagataccccggctgagcgtcactcttctgatgaagagccgtttgcatctctggcatttaaaattgcaaccgacccgttcgtgggtaacctgacgttcttccgcgtgtactccggtgttgttaactccggtgataccgtactgaacccggttaaatccaagaaagaacgtttcggccgtatcgttcagatgcacgctaacaaacgtgaagagattaaagaagttcgcgctggtgacatcgcggctgctatcggtctgaaagacgtcactacaggtgatactctgtgtgcgattgatgcaccaatcatcctggagcgcatggaattccctgagccggtaatctccgttgcaatcgagccgaaaaccaaagctgaccaggaaaaaatgggtatcgcactgggccgtctggcacaggaagatccatcattccgcgtatcaagtgatgaagagactaaccagactatcatcgccggtatgggtgaattacacctggacgttctggtcgaccgtatgcgtcgtgagttcaaagttgaagcgaacgtgggtaaaccacaggttgcttaccgcgaagcaatcactatgaaagtgactgatatcgaaggtaaacacgctaaacagtccggtggtcgtggtcagtacggtcatgttgttatcgacatgtacccgctgaacaagaaagatgccgaaggcgtcaacatggaatacgaatttgtcaacgaaatcaaaggtggtgtgatccctggtgaatacatccctgcggttgacaaaggtatccaggagcagctgaaatctggtccgttagcaggctaccctgttgttaacatgggtgttcgtctgcacttcggttcataccatgatgttgactcctctgaactggcgtttaaactggcagcatctctggcgtttaaagacggcttcaaaaaagcgaaaccagttctgctggaaccaatcatgaaagttgaggtggaaacaccggaagactacatgggtgacgtcattggtgacctgaaccgtcgtcgcggtatgatcgaaggtatggatgacatgcctaccggtaaaatcgtccgtgcgcaagtgccactgtctgaaatgtttggttatgcaactgacctgcgttcacagactcagggccgtgcttcttactccatggaattcctgaagtataatgaagcgccaaacaacgtagctcaggctgttattgaagctcgtaatgcaaaataa

SEQ ID NO: 276255 - DNA, 234 bp, Morganella morganii
atgaaaaaacgaaatttcagtgcagaattcagacgtgaatccgctcagttagtggtggatcagaactatacggttgcagatgccgcaaacgccatgaatgtcggactttccactatgacccggtgggtaaagcagttacgggatgaacgtgccggcaaaacacctaaagcctcccctatcactccggagcaaattgagatacgtgagctgaagaaaaaaactccaacgtattga

SEQ ID NO: 276256 - DNA, 660 bp, Morganella morganii
atggcaagagagttattgaaaggcaatcgaaccatcaattcagtcatcggtacgatcaatgaatgggccgattactactacgacccagctcggttttacagctacattgcagaaaagtatgagttaggagaacaaggtttctttaaatgggatggcttgcgttacttcttgtttgaatatgacgcttggctaaccaaacgtggcaaacaagaaaccatgaaacttggttggaatgatctcaaagcgacaagcaaagataagatcaccattgagcatatattcccacagacaccttctaaccaatattggcaggatcgcttcggaaatttgaccaaagagcaaactacatggttagctaactccctaggcaacttagtaccattgagccgagcaaaaaactccagcctgcaaaacgatggattcgatgacaagaagaataatggttcaggcattggttattacaacggttcagcagccgaaaatgaaattgctcagttagaggaatggctacctgagactattctttcccgaggtctcgcattgttcgagtttatggagaaacgctggagaatctcactgggtgacgagcagtttaaagccaaattacttcacttagactttctcgcagagagtgaacaacgagaacaacagatcgcataa

SEQ ID NO: 276257 - DNA, 1209 bp, Morganella morganii
atggccctcactgacataaaaattaagacagcgaaaccactggagaaaccttacaaactctctgatagtggaggcctttacctgcttgtaaaccgtaatggatctaaatactggcgattgaagtaccggtttgccggtaaagaaaaaatgctctccattggagtgtacccgcaagtcacacttgctgaagccagaaatcaccgcgatgaagccaaaaaattactggcacaaaacaaagatccgagcgaagaaaaacaattagctaaactggaaaaatacttatcttcagaaagtacctttgaagccgtagctcgtgagtggcacacatcaaaagcagatcgctggtcactacgctatcgtgatgaaatcatcgatacctttgaaaaagatattttcccatacatcggcaagcgccccatagcagacataaaacctctggagcttctggaaacgctgcgtaagatggaaaagcgcggtgccttagagaagatgcggaaggtgcgtcagcgctgcggagaggtctttcgttacgcaatcatcacgggcagagctgaatacaaccctgcaccagatttagctactgctctaaccccaccaaagaaacagcacttcccattcttaaccgctgaagaactgccgtatttcctgaatgacttagctggatatacaggaagtgtgattactaaaacagccactaaaattattttactgacagctgtacgtacacaagagctccgttttgcccgttggcaggatattgatttagagaaagggatttgggagatccctgctgaagtgatgaagatgaaacgaccacatgctgtgccgttatcgaaacaggtgatcgaactatttaactcacttaaacctctatcagggcattatgagctcgtgtttataggccgtaacgaccatagaaagccaatcagcaaagagagcgtgaatcaggttattgagttactagggtataaaggaaggcttacaggacatggcttccgccacacaatgagtacaattttgcatgagaggggatataactctgcctggattgaaactcagctcgcgcatatcgacaagaatgcgatccgtggtacgtataatcatgctcagtatatggatgggcgaagagaaatgatgcagtggtatgcagactacatggacgagttggaggacagtttggataatgttgttaatttgaattttaagtaa

SEQ ID NO: 276258 - DNA, 2049 bp, Morganella morganii
atgatgaaccctttgcttaccccgacccaaaatcagctaccggcattttctgccatcaatccggaatgtattgtgcctgcggtgaaagaaacgctggataattatcgtcagacggtagagcaggtggtgagtcatgcacctgattttacatgggaaaatgtgtgtgttccgctggcggaagccggggataaattatcccgtgtctggtcgccggtcagtcatctgaactctgtcaaaaacagtcctgaactgcgcgaagcttatgaacagtgcctgccgctgctgtcagaattcagtacctggatgggtcagcacgaagggctgtataacgcctataaatcactgaaaatcagcccggcgtttgcgtcactgtctcaggcacagcgcaagtcagtggaaaattcactgcgtgattttgagttatccggcattggtctgccaccggagaaacagaagcgctacggcgagatttctgcccgtctgtctgagctgggttcgctgttcggcaataatgtgctggatgcaaccatgggctggagcaagcttatcaccgatgaaagcatgctggccggtctgccggagagcgcggttgccgctgcacaggcactggcggaatccaaaggtgagaagggctggctgtttaccctggatatgccgagctatctgccggtaatgacttacgccgataaccgtgagctgcgcaaagagatgagcgaagcctacggcacccgcgcttccgagctggggccgaacggcggtaagtgggataacagcagtgtgatggcggagattttagcgctgcgtcatgagctggcacagttactcggttttaaaaactacgcggaaaaatccctcgccacaaaaatggcggaaaacccgcagcaggtgctggatttcctgaatgacctggcggagcgtgcccatcatcagggtgagcaggaagtggctcagctggccgcctttgccaaagaacattacggcgttgataaactcgaaccgtgggatatggcctattttgcggataagcaaaaacagcatctgttctctgtcagtgatgagcagctgcgtccgtacttcccggaagaaaaagcgatcagcggattgtttgaagtgatccgccggatctacgggatcaccgccaaagagcgtttcggggtggaaacctggcatccggatgtccgtttctttgatttatttgataaggacggtgaattacgcggcagtttctatctggatctgtatgcccgtgagcacaaacgcggcggggcgtggatggatgactgcatcggccgtatgcgccacaaagataattccctgcaaaaaccggttgcgtatctgacctgtaactttaacaaaccggtcggcggcaaaccggcgctgtttacccatgatgaagtgctgacgctgttccatgagttcggacacggcctgcatcatatgctgacacagattgatgtggcggatgtttccggtatcaatggtgtgccgtgggatgcggtcgagctgccgagtcagtttatggaaaactggtgctgggagccggaggcgctggcctttatctctggtcattatgaaaccggtgagccgctgccgcagtcactgctcgacaatatgctggcagcgaagaactatcagtctgcaatgtttattctgcgtcagctggagttcggactgtttgatttccgtctgcatgcggaatatgacccggcaaccggtgctcaggtaatgcctaccttactgtccgtgaaagagaaagtctctgtggtgcctgctgcaccgtggaaccgcttcccgcatgcgttcagtcatatctttgccggtggttatgcagccggttactacagctatctgtgggctgatgtgctggcggcggatgcattctcccgcttcagcgaggaaggtatcttcaacccggtcaccggtcagtctttcctggataacattctcagccggggtggttcggaagagccgatggtcctgtttgaacgcttccgcggccgtaagccggaactggatgcgatgttaaaaggctacggaatcaacgggtaa

SEQ ID NO: 276259 - DNA, 759 bp, Morganella morganii
gtgaagattcgtttacagtgtgaacagggcgcagacagctgcgcccttgatgtattggcggcgcggtggggcctgaagcatgatgataccgcgccgatggcgctggtgctgacggcggaagggctggagctgcgcaagtgtgatgaaccgaaactcggcgggatccgtgtggattttgccggggggacgatggcacaccgtcgccgtttcggcggcggacgcggtgaggcggtggcaaaggctgccgggattaaaaaatcgtatcttccgtcagtggtggacgcgacagccggtctcgggcgtgatgcctttgtgctggcgtcgctgggctgtcatgtgcggatgattgaacgccatccggttgttgcggcattgctggatgatggtttacaacgggcctaccgggacagtgaaatcgggggatggatgcaggagagaatgatccttatccatgcgtccgggattgatgcgctggcggaaatcacaccaccgccggatgtggtctatctcgacccgatgtatccgcaccggcagaaaagcgcgctggtgaagaaagaaatgcgggtgtttcagtcgctggtgggcgcggatgaggatgcggatcttctgctggcacctgcactggcgctggcaacccgtcgtgtggtggtgaaacgtccggattacgcggagccgttagccgggcagaaagccgctgcggcgattgaaaccaaaaaccatcgttttgatatctatccctgcgtgaaagcagagggataa

SEQ ID NO: 276260 - DNA, 1341 bp, Morganella morganii
atgagtaactttatctctttggaaacgtttctggaaaatgttcagcgccgtgacccgtcacagccggaatttctccaggcggtgcgcgaagttttctccacactatggccgttccttgaaaaaaatccgcagtaccgcgatcagaacctgctcgcccgctttgttgaaccggaacgcgtaattcagttccgcgtgacctgggttgacgatcagggtcaggtgcaggttaaccgcgcatggcgtgtgcagttcagctccgctatcggtccgtttaaaggcggtatgcgcttccatccgtccgtaaacctctccatcctcaaattcctcggctttgagcagacactgaaaaatgccctgaccacactgccgatgggcggcgggaaaggcggttctgactttgatccgaaaggcaaaagccagggtgaagtgatgcgtttctgccaggcgctgatgaccgagctgtaccgtcatctgggcgcagatacagatgtccctgcgggtgatatcggcgtcggcggccgtgaagtcggctacatggcggggatgatgaaaaaactgtccaacaacaccgcctgtgtgtttaccggcaaaggtctctccttcggcggcagtctgatccgtccggaagccaccggttacgggctggtttactttactcaggccatgctggaacgccacgggatgagcttcgacggtatgcgtgttgcggtttccggctccggtaacgtggcgcagtacactatcgaaaaatgcctgtcactgggtgcaaaagtgatcaccgcatctgactcctccggtaccgtggttgacgaagacggtttcaccgccgaaaaactggcgcgtctgaccgaaatcaaagaccgttacggccgtgtggaagagtatgcgaaagagttcggcctggtgtatctgaaagatcagaccccgtgggctgttccggtggatatcgctctgccgtgcgccactcagaatgagctggatctggcagatgccgaagtgctgatcaaaaacggcgttaaagccgtggcggaaggcgcaaacatgccgactactatcccggcaaccgatgccttcctggcggcaaatgtcctgtttgcaccgggcaaagcagcgaatgcgggcggcgtggcaacatccggcctggaaatgtcacagaactctgtccgtctcggctggaaacgtgaagtggtggatgagcgtctgcatcacatcatgctggatatccacaatgcatgcgttgagtacggcagtgaagaaaaacagaccaactatgtgcagggtgcgaatatcgccggcttcgtgaaagtcgctgatgccatgctggcgcagggtgtgctgtaa

SEQ ID NO: 276261 - DNA, 438 bp, Morganella morganii
atggcatataaacatattctggtcgcagtcgatctttcgcctgaaagtgaagtgttagtaagcaaagcagtttctatggcaaaaccttacaacgccaaagtttctctgatccacgttgatgtcaattactctgacttatacaccggacttatcgatgttaacctgggtgatatgcagcagcgtattactgaagaaaccagtaattcactgaaaaacctggcgaaaaactccggttatacgattcaggaaatgctcagcggcagcggtgatctcggccaggtattagtcgatgccatcagaaaatatgatatggacctggttgtctgcggacatcaccaggatttctggagcaaactgatgtcttccgcccgtcagctgattaacaccgttcatgtcgatatgttaattgttccgctgcgggatgatgataacgcataa

SEQ ID NO: 276262 - DNA, 336 bp, Morganella morganii
atgttcagtatacttacactgttctgggcgttatgttttctttgtctgattaacatgatccggttttattcatccacccgggcattactctccgtcctgcgtgacagcgacccgctgctctaccacgctgtcggcggcaataatgcgtttactgaccacacccagtggcagaagcagctgcgccttatccgctatatcaatcagcgggaatatctcactcatcatgatcctgaagtgattttacgctgcgaacgtatccgccgtcagttcaccatgatcagtgcgatatgcggaattgtgattgcctctcttctgatgatgattatctggccgtaa

SEQ ID NO: 276263 - DNA, 1491 bp, Morganella morganii
atgctacatctatttacaggcctggaatttcacaccggcctcttgttagtactggcactgatctttgtgctgttttacgaagccatcaacggcttccatgataccgcaaacgcggtggcaactgttatctatacccgtgcaatgcgcgcgcagcttgctgtcgtcatggccggtgtatttaacttcctcggggtactgctcggcggtctgagcgtggcgtatgcgatcgtgcatcttctgcccacggacttactgctgaatgtcagttcggcccatggtcttgccatggtcttttccctgcttctcgccgctatcatctggaacctgggcacctggtacttcggtatcccggcctcaagttctcataccctgatcggcgccattatcgggatcggcctgaccaacgcaattgtgaccaacagttccgtggttgatgcgctgaatattccgaaaatgatcagcattttcctttctctgattctgtcaccgctggtcggcctggtgattgccggattaatgatctggttcctgcgccgctactggagcggcacgaagaaacgccgccgtatccacttaacaccggcagaacgtgagaaaaaagacggcaaacgcaaaccgccattctggacgcgtaccgcccttatcctttccgcagtcggcgtcagcttctcacacggtgcaaacgacgggcagaaaggtatcggtctgattatgctggttctgattggtgtcgcccctgccggctttatggtgaatatgaattccagtgattacgaaatcgcccgtacgcgcgatgccgtggtcaacctggagcagtattacaccacgcataaggatgcactggcacacgccattgagctgacaccggcactgaacacggagaataccgttctcaatgaacagttccactgtgacagctcccgtaccggcatcgtattaagacaggctcaggatctgctcggtaatattcatacctatgatgatttattaccggaacagcgcagccagatgcgccgtctgctgatgtgtatttcggataccgccgcagaagtggcgaaattaccggaaaccaaaccggaagatgcgcgtttcctgaaacgtctgtccaatgacctgctgaataccgttgagtatgcgcctatctggatcatcatttctgtcgcgctggcgctctctctgggcaccatgttcggctggaaacgtgttgcagtgactatcggtgagaaaatcggtaagaaaggcatgacatacgcccagggcgtgtctgcacaggttaccgcagctgtctccattggtgtggcaagttataccgggatgccggtatccaccacccaggtgctctcctctgcggtggcaggtacgatgattgttgacggtggtggtgttcagaccaaaaccatcaaaaacatcatgctggcctggatactgacactgccggtgtccattatcctgtccggcgtgctctactggatctccctgcagattatctga

SEQ ID NO: 276264 - DNA, 1203 bp, Morganella morganii
ttggaaaagtttgacgcgattgtaataggtgcgggtgccgccggactgttctgtgccgcgcaggctgggcagcgcgggctgcgggtactggtgctggataacggcaaaaaagccgggcggaaaatcctgatgtccgggggcgggcgctgtaattttaccaacctttataccgaaccggcggcgtatctgagcaaaaatccgcatttttgtaagtcagcgctcgcccgttatacgcagtgggactttattgccctggtgcagaaatatcagattgcctatcatgagaaaaccctcggccagcttttctgtgatgattctgcacaacagatagttgatcttctgctggcggaatgtgaacaggggaacgtggttatccgcctgcgcagtgaggtgacggaggtacagaaacagggcgatgacttctgtgtaaccgtaaacggaaagattgtgagcgcccactcactggtggtggccagcggcgggttgtcgatgccgggcctgggtgcgactccgctgggttaccgcctggcggaacagtttggtctgccggtattgccgacccgcgccgcgctggtacctttcacactgcataaaccactgctggaagcattacagacactgtccggcgtggcagtgcctgccacagtcaccgcacaggatggtacccgattcgcggaaaatatcttatttacccatcgtggcctgtccggccctgcggtcctgcaaatctccagctactggcaccctggtgagtatgtgagcattaacttacttcctggcaccgatctgacggagttctttaccgtgcagcgggaaaaacacccgaatctgagcctgcgtaatgcactggcgaagctgttaccaaaacggctggtggagtgtttacaggcaaccggtgatctgccggatattgcgctgaaccagttatccaaagctgcacagcaggaaattacagataaattgcaaaactggcaggtgcagccgaatggcacagaaggttaccggacagccgaagtgacactcggcggcgtggacacgcaggcactctcctccaaaactatggaagcccgcgatgtgccgggactctattttatcggcgaagtgaccgatgtgaccggctggctcggtggttataacttccagtgggcgtggagttcagcgtgggcatgtgcgcaggcactgccgttttcaccggatgtttaa

SEQ ID NO: 276265 - DNA, 699 bp, Morganella morganii
atgatctatgtacgccctgcaaatgaacgcggccatgccaaccacggctggctcgacagctggcacaccttttcgtttgccgattattatgaccgtaactttatgggtttttccgccctgcgggttattaacgaagattttatcgcggaaggccaggggttcggtacccatccgcataaagacatggaaattctgacctatgtgctgggtggtgcggtggagcatcaggacagcatggggaataaagagcaggtgcctgccggtgagttccagatcatgagcgccggaaccgggatccgtcactcggaatataatccggacaatgataatccgctgcatctgtatcagatctggattatccctgaaaaaaccggtctgactccgcgctatgaacagcgccggttcgatgcggcaaacggacgccggctggtgctttccccggatgcccgtgacggctcgctgaaagtttttcaggacatgacactgtggcgctggacactggccgccggtgaagagggtgaatatcagcctcagagcggacggatggtctggatccaggtggtgaaaggtgaactgaccgtgaatggccggacggtgaaaaccagtgatggcgtggccgtatgggatgaatcgttaatcagcctgaaagccgcacaagacagtgaaatcctgctgtttgatctgccgcctgctcaataa

SEQ ID NO: 276266 - DNA, 1620 bp, Morganella morganii
atgagcgtaaaaacgatggctgtgaatgaactggagcagtatggtatccgtgatgccgcagaaataatctataacccgagttatgacttactctttgatgaagaaacccgtcccggcctgaccggttatgaacacggtgtcgtcaccaccagcggcgcggtcgcggtggacaccggcatttttaccggccgctcaccgaaagacaaatatctggtcagagatgacctcacccgtgacaccgtctggtgggcggatcagggaaaaggcaaaaacgacaacaaaccgctgtcacaggacacctggaattccctgaaacacctgatcaccaatcagttatccggtaaacgcctgtttgtggtggacgccttctgcggcgccaatgccgatacccgcctgaaagtccgctttattaccgaggttgcctggcaggcacacttcgtcaaaaacatgtttatccgcccgaatgaaaacgaactgcatgattttgaaccggatttcattgtgatgaacggcgcgaaatgtgtaaatccggactggcaggcacagggactgaattcggaaaactttgtggcgttcaatctgagcgagcgcatccagcttatcggcggtacctggtacggcggtgagatgaagaaaggcatgttctccatcatgaactatctgctgccgttacagggcattgcctccatgcactgctcggcaaacgtgggtgaaaaaggggatgtggcgattttcttcggcctgtccggcaccggcaaaaccacgctgtccacggatccgaaacgcaagctgatcggtgatgacgaacacggctgggatgatgacggtgtctttaactttgagggcggctgctacgccaaaaccattaatttgtctgcggaagcagagccggatatttatcacgccatcagccgcgatgcgctgctggaaaacgtggttgtccgcccggacggcagtgtagattttgatgacggcagcaaaactgaaaacacccgggtttcttaccctatctatcatattgaaaacattgttaaaccggtgtccaaagcgggtcacgccaacaatgtgattttcctgactgccgatgccttcggcgtgctgccgccggtggcggaactgacaccggagcagatgcagtatcatttcttatccggatttaccgcaaaactggccggtaccgagcgcggcgtcacagagccgacacccactttctctgcctgcttcggtgcggcattcctgacgctgcatccgacacagtacgcagacgtactggtaaaacggatgaaagcggccggggcaaaagcgtatttagtgaacaccgggtggaacggaaccggaaaacgcatttcaattaagaatactcgtgctatcatagacgccattcttagtggggatattgataaagcggcgaaacatacgctgccggtctttaatctggccattcctcacgaactgccgggtgtcgacagtcatatactcgacccgcgcaacacatatgataatgtggcgcagtggcaggaaaaagcggaagacctcgcagggcggtttataaataattttgataaatataccgacacgccggcgggtcaggctctgattagtgcagggccttcgctgtaa

SEQ ID NO: 276267 - DNA, 891 bp, Morganella morganii
atgtctgcacgacaagatacattacaccggttcctgtttaacaaaagtgatgtccggggagaactggtcaatgcttccggcacattacagcagatcctggataaccatcattatccggagcctgtccgccgcctgctcggtgaactgctggtctgcaccagtctgctgaccgcaaccctgaaatttgaaggggatatcaccgttcagatccagggcgacggcccggtccgtctcgcagtgatcaacggcaacgaccgccagcagatgcgcggcatcgcccgtatgaacggcgatgtgcctgccggtgccggtttccacgatatgatcggcaaaggctttatggtcatcacgattacgccgcgtcagggcgaacgttatcagggtattgtggcgctggaaggggaaaccctcgaagcgtgtctggatgcctatttccgccagtccgaacagctgccgaccagcctgtttgtccgcgttgcggaacacgacggtaaaatgcaggctgccgggatgctgttacaggcactgccggcatcggcagaagcccgtacgcaggaagaaacacagaacatgttcagccacctgatgcagctgaccgccactatttcgtctgatgagctctttaccctggatgccgaaaccatcctgtaccgtctctatcatgaagaagacgttgtgctgtatgaaccggcaccgatagcgtttcattgcggctgttcccgcgaacgctgcgcagatacgctggtaacactgccggaggaagatgttaatcatattttgcaggaagatggcaaaattgatatggagtgtgaatactgcggtgctcatcatatctttgatgaacagaatattcgtgaaatccgcactcagaaaaacgcttctctgcactga

SEQ ID NO: 276268 - DNA, 417 bp, Morganella morganii
atgcaacaggcttcacaggtcacagagcctgtccgccttgataaatggctctgggcggcacggttttataaaacccgctctatcgccagaaccatgattgacggcggcaaggttcattataacgggcagcggaccaaacccggaaaactggtcgaaaacggcgcggttatcgtcctgcgtcagggaaatgatgaacggacaatccgcgtgctggggattacggacaagcgcctgagcgcgccgctggcacagacactctgggaagaaaccccggagagcatcgaaaaacgtgaaaaaaccgcgcttgcacgtaaaatgaatgccctgacgatgccgcacccggaacgacgtcctgataaaaaggaacgacggacattgttaaaatttaaacacagtaattcagataccgcggaataa

SEQ ID NO: 276269 - DNA, 2124 bp, Morganella morganii
atggctatcaccctcattataacggccgctctggtgatcggttgtcttataatggtttctgttatcagtcaccggcggagacagcgccgggcaggttatgtattaccttcactggccagcctgacacaccaccggccgggtgccggtgaaattcaggccattgagcaccatctgacctgcgctgcccggcaggcggtcagtaatgatctgcattttacattaccggctttccccaaaaaaagtgatcacgtctatcgtctgtgcaaccgcatcacccggtatgctatcccggagaaaaacgggcagcagtggcattattacattgaaggcaacgaggtttatctgcctgcggttctggatgaatttattcaggccacaaatgtcattgatgtgatgtttactgacgggataccgatgattgtcgggctgaacggtcatgacttacgtgagtttactgatgaccacgcgctggcaaggccaatgacaaaaaataacaacgtaccggtacaggccgcgatactgactaacagcaatgctgatattgagtttctcggcacacgcagagagagccggcaggaatataacctgcagcacagtcacgggtttatcagcggcacgctgattgtctgcggcgtgctgacggcgctcactgcggtttttatgccgccgtttttattttactggatgatggccgccggagccgggctgctgctgccgggcatcattttatccctgatcccgctcagcaaccgccgccgtctgcgggatattcagtgctaccgggggatcccgaaacgctggggcctgttcggtgattttgaccacagccagaagcacagcatttcactcggcggtatcgaccttatctatccgcgccactgggaaccctggctgcatcatgatctcgggtctgtcacacagattgaaatgtatgaggatcagcaggtggtccgccaggggaaatacctctccctgcgtgaggaatccacccgcttcccatatcaccgttacggaaaaaatctgctgatcgccctgaccagcgcctttgcccttctggttctggcctgcaatcagccggtcaatttaccggttaaactggccctgaactggctgaccggcacagaaaccaaagtcaccaccaatttcagtgaactccagaatatgccgctctatgtgggggattttctcgaggccaaaggcgtagggatgtgttacatgccgccgaacctctccgctcaggataagcccaatttccgcgcatttgactgctccggtatttactggaacaacacctccccgcttccggttcccgagtccgaacaggttgatcgcgccgccgcgctgcttgccgaactgaataaccagctgcatcccgatgccggagcccgtaaggtgaacgacagtctgcgcaatgttatcacccgctccggaatgagcctgctggatgatttttcctcactggttctgaaaacccaggcattatgtgaatttgaaaacagtgactgtgtgcggctgaaaaacgccctcgtcaatctggggaattccccgaactgggaaaatttattagcccgcgccaaagccggtaaactggagcaatcgaatgttttattgcgtcctgcaagtgccgaggccttggaaaagctggttatcgccaccacatctacagctataaacaaagaagtggaaaatgcggcaatgcggctgaacagtccgccgcctggtggtgtgctgctgatcagtgacgaaggcaaatccctggtggagaacgccccggtcaatgaacagacagaggaaatgacaccgctggcacactggcagtccctgcagaagctctccaatatgctgctgcacaccccgtttgaggttcagggcattgtcacggatgtgtctgtggatgccaacggcacccgtcatatcctgctgcactttcagccggataatgtcatgctggcgcggtttatcggcagctgcattttactggtcgtcttttcccttctggccattatcaacggcatctatacgtttatccgctggcgtcagcgccgccgccggatgacggatatccgccgttattacgacaactgcttccggcacgactacccttcctctgaggtgcagccgtaa

SEQ ID NO: 276270 - DNA, 555 bp, Morganella morganii
atggctgaattacaaaaaccgaaaattatccgcatcgagactgttgcccaatcccgtctgtttactgtccagtctgttgcactgaaattcagtaatggtgtggaacgggtttatgagcgtatgcgtcctgcaacccgtgaatctgttctgattgtccctgtggtaaataacgagcttatcctgatccgggaatacgcggcgggtgtggacagctatgagctgggcttcccgaaaggtgctgtcgatcccggtgaggatatgctgactgccgccaaccgtgagctgaaagaagaaatcgggttcggtgcccgcacactgacaccgctgcgccgcgtcaccatgtccccgtcctatttctccgggcagatgaatatcctgctggcggaagggctgtatcctgaaaagctggagggcgatgagccggaaccgctggttcaggagcgctggccggtcagtaagatgatggatctgctgacgcatccggattttaacgaggcccgcaatattaccgcgctgttcctggcgcagcaatttttacagcgtaccggccattaa

SEQ ID NO: 276271 - DNA, 2454 bp, Morganella morganii
atgtacaaatatgtcgaggctgacctgcccgatgtggccacactgaaagatgtcaaattacagacaccaatgcaggtctacagcgcggacggcgaactgattgcccagttcggtgaaaaacgccgtattccgctgacactcagccagatcccgccgatggtaaggaatgcctttatcgcgacggaggacagccgtttctatgatcaccacggaatcgacccgatcgggattttccgtgccgcttctgttgccatgacctccggtcgtgcctcacagggcgccagtaccatcacacagcagcttgcccgtaacttcttcctgagcccggaaaaaaccgttatccgtaaagtaaaggaagcgttcctggccatccgcatcgaacagatgctgaccaaagatgaaattctcgggctgtatctgaacaaaatttacctcggccagcgcgcttacggcgtgggggctgcggcttatgtctatttcggcaaaagccttgatcagctgactctcagtgagattgcggtgatcgccgggctgccgaaggcaccgtccacctttaacccgctttactccaaatcccgcgccctggcccgccgtaatgtggtgctgacgcggatgctggaagagaattacattacccgcgcccagtatgatgaagcgcgtaatgagccaatcgaagcccgttatcacgccccggaaattgatttttccgcgccgtatctggcagaaatggttcgtatggcaatgattgaaaagtacggtgaaaatgcctataccgatggttataaggtctacaccaccgttaaacgcaaagatcagctcagtgctgaagatgcggttcataccggcatcatcgactacgatatgcgccacggttaccggggagctcagcaggtattgtggccgcaaaacagcgcggcatgggatacagagcagatcctgagcaaactgaaaacgttacaggtctacggcccgctcaacccgggtgttgtgctgagtgcggatgctaaccgtgcacaggtgatgctcaaagacggctccaccatcgacctgaccatggacagcatgcgctgggcgcgcaaatttatctctgatcgcgctatgggtccggcgccgcgtgcggtaaacggcgtagtgcatgccggtgagcagatctgggtgcgtcagaataaagaccgctggatgctggcacagatcccggatgtcaactctgccctggtagcgctcaatccaacagatggcgctgtgatcgcactggtcggcggctttgatttcgagctgagcaaattcaaccgtgtcacccagtctctgcgccaggtcggctccagcatcaaaccgttgctgtataccgccgcgctggataaaggtctgacactcgcttccctgctcaatgacctgccgattgtccgtgcggatggtgctggtccggactggcggccaaaaaactcaccaccgcgttatgacggcccgatccgtctgcgtcaggggctgggacaatcgaaaaacgtggtgatggtgcgggccatgcgggcaatgggcgtgaattatgccgctgattatctgctgcgcttcggcttcccggacagtaatattgtccggacagaatccatggcgctcggctcttcctccttcacgccgatgcagatggtgcgcggctacgccgtgatgaccaacggcggctatctggtcgacccgtattttatcagccggattgataacaccgaaggcaaagccctgtttaccgcagagccgaaaattgcctgtccgcagtgcaccaacattccggtgatttacggcgaaggttcacatgacctggaaagcagcctgaacaaggatgcgctggaaaacgacgtggcgaaatcagacagccagccgcaggaaaatgaccagccggcagccccggaagccgacctggaaaaagcgccgcaggcagggagtgattccccgtatgcgccgcatgtggtcagcacccaggtggccttcctgatcaaagacgccatgaactccaatatctatggcgaaccgggctggagcggaaccggctggcgggcaatgcgggatatcaaacgccgcgacctcggcggtaaaaccggtaccaccaacagctcaaaagatgcctggtttgtcggctacggccccgacatcgttgctgcggtctggattggttttgatgaaaacgcccgtgacctcggccgtggtgaggccggtgcgaaaagcgcccagcctatctggaacgactttatgaaagttgcactggaaggggtaccggaacgcaaagatccgccgccaccggggattatctccgttcagatcaaccgcagcaccggtaagctgggttccggcggaaactcccgttccgaatactttatcaaaggtaccgagccgactgattacggtgtatcggaagtgggtacaactattatccagcaggacggcggttcagaagaactgttctga

SEQ ID NO: 276272 - DNA, 810 bp, Morganella morganii
atgcggattgcttcacggatggcgggaatttcacttcaggacggggagatcaggatagcactggcgcggcgcgtacgccggaggtggtgttttgaggattttatcacgctgacactgccggaaacggaatcagccgaaaacggtgtgcccggcctgtctgtagttgcggctgcactggcgccatggcggcggcgtatccgcgggcggccggattgccgggcggcactgccggtgtcactctgtcttcagcagcagatccgcctgccggagagccgtgtcgcgcagtctgcggtggtgccgctgatagatacctggctggcgcgcacatttccggggcgtcatcaggatcttatctatgattaccggtggttttccggcgatattattctgacggcgctgcaccgtactgtccgtgatcagtggctgtcgctggcggcggaactccgtgcggatctgacggtactcagcattattccctgtgcgctgcgctgttttgcccgcgcccgcggtgtggccgcacaggactggctggttttccgccagggaaacagtctctgctggaccgccggtgaaatgcagccggtactgagcggacgggctgacctgaccctgccgtcattactgacagagctgaaaacacagggttttgatgagtcacaggcggcactgtgctgcctgcacgatactgcgctgctgccgcaggcatggcagcgggaatgccggcgttaccgcaatgcggaggcggacgatgtcccgccgggctacgcggcggcggcaggaatggtactctgcggggaggagcggctatga

SEQ ID NO: 276273 - DNA, 561 bp, Morganella morganii
atgacacaccgggtgaatctgactgcctggcgctcccggctgaaacggcaaatctgccgcaggatagttttccggtttctgatggctggcggcgtgctgttatccgcactgctgccggtttatctgtttcattcactgaatgtgcagcatctggcgttgttacaggccgcatttgatgagcgggaaatctgtcttgagccgcagcgggctgaacttgcccgtcagcgcgcgctacagcggcaggcggaaacggaaaatctgcggcagcagcaaactgcacgggaaaaccgccgttaccgggatttgctggtttttttgcaggctcagctgccggaagatgcctggctggcacgttatcaggcagagcagcaaaagcatgatacagaaagcagtgtgcgccatgccctgtcggtgaaccgccgtcaggtgattgtcccgtctcatcctttattacagcgggcaccgccggggctgatgccgctcaggctgatcagcctgcagcatcacaaaacagccgggatccggcagtttatattggtgaccgggaggagccggtcatga

SEQ ID NO: 276274 - DNA, 516 bp, Morganella morganii
atgaatctgaacacagtatggcgctgtgcgcagtaccggcgcgtgcagtggggagtgactgccgggatctggttatcggccggtgtggtgttctggtgtttttatctgcaaccggcagcaggggaaacggaaatgcggttccggcagttgcagcggctgacagcactgtcagaacaggcggtgccggaaacggtggttctgccgcccccggatatcccgccgctgtttaccttactgcccgaaaatgcgctgccgttgctgaccggctggcagcaggagccgccggaacagccggaacgctgggtgctgacctttgaggcgcattaccctgagctggcggcgctgctcgataccctcagcggggagctgactcagttgccgatcacccggctttcgctgcacccgctgacacccggaacctcctcatccccgccgctgttgcagatgacactgcatctggcattaccgggggcggattcaccgggtccggaaaaggaatggcatgatgatgaataa

SEQ ID NO: 276275 - DNA, 1062 bp, Morganella morganii
atgatgatgaataaagcaaaatcagccgcccggctgatcactggttgttgtctgctgcttgcggcagcggctcccggcgggcagcatccgcgggatctttttcagcctgtcgtcatcagtgaggaaccggccgtgctgacagaactccccgtgatgtattccccgccgctgataccggaaagcgggcagagccgcacatttaccctgcaatatgcggatgcggcggacatgctggccctgctgaaacagcatcacggggaatggtttacagataataaagcgccggaagccgacccgctgacaaattccctctttatagaagcacaaccggatgtgctgtcgcgggcggaatcctggctgacacagatggatcagccgcagcagcaggtgcagattacggcgcatattgtgtccggctcgcgggaagggctgcatgagctggggctgcagtggggaacggtgctgccgtcaccggagtccggtaaccgcctgcaactgcatcaggcgcggggaaataacacttttacctttaatatcgcccgtcttggcgggcatctgctggagatggaactgagtgcgctggagcaggagcagcaactggatattgttgccagcccgcgcctgaccacggcgcacgagcatcccgccagtatcaaacaaggggcggaaattccgtacaccacgcaaaaccatgagtccggctcacaggtgcagttccgcgaggcggtgttggggatggaggtaacaccgcagatcctgcgggataataaggtgcgtctgacactgcatatcagccgcaatgctcccggtgcggcactgatgcagaacggcagcgagcagtattccattgataagcaggaaatcaccacacaggtgattgtccgcagcggggaaaccctgatcctcggggggatttttcagcaggataaaggcaggcaggtgaccggggtgccgtatttatcgtcgatcccattgatgggaaagctttttactcatcaatacgataaactcagccgccgtgaattagtgatattcattacaccgcagttgatcgatatttag

SEQ ID NO: 276276 - DNA, 525 bp, Morganella morganii
atggcagagaaacgcaatatctttcttgtcggcccgatgggtgccggcaaaagtactattggtcgtcagctggctcagcaattaaatatggaattctttgattccgaccaggaaattgaacgccgcaccggagccgatgtgggctgggtgtttgatgtcgaaggtgaagaaggttttcgcctgcgtgaagaaaaaatcatcaatgaactgactgaaaagcagggtatcgtcctggctaccggcgggggttccgtcaagtcacgggagacccgcaaccgcctgtctgcgcggggtgtggttgtgtaccttgagaccaatattgaaaaacaactggcccggacacagcgcgataaaaagcgtccgttgttacaggtcgatgagccggtccgggaagtcctggttaaactggccgatgaacgcaatccgatgtatgaagagatcgcggatatcactatccataccgatgatcagagtgcaaaagtggttgcaaatcaaattattgaactgttagaaaccaacagttaa

SEQ ID NO: 276277 - DNA, 1083 bp, Morganella morganii
atggaaaaagtgactgtgactctgggtgagcgtgcttatcctatttcaattgctccgggtctcttttccctctccggcacctttgcgccgctgaccaccggtcagcgtgcaatgatagttactaacgaaacccttgccccgctgtatcttcagatactgaccgacaaccttgcgcaagccggcgtacaggcggattccgtgattctgccggacggcgagcagtataaatccctgaccacccttgaccgtatttttaccgcgctgctggaaaacaatcacgggcgtgacaccacactgattgcgctgggcggcggtgttatcggtgatctgaccggatttgcggcagcgagctatcagcgcggcgtccgttttattcaggtgccgaccacgctgctgtctcaggtggattcgtctgtcggcggtaaaaccggcgtgaaccatccgctgggtaaaaatatgattggtgccttctggcagccggtcagtgtggtgattgatctcgattgcctgaaaaccctgccgcgccgtgaactggcatcagggctggcggaagtcatcaaatacggcattattctggatcacgatttctttatctggctggaaaacaatatcgaccgtctgctggcacttgagccgcaggcgatggcgtactgcatccgccgctgctgtgaactgaaagcagaagtggtggctgcggatgaaaaagagaccagcgggctgcgcgcactgctgaatctcggccatacattcggccacgccattgaggcggaaatgggctatggtgtctggctgcacggcgaggcagtcgccgcagggatggtgatggctgcacgcacggctgaactgctcgggaccttccgcccggaagagacagagcgggtcattgcgctgcttacccgcgccgggctgccggtgcgcggaccggaatccatgccggcggatgcgtatctgccgcacatgatgcgggataaaaaagtgcagggcggtaaactgcacctgattgtcccggaaacgatcggccggtcagttgtccgtgcggatatcccgcatgacagggtgctggctgccattcagtccgtgtaa

SEQ ID NO: 276278 - DNA, 129 bp, Morganella morganii
atgcgtagtgtaaccattttcccggcactcagcgagacagatatcaaaaaacttctgccgctgcttccgttacacggactgaatggcagccagcaccctgtcatgcgggatatccgcacggacaactga

SEQ ID NO: 276279 - DNA, 957 bp, Morganella morganii
atggacggctttaaacccgaaaagcaagaaccacagattttcagccagccggatgatgaatctatccgtccggacgcatctgacagaccggagcgccctgaacgccgtaatccgcgtccgcgcccgcagcagtcacggcctaagtttgccgtctcgcgccagcagatgatgatcggcgtggcggttgtggtcctggtgttactgattatcgcgataagctccgcgctgaaatcgccgtcagagccggaagcacagccgcaggcacagaacggcgagcgcccgattaccctcggcaccggcagcaatgacggtgcaacacagttacagccaaccgaaccagttccgtcacagaccgggcagaccggcgtgaatctccctgctatcaataacctgccgacacaggcacagcagccgtcacagacaaccggcaccggccagcgcgtggatatcccgggggatattaacgatgccctgaatcagggaaatacgcaggcgggtattaataatgcggcgcagcagaatatgaataatctgccgccggtggtcactccgaaggaagagccgaagaaaccgcttcagcaggtgaaaccgcaaccggtgaaaaccaccacggcaacaccggccaaaccgcgtgaaaccaccaaaccggccacagcggcaccggctccgtcaaaaagcggtaccgcgatcgccaaagcccctgccgggaattataccctgcagctgagcagtgcgagccgtgcggatacactgaaagcctttgcgcagaagcacgggttatccaactatcaggtttatgagacaacacgtaacggaaaatcgtggtacgtcctggtgtacggtaatttcccgacagtcggggatgcaaaacgggaaattgagcgtctgcctgccgaaattcagggaaaaaaaccgtgggtcagaaagatgcagcaagtgcatcaggacatgaaataa

SEQ ID NO: 276280 - DNA, 834 bp, Morganella morganii
atgattacagacagcatgaagaaacaacgcgcatttttgaagtgggccggcggaaaatacactctggcagatgaaataaaacggcatctgccggagggtgattgccttattgagccctttgtcggcgcggggtcggtttttctcaatacagattatccgcgctatgtgctggcggatatcaacagtgatctgatccacctctatacgatggtgaagcagcggacccgggaatttatcgatgagtcccgcaagctgttcacgccgcagtttaatgatgaattacagtactatgcgctgcgggaacaatttaatcagagcacggatcattttgagcgcagcattctgtttctctatctgaaccgtcattgttataacggtttgtgccgttataattccaaaggccggtttaatgtgcccttcgggcgctaccgcaaaccctatttcccggaagccgaactgttgtggttcgcagaaaaagcccgcaacgccgtgtttgtctgccagtcttatgtgaccagcatggaaaatgcaggtaccggggatatcgtttattgtgatccgccttatgcgccgttatcactgacagctaattttacggcgtatcacaccagcggattcgggttaccggagcagcagaatctggcacagctggcacaaatgctttcgtcggatcgcaaaattccggttctgatctcgaatcatgacaccccgctgacccgggagtggtatcatcaggcgcaactgcatattgtcaaagtgcgccgcactatcagccgcaacacacttaaccgccagaaagtgaatgaattactggcgctttaccgcggacagtaa

SEQ ID NO: 276281 - DNA, 675 bp, Morganella morganii
atgaaagagtttttgattgctccgtccattttatctgctgactttgcccgtctgggggaagacaccgcgaaagttctcgccgcaggcggcgatgtggttcacttcgacgtgatggataatcattatgtcccgaatctgactatcgggccgatggtgtgcaaggcgctgcgtgattacggtattaccgcgccgattgatgtgcatctgatggtaaaaccggtggacagcattgtgccggacttcgccaaagcgggcgcaacctacatttcattccacgcggaagcgagcgagcacgttgatcgcaccattcagcttatccgcgaatgcggctgtaaaccgggcctggtatttaacccggccacgccgctcagttacctcgattatgtgattgataaactggatttgatcctgctgatgtcggtaaacccgggcttcggtggtcagtcctttattccggaaacactgaaaaaagtggaagaagtccgccgccgcattgatgccagcggccgtgatatccgcctggaagtcgatggcggaattaagactgaaaatatcgcggcagtggcgcaggccggtgcggatatgtttgtggccggctctgcgattttcggcaaaccggactacaaagccgtgattgatgatatgcgtaaagaattaacaaaggtttcagcatga

SEQ ID NO: 276282 - DNA, 720 bp, Morganella morganii
atgacagacaaaacagcagtacagcaattcacagggattaaagccgttgcatttgacctggacggtacactgactgacagtattcagggactggcggaagcgactgatcgcgcactggaagcactgggctaccggaaagcgggccgggaaatggcctctgtctgggtcggtaacggcgttgatatgttactggaacgtgccctgactcatgcaaccggtgaaaaacctgatgctgcactgcacgcaaaatgccgtcagttgtttgatgatttttatgctgagactgttaaaaccggcagtccggcatttccgcatgtggcagagacattgcaggtgatggcagacgcagggctggatctggcgatcgtcaccaacaaaccgtctcagtttattccgccgctgctggctgaaaccggtctggataaatttttctctgtcgtgctcggcggggatgatgtgaaaaataagaagccgcatccggctccgctctacctgacgctgggtgagttcgggctgcgtaaggaagaaatgctgtttgtcggggactcccgcaatgacatcctggcggcacgggcagcggaatgtccctgtgtcggcatgacctacggctacaactacggtattccgattgctgacagcaacccggattgcgtactgtccgacttcgcgggtctgctgcctgcgctcgggctgcctccgttaactcatcaggaaggataa

SEQ ID NO: 276283 - DNA, 1029 bp, Morganella morganii
atgagcggaactaacaccaaagcacacaaacccgttgttttcagcggcgcacagccttccggcgaactgaccatcggtaactacatgggcgcactgcgccagtgggtaaaaatgcaggatgattttgactgcatttactgcatcgttgaccagcacgcgatcactgtccgtcaggatccggcggagctgcgtaagcgcacactggatacactgtcgctctatatggcctgtggtctggaaccggcaaaaaatacgctgtttgttcagtcccatgtgccgcagcatgcacaactgggctgggcgctgaactgctacacctatttcggcgaactgagccgcatgacacagtttaaagataaatctgcccgtcatgccgaaaacatcaacgccggtctgtttgactatccggtgctgatggctgcggatattttactgtatcagactaatcaggtgccggtcggtatcgaccagaaacagcatctggagctgagccgtgatatcgcgcagcgcttcaatgccatttacggtgatgtgtttgtggtgccggatccgtttatcccggcgggcggctcccgtgtgatggcattacaggatccgacgaaaaaaatgtcgaaatccgatgataaccgtaacaacctgatcgccctgctggaagatccgaaagcggcagcgaagaaaatcaaacgcgccgtgacagactccgaagagccgccacgcgtgatttatgatttggaaaataaaccgggcgtttccaacctgctggatattctctctggtgtgaccggcaaaccggttgctgcgctggaagctgaatttgaaggccagatgtacggtcacctgaaaggtgcggtggcggatgcggtttccggcatgcttacagagttacagacccgttatcacgaaatccgtaacgatgatgtgttactgaaccgtgtaatgaaagagggtgctgagaaagcctctgcccgtgcacaggtcacgctggataaagtacacgacgcgattggttttgtgcgccgtccgctgtaa

SEQ ID NO: 276284 - DNA, 846 bp, Morganella morganii
gtgaacgatcactgtgtcaggaagaaactcaaaaacagtcagtgtgataactgcgccgcctgctgcccggcagatgcggtgacgttcggctatctcgacgtcaaaattgataatgaccgctgttttcagtgcggaaactgcctgtttgtctgcccttctgatgccattgaacatatccctatccgcgaacgcagctacaacaataacgggcaactggtgattgagaaaaaagaaaccccggcaagtgcggaagagctgctggtctggcaccggcagtaccatatccgcgggatgcagatagcagagccggaagttgataactggctgccggtgctggcagatctcaatctgcgcctgaaagcactcggcgaaccaatctggcagctgactatcatcccgccgccgccggtggataccggaaaacgttttgcgctgttccggcagaaaaccgtcagcagcgggctgaataccggccgcgccagaaccggcctgaatgagcgtaaaaaactctggccggatgacagctggttcgatgtgcgtccggatacagaaaactgtatcttgtgtaccgcctgcgcggcagtgtgtcaggaaggggcgatcactattgcggataatcagtttaccgtggataagacaaaatgcagcggctgcatgagctgccgtgatgtctgtttcccgaaagcaattgatgtcataccgcaggcagaaaaaaacagccagccggttcactatgcttattttgatgctcattgcagcagctgccatctgccttttatgagctggcagccgggacagacattatgtccggtgtgccgttcacgaaaagagaaaggctggctgtaa

SEQ ID NO: 276285 - DNA, 2454 bp, Morganella morganii
atgacaaagatgaaagaaacggcgttgttcactgcgccgctgacgcggcgcgggtttgtcaaagcctccggtgcggccggcggtctggcagttgcagcgggcgggttatccctcccgttcagccatgcggcctctgccgctgaaactaccccggcacctgcggctgcttctgatgagaaagtggtctggagcgcctgtacggttaactgcggcagccgctgtccgttgcggatgcatgtggttgacggtgaaatcagatatgttgaaaccgacaataccggtgatgatgtctacgaagatctgcatcaggtacgtgcctgtctgcgcggccgttccatgcgccgccgggtgtacaatccggatcgcctgaaatacccgatgaaacgtgtgggtaaacgcggcgagaacaaattcgagcgtatcacctgggaagaggcgtttgataccatcgccggtaccatgaaacgcctgatccgcgattacggcaacgaatctatctatcttaactacggtaccggcaccctcggcggtaccatgaccaaatcctggccgccgggagcaacactgattgcccgtctgatgaactgctgcggcggttatctgaatcactacggtgactacagtaccgcgcagattgcagccggtctgaattacacctacggcggctgggcggacggtaacagcccgtcagatattgaaaacagcaagctggtggttctgttcggtaacaatccgggcgaaacccgcatgagcggcggcggtgtgacctattatgttgagcaggcacgcgaaaaatcaaatgcccgcatgattatcatcgatccgcgttataccgataccggtgcagggcgcgaggatgaatggatcccgatccgtccgggtacggatgccgcactggtcagcgcactggcgtatgtgatgatcaaagaagacctggtggataagccgttccttgacaaatattgtgtcggttatgacgaaaccaccatgccggccggtgcaccggccaacggccactataaagcgtatattttaggtgaagggccggacggcgtggcgaaaaccccggagtgggcagccaaaatcaccggtattccggcagcgcggattgtgaaactggcgcgggaaatcggcactgccaaaccggcgtatatcactcagggctggggcccgcagcgccgctcaaacggcgaaaccgcatcccgtgccattgccatgctctctattctgaccggcaacgtcgggattaacggcggtaacaccggtgcgcgtgaaggctcttacgcaatcccgtttgtccgtatgccgaccctgaccaatccggtgaaaaccagtatctccatgtttatgtggacagatgccattctgcgcggcgaagagatgaccgccacccgcgatggtgtgcgcggtaaagacaaactggatgtgccgatcaaaatggtctggaactatgccggtaactgtctggtgaaccagcactccgaaatcaaccgcacccatgacattcttcaggatgagagcaagtgcgagatgattgtggtgatcgataaccacctgacctcctccgccaaatatgcggatatcctgctgccggactgcaccgcttccgaacagatggatttctgcatggatgcctccgccggtaatatggggtatgtgatttttgccgatcaggcgatcgaaccgcgctttgaaagccgcaatatctatgacatgaccagcgaaatcgccaaacggatgggtgtcggtgatcagtttaccgaaggccgtacccaggaagagtggctgcgtcacctgtatgagcagtcccgcgccgcgctgccggaactgccggagtttgatgaattccgcaaacagggcattttcaaaaaacgtgacccgcagggacaccatgtggcgtaccgcgatttccgcaacgacccgcaggcaaacccgctgaccacgccgtcaggtaaaatcgagatctattccgcgcagctggcggaactccgtgatacctgggaactgaacgaaggggatgaaatccatccgctgccggtttattccgcaggctttgagcatgccggtgatccgcttcaggaaaaatacccgttacagatgaccggtttccactacaaatcccggactcactccacttacggcaacgttgatgtgctgaaagccgcctgtccgcaggaactgtggattaaccctgttgatgccgcgaaacgcgggattgcgcacggtgataatgtgaaggtctttaacgatcgcggggaagtgcgcgtcaatgtgaaggtcacaccgcgtattctgccgggcgttgtcggtctgggtgaaggtgcatggtacagcccggacggcgatcgtatcgatcacgcgggcagcattaacgtgttaaccactcagcgcccgtcgccgctggcgaaagggaatccgtcccattccaacctggttgaagtcgttaaggcctga

SEQ ID NO: 276286 - DNA, 618 bp, Morganella morganii
atgtcaacgcaatatggtttctacattgattcaagtcgctgcaccggctgcaaaacctgcgagctggcctgtaaagactttaaaaacttatctccggaagtgaatttccgccgtatctatgagtatgcgggcggtgactggacagagcaggatggtgtgtatcagcagaatgtgtttgcttactacctctccatctcctgtaaccactgtgatgatccggcctgtgccaaagtctgcccgagcggtgcaatgcacaagcgggaagacggctttgtggtggtgaatgaggaagtatgtatcggctgccgctactgtcatatggcatgcccgtacggtgcaccgcagtttgatgaagtcaaaggccatatgaccaaatgtgacggctgctatgagcgcgtcgcggaaggcaaaaagccgatttgtgttgaatcctgtccgctgcgggcactggatatggggccgattgaagagctgcgggctaaatacggcacactggcggaaatcgcgccgctgccgtctgcggaatacacacatccgaatatcgttttaaaactgaatgccaacagccgtcctgtcggggataccacaggccatctggcgaacccggaggaggtataa

SEQ ID NO: 276287 - DNA, 861 bp, Morganella morganii
atgggatcgggaattcatgaatggccgctgatgttttttaccaccatcgggcagagtgtggcaggggcatttattgtgatggcggcagtgctgctgtccggaaaactgtcaccggaactgaaccgtaaagtgcattacagcatgttcggcctgtgggtgctgatgggcgtgggtttcctgctctccatgatgcacatgggtacaccgctgcgcgcgtttaatgcgtttaaccgcctcggcagttcgtcgctcagtaatgaaattgcggccggttcggtcttctttgctgccggtggtttttactggctgctggcggtgctgaacaaaatgccggcggcgctcggtaagctctggctgctggtggtaatggttctcgcggtggtctttatttacgccattccgcaggtttaccagattgccacggtgccgacctggtataccccgtacaccacggttcactttgtgctgacagctctgctgggcgggccggtactggctgctctgctgctgcggattgcggggtttgacctgcgctgcatcagctggctgccgctggtgggtatcgttgctctggtggcgagtgcggtcgcagtgacgtcacaggcgtttgatctggcctttatccgcagttccgtacagagcgcttccgcgctggtaccggaattcggcctgtatatgggctggcgtctggttctgctggcgctgggtctgacctgctggatcctgccgctggtgaaacggacaaatccgccggtgattatgatgctgattggttttgttctggtgttatccggggaaattatcggccgcggtattttctacggactgcacatgacagccggtatggcctatctgtcctga

SEQ ID NO: 276288 - DNA, 612 bp, Morganella morganii
atgagtgagcaagctgtcagtgatgttgccttaacggcccgtattctcggggcggcattttactacccgccgtcagaaatcgtacagataacggaactgctctcttccggggagtgggtggcggaatggccttacggcgatgatgcgcaaaagcaggccgccgcacagaaactgaatctggcggtcgccggtgaggaaaccttagcgcaggcctatcagcggctgtttatcggcccgcaggcactgcccgcatcaccgtggggctctgtctggctggataaagaacaggtgctgttcggggattccactgttgccctgcgtgagtggatgcgtgcgcatcaggtggatattgcgctgtcgcagaatgagccggaagatcacatcggtctgttactgatgatggcggcctggacggcggaaaatcgtccggatgccctgaattcactgctggcggaacaccttctgccgtgggcccgcttttatctggcgcggatgcaggaaaaatgcggcagcccgttctatgaagggttatcagcgctgactgccctgacactcaggggctggcaggatgcactgctggtgatcccggcagagaaaaccatttttgcctga

SEQ ID NO: 276289 - DNA, 291 bp, Morganella morganii
atgaaatacctgataatgctgctgagcctggcagcgctttcactgcccgccgcagcggcagatcagaacagtgcggatgagctggaaatctttacggataatgcagagaactgcattcattttgccggtgaatgggatgtgtccctgcctgcagatcagaaaaaagatatcaaaaaagcactggatgaaacctgtcctccggccaaagagcagcaaaaagtattgcgcgaaaagtaccgcaatgacccggagatgctcgcaaaaattaatgaatttgacctcggccagtaa

SEQ ID NO: 276290 - DNA, 687 bp, Morganella morganii
atggcatacacacctttagttttcaccggtcccgtcagggatacagcccgctgcgggcgcagcgcaattgaaaagcgtcagaccgaaggcgtgattgccctcagtgccaccggactcgccggtgacgagcaggcggaaaaagcctttcacggcggccctgaccgcgcgttgtgtcactatccccgcgaacactacgactactggaaaatgatgtatccggagattgaggatcgctttgtcgcgccgttcttcggggaaaatatatccaccctcggtatgacagaagaaaccgtattcatcggggatatttatcagtggggcagcgccgtgattcaggtcacccagccgcgctcaccgtgctacaaacttaatcctctgacggatgtgtctgattttgcacaggtgatgcaggattgcggccgtaccggctggctgtaccgtgtcgccgggaaaggggatgtcagcagtgatcagccgctgaaactgctgacccgcaccagcgcggtgtctgtcagagaagccgccgccatcgcctttcatctgccgtttgatgaaaccgaataccgttatttattacaggcatccgggctttccgccagctggacactgaccatgcagcgccgtctgatgaccggtaaaatcgaggattttaaccgccggttattcggctctgccgcagccgtgtaa

SEQ ID NO: 276291 - DNA, 621 bp, Morganella morganii
atgagctatgtattacctgcattaccgtacgcttatgatgcgttagaaccgcatttcgataaaatgacaatggaaattcaccataccaaacatcatcagacgtatgtgaataacaccaacaccgcgctggaagccttccctgagatggcaaatctggatatcgacgatctgatcgcacagctcgataaattcccggcggacaaacgtacctttatccgcaacaacgccggtggtcattccaaccacagcatgttctggaaaggcctgaaaaccggcaccacattacagggcgatctgaaagcagcgattgaacgcgatttcggcagcgttgaggcgtttcaggctgagtttgaaaaagccgccgcaacccgtttcggttccggctgggcatggctggtgctgaaagacggcaaactggctgtggtttccaccgccaaccaggacagcccgctgatgggtgaagcgatttccggtacttccggttatccgatcatcggtctggatgtgtgggaacacgcctattatctgaagttccagaaccgccgtccggattacatcaaagcattctggtctgtggtgaactgggatgaggcagcagcgcgtttcgcttctgcaaaataa

SEQ ID NO: 276292 - DNA, 1956 bp, Morganella morganii
atgacaaaaataacgaaatatcctgtacccgaagcaattgcagaaaacgcgctaatcaatcatcagcagtatctggacgagtatcagcggtctgttgaggatcccgacagctactggcgtgagaaaggtcagattgtagactggataaagccctatacgcgggtgaaaaacacctcttttgatccgggccatgtcagtattaagtggtttgaggacggcacactgaatctcagtgccaactgtcttgaccggcatctggcggagcgtggtgataaaccggcggtgatctgggaaggtgacagcccggatgagtcccgcacactcacttaccgtgaactgcatcatgatgtctgccagtttgccaatgtcctgaaacagcaggggatccgcaaaggtgatgtggttgcgatttatatgccgatggtaccggaagcgatggttgccatgctggcctgtgcccgtatcggtgcggtgcactcggtgatttttgccgggttctcaccggaggcggtgtccggccgtgttattgattccggggcaaaaatggtgattacggcagatgaaggtctgcgcgccgggcgcactatcccgctgaagaaaaatgtggatgacggcctgaaaaacccgggcgtgaccaccgtcagcagtgtgattgttttccgccgcaccggcaatccggtggagtggcaggaagggcgtgatatctggtggcatgacgctgtcagcggtgtcagtgcggactgcccgccgcaggagatgaatgcggaagatccgctgtttatcctctatacctccggctcaaccggcaagccgaaaggcgtgctgcacaccaccggcggttacctggtttatgccactctgacatttaaatatatctttgattatcatggtgatgaagtgttctggtgtacagcggatgtcggctgggtaaccggacacacctacctggtttacggcccgctctccaacggggccatcacgctgatgtttgaaggcgtgccgaaccatccgaaggtcaaccggatgtgtcagattgtcgataaacatcaggtcaatatcctgtataccgcaccgaccgcgatccgcgccctgatggcggaaggtctcagtgcgattgaaggtacctcccgcaaatcactgcgcattatgggatcagtcggcgagccgattaacccggaagcctgggagtggtattacaaaactatcggtgacagccgctgcccgattgtcgatacctggtggcagaccgaaaccggtgcctgcatgataggtgcgatgccgggggcgattgaactgaaaccgggctccgcgaccgtcccgttctttggtgttcagcctgcgctggtggataaccagggtgaaattctggacggcgaaaccgaggggaatctggtgatcctcgactcctggccgggccaggcccgtaccctgttcggtgatcatgagcgttttgaacaaacctatttttccgcctttaaaggtatgtattttgccggggacggtacccgccgtgatgaagacggctattactggatcaccgggcgggtggatgatgtgctgaatatctccgggcaccgcctcggtaccgccgaagtggaatccgcactggtttcacacccgaaaattgccgaagcggccgtggtcgggatcccgcacagtatcaaagggcaggctatttatgcctatgtcacactcaatcacggcgaggagccgacaccagagctgtatgcggaagtgaggaactgggtccgtaaagaaatcggcccgattgccaccccggatattctgcactggaccgactctctgccgaaaacgcgatccggtaaaattatgcgccgtatcctccgtaaaatcgccgccggtgataccggtaatctgggtgatgtatcaacactggccgacccgggtgtggtcgaaaaactgctcgaagaaaagcaggccatcaaaatgaactag

SEQ ID NO: 276293 - DNA, 312 bp, Morganella morganii
atgagcgcatccatttatcagcaggtggagaacgaccctcgctttcaggaactggtcagaaagcgcagtcggttctcatggacattgtccgctatcacacttgtgctgtatgtcagctttattattctgatagcctttgacccgcaatggctgggtacgccactcggcgaaggtctgacgattacccgcgggatacctgtcggcgtcgggctgattgtcagtgcgtttgtcctgaccggtatttataccatccgcgcaaacggtgaattcgaccgtctgaccgccgaaatcatcagcggggtgaaacaatga

SEQ ID NO: 276294 - DNA, 1656 bp, Morganella morganii
atgaaaacgcgcctttctgctcttctgttatccctgttgtttccgctgctcagtcacgcgaatgccatcagcgggccggtggagcgccagccggtaaactatcaggccattattatgttcctggtttttgtcggcctgacactgtacatcacttactgggcggcaaaacggacacgttcccgcgcggagtattacaccgccgggggaaaaattaccgggtttcagaacgggctggcgatcgccggtgactttatgtctgccgcatccttcctcgggatctctgcactggtttacacctccggttatgacggcctgatctactctatcggcttcctgatcggctggccggtgatcctgttcctgattgcggaacgtctgcgtaacctcgggcgttacacctttgcggatgtggtttcttaccgtctgaaagccaggccgattcgggtgctgtctgccagcggctcgctggtggtggtggcgctgtatctgatagcgcagatggtcggggccggtaagctgattgagctgttgttcggactcaactatatcgtggcggttgtgctggtcggcatcctgatggtgttttatgtcctgttcggcggcatgctggcaacgacatgggtgcagattatcaaagcggttctgttacttgccggtgccagttttatggcactgatggtgatgaaagccgtggatttcaattttaacaccctgtttaaagatgccgtcgcggtacataaaaacggattggcgatcatgagtcccggcggtttggtgtcagatccggtttctgcattatcgctggggttagcgctgatgttcggtacagccgggctgccgcatattatcatgcgtttcttcacggtcagtgatgccaaagaagcgcgtaagagtgtgttctatgccaccggattcattggttatttctatatcctgacctttattatcggcttcggcgctattctgctggtcagcccgaacccggtatttaaggatgcggcaggggcactgatcggcggtaccaacatggcggcggtgcatctggcggatgcggtcggcggtaatctgttcctcggctttatttctgctgtggcattcgcgaccattctggcggttgttgcggggctgaccctggcgggcgcttctgcggtttcccacgacctgtacgcctgtgctatcaaagacggcaaagccaatgagcgggatgaattaaaagtctccaaaatcaccgtaattattctcgggattgtcgctatcgggctgggtgtgctgtttgaaaaacaaaacatcgcttttatggtggggctggctttctctatcgcggcgagctgtaacttcccgatcattctgctctccatgtactggaaacgcctgaccacacgcggtgcactggccggtggatggctgggattgttaaccgctgtgatcctgatgatcctggggccgactatctgggtcagcattctcgggcacgaaaaagcgatttatccgtatgaatatcccgcacttttctcaatgtttgctgcctttatcgcggcctggctggtgtctgtgacggataactccgcacagggtcaggaagaacgcagccgctttgaggcgcagtttatccgctctcagattggcatcggaatcgagcagggtaaatctcactga

SEQ ID NO: 276295 - DNA, 579 bp, Morganella morganii
atgcgtctgttttcttctgttttactgattgtgctgattgctctggcaccggcggtgttatccggcggaccgggggcggagtacaatgtgaaaattacggtgatgggcacattattgctgctggcgaatgtgtatctctgtcgctataccgcgggcaaaatagttgttggtctgctgacaattttgtgggggctgaatctgtctgcctctgcttttttccgccgcgaggcgggtgctgaatatctggcgaaccttcctgagctgcttcatcagggctatccgttatcagccggtgatttcctgtctgaaaacagtggtatcgtactgttttttatcgtggtttccgtggcgtatttcgcggtggttcacctgctgagccgtgcgttgccgcgccgggctatccgtaatgccggtatctcgctgttattactctcgtttattctgcccgttgaatattacgcgatggaaaaagataaaacgccggggctgacggtatatgaccattatctgctgggtacgccgctgtataatcttgccgcggtaccgatggcatggcggggatgcaccggtatcagctga

SEQ ID NO: 276296 - DNA, 1056 bp, Morganella morganii
atgaaatactatcacctgataaaaaaagccagacatctgatgttatctctgatgattaccgcaggcggattaggtacggccggccatgcttatgcactggaggactgtgtcagaggcggaaatcagaaccattccacaatgacgtcaaccatcaatctgcgccttaccggcagtataaagcagaatcaggaagtcggccgcttcacatttgtccgtgaaggcggtatcggcggcgtggcagactgcggaccagatgccggtattcacggctataccagctacagtgaaggcagtggtattgtcgccaagtattatggtgatattgacggataccctgcatatcatatttatccgggcggtgagcggaattttgtttatgttctgatcgataacagaaccggtatgcattttcagaatcagccgggaagtaatattccggttccggcaggtccgctcctgccgcttgacttaacggttattatttatgccgcaaaagataacccggatacgctttctttaaccggcggagcatatattggtactgtcttaattcaggcatataaccccggcggcggcacaacagcggtaggatacagttacagactgaaaggcaagattgaaagcgcgccatcatcatgttcgctggaaaattctgacctggaatttaaattaccccgggcaccggtcaatgccttttcgtccaaaggatttccggacggtaattataaagctgaagataatttatttatttcatgtaacggcgatctgtctgcccatatgaaattaatggcggctaaaacagaaaattataacggaaaagagtccgttatcgttcctgatgatgaaggcaataataatgcgtccggtgtcggttttgttgtcacatcaccgatgaataatgataccgtactggttaatcaggagtttgttaaaatcgcggacttacaggacggaaaaacacgtgttccgcttgttgctgaatattaccgctatggcgattccgttaaacccggcaggctggaagcaaatacgcagtttattttacagtttgactga

SEQ ID NO: 276297 - DNA, 2511 bp, Morganella morganii
atgatgatgaaaaaatatcataataaaaaccattttatatcattatccgtgatgtctttccttatggcggggacatctttctctgttatggctgatgattattatccggccagcttatttaatatccccggcagtaactcacaattgactaatgaagatgtcaatgttttcaaagaaaatgataatgcaccgggaaaatacaaagtaactcttattatgaataataataaaattaccacaaaagagattgattttgttctgagaaaaaacaacgccggtaatgaaaagctcattccttgtttttcaggaaaagagtggggaaacatgggagttgattttccgtcctcagataatgaggatactaatggctgctttaatatcaatgatattgaatatacgcatggctatctcgaccttaactcccggatttatgcactgacaacaccgcagtcatacattaataaagataaactggaagcattagagcaggaaaactgggacaatggtattcctgcactctttgttaactatttattttcggctgtaaatcgtcagcatagtggcgaaacaaaagatagctattatggaaatatccagaccagagtcaatctgggcgcatggcgttatcagaattattctacctggatgaatgatgacaataataaaaacaaatggaaaaatatcagtaataccttatcaaggaacataaattcactgaaaagtgaatttactgtcggtaatctatattcgtcatcacagttatttgattctgttaaatttcgtggtattcgtctgacaacagacagatccatggatccggtcagtaaaacaaactatgttccgtcaatttccggcatggcaaattcagaggctgttgtcactgttgttcagaatggtgaaattatcctgagacaaagtgttcccgccggtccgtttaatctgaccgaatattatccgatgagtaatggcggaaacctgtatgttaatgttaaggaaactgacggaagtgagaaaaatttcatcgttcctttctcttcaatttccacattggaaaagaaaggaaatatgcgttacagcatttccggcggaacctatgacagcaataacaaaggtaacgggaagaaaatcaatcaggcagaaatattttatggtctgaccgattttgttaccttttttggcggagcatttgttgccaaagattatcaatccggcggtatcggtgctgcattcaactttggtgcttttggtgcaatcacagtcgatattctgcatgcaaaagcaacgcttaatcacgataaaacctctgccgggaatgcgtttcgcgttaactactcgaagagaatagaagcaacaaataccagcgtatccctggtgggttaccgtcacttcgatgctaaattttatcgtttcgaagatgcaatgtcatatgatgaaaaccggaacgatcataataaacttaaaaatgaatacactttatcactgaatcagcctgtcttttccggcagttcatcgcttaatctgtctactgttatttatgaatatacatccggtaaaagacaaaaatcctataatgccggattcaacagctcatttaacaaaatgaactacggtatatattataattattatcagggcacaagagctgagaacggtaaaaataatacctacaatgtcagtatgaatcttaatatcccgctcaatattaaggataatactatctgggctaattataatatttcttccgatgccgatcatcagacgttacagactgccgggctcagcggaaattatggtgagaaccagcaaggcagctgggatatttatcatagtcagggaaataaaggcaccgggaattcaggcggtctgagcagttcctatcgctcacaatatgcgtctgttaatgccggttattcatacagcaaaaataataaaaatctcagctatggcatgaatggttcattactggccacgcagtatggtgtggttgccgctcccgcattacagaataccaatgcactggtactgaccaaagatactgccggtgtgggtatcattaacgggcagtctgctcagacaaataattcgggccttgctgttgtttccggcatgacgccataccggaaaaataatattgtgattgatacgcagacaatccccggtgataccgagatcgaaaataatattattaacgatattgttccgacaaaaggtgcgctgattctggccgatttcaatgtgaagaaaggctacaaactgctgatcacactgaaaacacctgataataaagaaataccgttaggcgcaaaagcaatgatgggtggtgatactgaatacctggtgtctaattttaatacgctctatttcatagcggataaagaaaaaggtgatatccgcgtgacctggaaacaggacggaaatatgcagcaatgtattatccggtatgacattaccggcacgttacccacgaacggaatatatattacaaagctgaactgtcagcgggagatttga

SEQ ID NO: 276298 - DNA, 687 bp, Morganella morganii
atgttcactaaaacaaacattctctctgcttgtgcattacttcttttggtatcagaaagctatgccggttttggtttagaaacaacccgcgttatttatcatgaaaaaaataacagcgagggtgttgttgcctttaataccgacaaaggcagaaattatcttttgcagtcatgggttgaagataaagcaggaaatgtcagccctgattttgtttcaacgccgccactcgtcaagttacgggctgaaaaaaagaatacattacaggtcacaaaagtagcgtcattaccggctgacagagaatccctttactggctgaatgttaaatttgtggcgccgagtgaggaaggccaggaaaacgttctgcgctattcgatgaccaaccgaataaagattctttaccgcccggcggctctcgataacagccgggatattgagacctatgctgacaagttagactggtctgtttcaggtaaccgccttacggttaataacagcacaccttattatgtgaatgtttcgaaaataaccgtcaacaaccaggaagtaaaactaccttccggatatatatcgccaaaatcggcagagacaataacggctccgcaggtaatcaaagcaccggcaaatgtaaaactgacatacattaatgactacggtaaagccgttgaattatattatcctgccaaataa

SEQ ID NO: 276299 - DNA, 570 bp, Morganella morganii
atgaaaaaatctttaattagtaaatcattaatttctgcattatttgccggtactgccatgagtgcatccgcagttgatcagacaggtacaatttcctttaaaggctttatttataatgccacctgttcgattgatcttaacgatactaactctcctaatgttgatgtgttaatgggtcgttatccgaccagtgcatttacagaaaccggcactatggttggcggaaaagatggctacggtgaactgaatatttcattaacagactgcccggatcagggaaaagtaaaattacagttacatggtaaaccaaaagatggtgataacgagctgttagaattagataacccgaacgcaagtacaacggctaaaaatattgctgtccttatatttgagaatggcgataccaataatgaccctgttgtgattgatggctcaaaaacagaggaatataacgtatcttccagtgcatcatggaagggaagttataccgcatactactacagcacagctgacgatgttgaagccggccaggcggatgcaacgctgaattatacgctctcatataattaa

SEQ ID NO: 276300 - DNA, 1020 bp, Morganella morganii
atgtcttcttctgtaaataccgccggagcaacccggctgcaacagacactggcgcagttcagtaagcttaatctgctcagcggtgtcacaccgctgaataaactgaacaatctctcccgcctgctgggacgggagatttacatcaaacgtgatgatctgacaccgctggcggccggcggcaacaagctgcgcaaactggaattcctgatggcggatgccctggaaaaaggcgcacagtttattgtcaccgccggggccattcagtccaaccacgtccgccagacagcggctattgcggcaatgtacggcctgaaatgtgtggcactgctggaaaacccgatcggcagtcaggaaaccaatttcctgaataacggcaacaagctgctgacggatttattcggcgcgcactgtgtgatgtgtgatgccctgactgacccggatgcgcagatgcaggcgctgatcaaccatatgcagctcagtgatgcctatatcgtaccggtcggcggctccaatatgctcggttccctcggctatgcggagtgcgccctggaaatcgcgcagcagacacctgaaggcacagaattcggtgctgtcgtggtcgcctccggcagcgccggaacacacgccggactgtctgccggattgcagctggtgatgccgcagaccccggttatcggtgtcaccgtatcgcgggtatatgccgatcaggcaccgaaagtggttaaactgcaacacgaactggcacagctgtttgatattgaaacacctgcgccggtcgcgctgtgggacagctattttgccccggaatacggcatgccgaatgccggcgggctggaagccattgaactgctggcgcgtcacgaaggtattttgctggatccggtttacaccggtaaagccatggccggactgattgaccaggttcgcagacatccggaagatacttcgccacttctgtttgtgcacaccggcggtgctgccggactgttcgcttatcaggaagtgagcgcagctatataa

SEQ ID NO: 276301 - DNA, 1446 bp, Morganella morganii
atgcaggactatggtatctggacggtcattaccccggtcgtcacaattattctggccatctgtacccgtcaggtgattttatcactgctgatcgggatacttgtcggctttactgttattcatgatcacaacctcttattggggatccgcgcgaccctcgaagggattattgatgtctttaaatcatcaggaaacgccaaaaccatcatctttatgctgatgattggcgggattatgcggctggtcgtggtgaccggcggtgtgcgggcacttgtccgcctgctgaccaacaaaacgcagatcatcaaaggccgcaaaggtgtgcagctgctggcagtgattatcacgtccctgatttttatcgaaagctcgattaaccagctggtttccggtgcttccaccaaagcgctggcgaaaaaatacggcgtgccgccggagaaaatgtcttacatcatccagaccgcctgtgtgtctgtctgttcttccgccatgatcaacggctggggtgcggcaatgatgggcgttatcggtgtgcagatctctcagggactgatcaccggcgaaccgtttgatatcctggcacattccatggtttacaacatcatggcctggttctcactcgccagcattctgttctatatcttcagcaatgtctcctggggaccgatgcgcaaagcagaaatgcgtgcgcaggcactcatcagctctgcggatgtgatcaccggtacgccggaagaaacgcacgacgagccggaagatgataaagacattatcgatcatccgaactgccatacttcactgaacttctttatcccgatcctttccaccattctgatggtgccggtcgcgctgtatatcaccggtgacggcgagttcagcaaaggtagtggttccacctcggtttactggggcgtaatgttcgggacggcggtgtcatttgtctggttcctggcgcgccgcgtgatgaatgtcgataccttctttaaagagctctatatcggctatgccaacatgattaaaatcagttcggtgatgatcctcgccttcctgatgggctctgtctcttctgaccttaacaccggtgcctatattgcccaggtgacatcaggggttatcgcgccgggcttctctgtcggctttatcttcctgatcagtgccattatgtcactggcgaccggtacctcctggggtacattcgccatcatgatcccgattggtgtgcaactgggcctgtctgtcggtatgccgccggaatatatgattggcgccgctatcgccgggtctatttttggtgatatgacctcccctatctccagtgatgcgatcgtggcatcgatggcgacagactgtgaccatattgagcatatccgtacccagatgccgtatgcggtattaaccgcgagttttgcgctggccgtctatctctggttaggattcacctactga

SEQ ID NO: 276302 - DNA, 1146 bp, Morganella morganii
atgagtaagaaaattgccactgtgctgatccacggcggacagcagcaggataaagtaaaccatgctattttcccggcgatcaccaccgccagtacgtttgtgcagaccagcctgagcgagcacggtgaatacgcctattcccgtgtcagtaacccgacccgccacgcctatgaaacactgctggccgatgtcgaggaaggtacttacgccaccgcaaccgcctccggtgtggcggcggcggcactggtgctgaatatcttcccgcagggctcccatattattgcgatgaaaggcgtgtacggcggaactttccgtctgtttgagcgtgtggcaaaagagaactgcggccacgagttcgattatgttgatctcaatgatttagccgcagtccgcagcaaaatcaaagataacacccgcatgatctggatagaaagcccgaccaacccgttactggaactggttgatattgaagccatctgcggactggccaaagaacacaatatcgtaacctgcatcgataacaccttcgcgacaccgtggaaccagaaacctctgaccatgggcgcggatctgatcatggtctcctccagtaaatatatcggcggtcactctgacttaatcggcggtgcggtgatcaccaaccgtgacgacctcgcggaaagactgaatttcctgaaaaccaccaccggcgcgattgcctctccgtttgatgcctatctcgccctgcgcggcctgaaaaccctggcactgcggatggcggcacaatgcagcaatgcacaggccgtggcggaattcctgtccggtcacgacaaaattgaaaaagtattttatccgggtctgaaagatcacccgcagtacgaattatgcaaaaaacagatgcgcaccggcggtgctgtggtcactatccagctgaaaggcggcctcgcagaaaccgaagcatttgtgaaaaaactgcgctattttgtgctcgctgaatcgctgggcggtgtggaaagcatggtgaatcactccgcgaccatgtcccacggctccatgacccgcgaagagcgcgaatccatcggtgtttttgacagcacactgcgtttgtctgtcggcatcgaagatatcggcgatttactggctgatttacagcaggctctggcctga

SEQ ID NO: 276303 - DNA, 765 bp, Morganella morganii
atgacacagttgactgaacccaaacgcccttatcaggaagtcggccatgcgttgcgccagatgatcaccaatatggattatgtcatcggtgacaaactgccgcctgaacgcgaaatcgctgaaatgctggatgtctcccgggcaattgtccgcgaggcactgattatgctggaactggaaaacctgattgaagtccgcaaaggttccggtatttatattgttgccctccctcacctgagagaaagtacggtgactgatccgtgcgcgctcaatgccgccggtccgtttgagctgttacaggcgcggcagctgctggaaagcaatatcgcggaatttgccgccacccaggccacgccggtggatattgccaatatgcgcagcgctctgcagcgggaacgcgacgaactgaaaaccggggaagatgaaaccggcgaccgcgagtttcacctggcaatcgcgcaggcgacccataacagcatgctggtggagttactgaaacaatcctgggcatggcgggaaaacaacccgatgtggctgaagctgcatacgcgcatcaccaataaagattaccgcaaagagtggatgaccgatcaccgggcgatcctcgccgccatgattaagaaagacccggcggcggccaaagaagccatgtggcagcatctggaaaatgtgaaacagcgcctgctggagctgtccgatgtcgatgacccggactttgatggttatctgttcaattcctatcctgtcgacctggtacggaactga

SEQ ID NO: 276304 - DNA, 1299 bp, Morganella morganii
atgaaaacaattaaacattacagatggcatatgattctgctggtgtgcttcataaccatcattaactaccttgaccgtaccgcattaggtgtcgcagcaccgaccattatgaatgacctggggatcaccaaagaacagtattcctgggttgtcagcgcattccagctggcatacaccatcggtcagccaatcatgggcttctttattgatacgattggtctgaaactcggcttctttatctgtgccatcatctggggtcttgccaccatggctcacgccctgaccggctcctggcagggtctggcctttatgcgcgggatcatgggtttcagtgaagcttccgccattccggccggtgtgaaaaccgccaccacctggttcccggcaaaagagcgcgggatagccaccggtgtgtttaacatgggaacatctttcggtgcgatgctggctccgccgctgatcgcctggtgtatcatgttccacagctggcagttcgcctttattgtcgccggtgggctggcgattatcgccgcctttgtctggttcttcttctataaagatccaaaagatgcaaaacgtctgtctgatgaagaacgtgcctatattgaaaacggccaggaaaaacatctcaaatccgcaaagaaagagaaaacctcggttatcaatatcctgaagcagcgtaacttctggggtatcggtctctcccgtttcctcgcggacccggcatggggaacgattaacttctgggtaccgattttcttcgtggaaaccctgcatttcagcctgaaagagatagcgatgtttgtctggctgccgttcctgatggcagacctgggctgtctggccagcggattcgtggcgaaatactttaacgaccgcggtgtttccctgatcaactcacgccgtatcaccttcaccatcggtgcggttctgatgaccactatcggtctggtcagtattgtcgagaacccgtatgtcgcagtgctgttaatcagtatcggtggtttctctcaccaactgttatccaccgttgccgccaccctcggcggggatctgttcaaaaaagacgaagtggcaaccgctgtgggtatggccggtgcatgtgcatggtccggtcagttaatctttaacttatttatcggtgcgttcgtcggtatcatcggcttcggtccgttctttattgcgctggctgtcttcgaccttatcggtgccgcagcgctgtggattctgatcaaagagaaaaaagaacctcaggatcccgcacaggataatggtgaaacattaatagcgtctcactaa

SEQ ID NO: 276305 - DNA, 1185 bp, Morganella morganii
atgaaacaaacttggcgttggtacggaccggcagatccggttactttatctgatattcgtcaggcgggcgctaccggtatcgtgacagcgctgcaccatatcccgaacggtgaaatctggaccacagacgaaattcagaagcgcaaggcgctgattgaagccaaccatctggaatggaccgtggttgagagtgtgcctatccacgaagatatcaaaacacagaccggtgagtatgaaaaatggattgctaattaccagcaatcgctgcgtaacctcgccgcctgcggtatttatacggtctgttacaacttcatgcccgttctcgactggacccgtactgacctggaatatgagctgccggacggctcaaaagcattgcgttttgatcagattgaatttgcggtgttcgaaatttacctcttacagcgcgaaggggctgagcaggactacaccgcagaagaactggcgcaggccaaaacccgctttgaaaccatgcgggatgacgaaaaacaaaaactgataaacaatattattgccggtcttccgggtgcggaagaaggctatacacttgaacaattccgccaacacctgaaacgttacgccggtatcgataaagcgaaattacgtgagcactttgcgtatttcctgaataaaatcattccggtggctgaagagtgcggcctgaaaatggctgtgcatcctgatgatcctccacgtcctatcctcggcctgccgcgcattgtctccacgattgaagatatgcagtggatggcggataccgtcaacagtgatgccaacggttacaccatgtgcaccggctcttacggcgtgcgtgctgacaacgacctggtcaatatgattcagacctttggtccgcggatttacttcctgcatctgcgttcaaccatgcgcgaagaaaacccgaatactttccacgaagcggcgcatctggccggtgatgtggatatgtataatgtgatcagcgcggttgccgccgaagagaaccgccgccgtgagagcggctctgagtacctgatcccgatgcgtccggatcacggccatcagatgctggatgacctgaagaagaaaaccaacccgggctattccgccatcggccgtctgaaagggctggctgaaatccgtggtctggaaatgggtattcaccgcgcattctatacaaaataa

SEQ ID NO: 276306 - DNA, 1467 bp, Morganella morganii
atggaaaagaatcttgtcactgcggacatcaccgcaacgcgtcctgactggacgactgatcgtctcaccacccgtattgttcacctcggctgcggtgcgtttcaccgcgcacatcaggcgctgtatacccatcacgtattagaaaaaacagacagcgactggggttactgcgaagttaacctgatgtcggcacaggatgcggcactgatcgaagggctgaaagcccagtccatgctgtataccgtggcggagaaaggggcggataaaacagagctgaaagttatcggctcgatgaaagaagcgatgcacccgctgatcgacggtattgatgcggtgattgagaaaatggcttccccggatgtcagtattgtttccctgactgtgaccgaaaaaggctactgcaccgatccggcgaccgggcagcttgacccggaaaatgcactgattaaacaggatctggcgacaccggagacaccgcgctctgctatcggttacatcactgcggcactgaaacgccgccgtgaacgcggcctgccgccgtttactgtgctctcctgtgacaacgtccgtgagaatggtcatgttgcccgtgaagccgtactcggcctggcgcggttacaggatccggcgctggcggcgtggattgaatccaatgtcactttcccgtgcaccatggttgaccgcattgtcccggctgccaccccggaaacactggcggaaatcgcacagcttctgggaacggaagataactgtgctatcgcctgtgagccgttccgtcagtgggtgattgaagataacttcgtgaacggccgccctgagtgggattgcgccggtgcacagtttgtgcaggatgtggtgccgtttgaattaatgaagctgcggatgctcaacggcagccactccttcctggcgtatctcggctatctcggtggttatgcccatatttccgataccatgaccaacccggattaccgcaaagccgcccgtgcactgatgctggatgagcaggcgccgaccctcaccatgccggaagaaaccgacctggtcgcctatgcggataacctgattgaccgctttaccaacccgtccctgaaacatcagacctggcagattgcgatggacggcagccagaagctcccgcagcgtctgctggacccggtagcgcagcatattgcggacggcagcgattaccgccacctggtgctgggcgtggcgggctggatgcgttatgtcagcggcaccgatgagcagggcaacaaaatcgatgtgcgtgacccgctggcagaaaccttcgcggctatctatgcaaaacacggcctgtctgtggcggtggtggatgagctgctggcaattgaatccattttcggtgacagcctgccgaaacagcagggctttgttgatgcggtgaaacgcgcgtatcagcagttacttgatgtcggtgcccgtcaggccgttgccgcactgtaa

SEQ ID NO: 276307 - DNA, 1422 bp, Morganella morganii
atgaaacagtttctttgcgaagactttttactgcacagcgacattgcccgccgtctatatcatgactacgcggcggacatgccaatctatgattaccactgtcatctgaatccgcgtgaaatcgcggaaaaccgccgttttgataacctcgggcagatctggctggaaggggatcactacaaatggcgcggcatgcgttcggcggggatcccggagcagcttatcaccgggcgcgacagcagtgattatgaaaaatatcaggcgtgggcaaaaaccgtgccgatgactctcggtaacccgctgtatcactggactcatctggaactgcgccgcccgttcggtatcaccggcaaagtgttcgggccggaaacggcgcagagcatctgggatgaagcgaatgaaaaactggcgcaacctgaattttccgcgcgcggcattatgcagcagatgaatgtgcatatggtcggcacaacagatgacccggcagattcgctggaataccaccggcagattgcgcaggatgacagctttgatattgaagtgcgtccgagctggcgtccggatcgtgcttttaaaattgaactggacggcttcacggactatatcgcgaagctcggacagagtgctgatgtggatatccgtcgtttcagcgacctgctgaccgcgctggaacgccgtctggtacactttgcgcagcatggttgtgttgcctctgaccacggcattgagatcctgcgctacgcaccggtaccggatgaatcggtgctggatgcgattctgcagaaacgtctcgccggggaaatccctgatgaaaccgccaccgcgcagttcgcaacggcggtgctggtctggctcggaaagcagtatgcgaaacgcggctgggtgatgcagctgcacatcggtgcgctgcgtaacaacaatacgcgcatgtttaagctgctcggtgccgacagcggttttgattccatcggtgatgcgccggtggcttatccgctttcacgtctgcttgatgaaatggataaaaccgatgaactgccgcgcaccatcctttactgcctgaatccgcgtgataacgaagtactggcgaccatgatcggcaacttccagggcggcggtatcgcaggtaaagtgcagttcggttccggctggtggttcaacgaccagaaagacggcatgcagcgtcagctcgaacagctgtcacaactgggactgttaagccagtttgtcgggatgctgacagattcccgcagtttcctgtcctatactcgtcatgaatacttccgccgtattctgtgtaatatgctcggtacgctggcggtaaatggtgaaattccggcggatgagaatatgctgggacagatggtgcgtgatatctgtttcaataatgcacagcgttatttttccgctgcaaaaggtgaataa

SEQ ID NO: 276308 - DNA, 963 bp, Morganella morganii
atgacagtgaaacgcattggtctgatcggcgagtgcatgattgaactcaacggtgcgccgttcggggagatggttcagcgctacgggggtgatgtcctgaacagtgcggtttatctggcccgtgcggccggagacgccgttgaggtgaattttatctctgccatgggaaccgacccgctcagtaaaggtatgatcagccgctggcaggcggaaggggtcaatactgcgcatgtgctgatcgatccgcatcatcagccggggttataccttatccagctggatgagcagggcgagcgcacgtttctttactggcgcaatgattcggcggtgcgttatcttgtccgccatccggaatacccggcgctgctggcacagatggcgcagatggatgccatttacctcagcgggatcagccttgccattctgccgccgcaagaccggctgcaactgctggatgacctgaaaacgctgtcacagcagggcaagaccattctgtttgacagcaactaccgcccggcactgtgggcggatgaaaatgaaacccgtgactgttatcaggcaatgtatgcactgaccgacatggcactggtcactgatgatgatgaagcacgtctgtggggcgacagcgaccgcaacgccacctttgcccgtctggcaaaagccggggtgaagcaggcgattataaaagcgggtgctcaggggtgtgactaccgtgatctgcgcactgacgcaccggccatcactattgccaccaccccggcggaacaggtggttgataccacgtcagccggtgatgcatttaacgccgggttcctggcgggctggctgaccggcgcggatattgaacgcgctgcccggatgggccaccggcttgcgggtgtggtgattcagcacaaaggggcgattatcccgcaggcggcgacccgcccggtcactgatactttactgaataacacgttttaa

SEQ ID NO: 276309 - DNA, 636 bp, Morganella morganii
atgtccgaattacaggcaatgattacccgtttccggcagctgaaaattgtgccggtgatcgccgtggataacgcggaagatattatcccgttaggcaatgcgctggcggataacggtctgccggtggcggaaatcactttccgtactgaatgtgcggcggaagcgatcaaactgctgcgcgaagcccgcccggatatgctggtgggcgcgggaaccgtgattaaccgcgagcaggtgcgtcaggcgaaagccgccggggcacagtttgtcgtctctcccggtctgaacccgaacaccgtgcaggcgtgtcagcagattgatatcccgattgtgccggggatcaacaaccccagcgcggttgagcaggcactggagctgggcatcgattttgtgaaattcttcccggcagagccgtcaggcggtattccgatgatcaaagccatgctggcgccgtatcatcagttacaggtgatgccgaccggtggtatcgggctgaacaatatccgcgactatctggctatcccgcagattgtggcctgcggcggctcgtggatggttccggcttcgcttatcaaagcaaaagactgggcagccatcggcaaactggcgcgtgaagccagtgagtttgtgaaataa

SEQ ID NO: 276310 - DNA, 1776 bp, Morganella morganii
atggccattctgctggtcaccgtgccgacacttatcatcggttattttgtggaaacagaggggcgttccgcgttgttgcaggagaaacggaacaaactttattccgttgccggtctgctggaacaggcactgaataatgaatatgaccttgccgcatccctgccgcgtgaccagcgcctggcgctgatcagcgaaaaactgtatccggcggcggaaattatcacttccaccttccccggggtcggcgccgggtattaccaccgtgaactcgacggtattgtgacctattctccgcgtgcccgttacggcaacaaaaccggtacccgaatcagtgaggatcaccccggccgtcatgtgatggcaacgggagagccggaggtcggctggggaagccaggtgcgcggtaatattatgaacgccatgattcctgtcaggcgtaacggcgaggtgatcggctatatctgggcgaacgaactgacggatgatattgaccgccaggcgctggcgatggatgtcaaaattatcgcggtcattgcactcgggatcctgttcagtctgctgattattatcgtcttttcccgtcatttcagccgggatatcggcgcgataaaaagcggcctcagtgatctctcccgtgatctcaatacccatctgccgatgatgaaaggggaaatgggggagatcagcgacagcgtcaacgccctggcacagacactgcgggagatgaaaaccctcaacgaactgattattgaaagtgcggcggacggcgtgatcgcggtggatatcaacggctgtgtcaccatgattaacccggcggcagaagaaataaccggctatctggagcgggatctgcacggcaaatattacggtgacgtttttgaggggcgcagtttctccagcccggttctcgataccctgaagcgcggtattgagcacgtcagtctggaaattgcctatcccgcccgtgaccgcaccattcagataaacgtcagcaccagccgtatccgtaatgcgggcggggtgcttatcggcgcgctggtgatatttaaagatctcaccgcgcagaaagaggttcagcgccgtatgcagcaggcggaaaaacttgccacactcggcgagctgatggcaggcgtcgcccatgaggtgcgcaacccgctgacggcgatcagcggtttcgtgcagatcctcaaagaactggaaaatcacccggataaactggaatacatcagtattattctcaaggaagtggattccattgaccggatcatccgccaactgcttgatttctcccggccgcagaccggcacattccgcccgatcagcgtcaaccggctgattgaggaagcactggtgctggtcaaaaccaaaggggtggaagcgcgggtcacctttacctgggagccggatgacacactgccgctgattgaggctaacagcgaactgctgcgtcaggtgctgctcaatatcatgataaacgcggtgcagtcgattccggccagaggcaatctctttatctccacctgttacatggaagagcagcgggtcatggtggtgatccgcgacgacggcaccgggatcccggcggcgctgcaaaagaaaatctttgacccgttctttaccaccaaagcctcgggaaccgggctgggactggctatcagtcagcggatcattgccggtcacggcggtgatattttccttgaaagtcaggaacatcatggaacgacgttcaccataacgttgccgataacgcagggtaagaaaaatgattacacataa

SEQ ID NO: 276311 - DNA, 1386 bp, Morganella morganii
atgattacacataaatcgtaccggcttctgatagttgatgatgaaaagaatctctgccggatgttacagaccgcattttctatagatggtcatgaaacccgggtggcggaggacggcgaggcggcactgataagctttgtgcaggataaaccggatgtggtactgatggatatccgtatgccgaaactggacggcattgaggccctcaaacggatgcgggaactgaacccggaagtgccggtcattctgatgaccgcttatgccgccgtggaaaccgcagtggacgcgctgcgtctcggggcgtttgactatgtaatcaagcccttcgatctgacagagctgaaactgcttatctcccgtgcattacagttgcaggagatgaaacaggaaatcaatctgctgcaccgcgaactgagcgacagctaccagtggggacgggtgctgacccgtaacccgaaaatgatggaaatctgccgcgatatcgccaaagtctcgcgcagccaggcgacggtgcttatcaccggggaaagcggcaccgggaaggaagtggtggcacgggcgatccattacaacagcgaaagggccaacggcccctttattaaagtgaactgcggggcgctgcccggctcgctgctggaaagtgagctgttcggccatgaaaagggcgcatttaccggggcgcaggtacagcgtcagggattatttgaacgcgccagcggcggaacattgctgctcgatgaggttggtgagatgccgacggatttacaggtgaaactgctgcgggtggtgcaggagaaagaatttgagcgcgtcggcggcagtaaaaccatccgcgtggatatccgcattattgccgcgaccaaccgcgatatgcatgaacgggtgcgggaaggccatttccgccaggatctgttttaccgcctcaatgtgattcacctgaatctgccgccgctgcgtgagcggccggaagatgtggggctgctggcttcccattttctgcagaaattcagtcaggaaaataaccgcgatattgtcgagctggcgccggaaacgctggcattactgatgaactaccagtggccgggtaatgtgcgggagatttccaacgtgattgagcgggcagtgattatgagtaccggttatgtgattttccccgaagatctgccggagcagttactggcacaggtccgcagccagccggtggcactgattccggtcacgcaggagccggggctgaacctgaaagagaatattaaagcttacgagaaagagctgattatttccgccctggcggaatttcagaataacaaaacccataccgcctctgcactggggatcagccgccgggcattaatatataaattgcaggaatacgatattgaataa

SEQ ID NO: 276312 - DNA, 651 bp, Morganella morganii
atgaagaataaacaaataacggtgaaaaaagccggtgaattttttcgtgacggcatgacaattatggtcggcggatttatgggcgttggtacaccgccgcgtttaatgactgaattattagaatccggcgtcaaagagttaaccattatcgccaatgataccgcattcgtggataccggcctgggcccgctgattgtcaacggacgggtgaaaaaagtcattgcttctcacatcgggacaaacccggaaaccgggcggcgcatgatcgccggtgaaatggaagtgcagctgatcccgcagggcacgctggcagagcaaatccgctgcggcggtgccgggctgggcggatttctcaccccgaccggtgtcggtacggtcgtggaagaaggcaaacagaaaattaccctcgatggccgtgattacctcctcgaacttccccttcgcgctgatctggcgctgattcaggcacagaaagccgatccgctcggcaacctcacctatgacctcagtgcccgcaactttaacccgctgatggcgctggcggcagatatcaccattgccgagccggacgaaatggttgcggtgggggatatcgacccggattgtgttgccacaccaggggcaattattgactggctgattgcagaataa

SEQ ID NO: 276313 - DNA, 666 bp, Morganella morganii
atgaatgcaaaagaattaatcgcccgccgtgtggcacttgaactgaatgacggtgatgtggtgaacctcgggatcgggctgccgacacaggtggcgaactatctgccggaaggcgtgcatatcaccctgcagtcagaaaacggttttctcggcctcgggccggtaaccacgccggataagaatctggtcaatgcaggcggtcagccgtgcggtattctgccgggcgcgtccatgtttgacagcgccttctctttcgcgctgatccgcggcggtcatgtggatgccagcgtactgggcggcttacaggtggatgaacaggcaaacctcgccaactgggtggtaccgggcaaaatggtgccgggtatgggcggtgcgatggatctcgtgaccggtgcgcgcaaagtgatcatagccatggagcactgtgcaaaagacggttccgccaaaatcctgccggagtgcaccatgccgctgaccgccgtaaaagcggtggatgtactggtgacggaactggcgttattccgctttgaaaacgatcagatgattttgtgcgaatacgcgccgggtacggatatcgataccatccgcgaaaaaaccgcagcgcattttattgtgtcaccggatgtctgtgaaatgccgctggtgactgcgggggaagccgtatga

SEQ ID NO: 276314 - DNA, 1323 bp, Morganella morganii
atgataggacgcatctcacgagtcatgacccgtgtggtgagccgctatctgccggatccgctgatcttcgcaatgctgctgaccatgctgacgtttatcatcgcgctggcactcacaccaagcacaccaatggatctggtgaacttatggggaaacggattctggaacctgctggcgttcgggatgcagatggcgctgatcatcgtgaccggtcacgcgctggccagctccccgccggttaaacgtattctgcggctgactgcctcactggcaaaaaccccggttcagggtgtgatgctggtgacgtttttcggctcggttgcctgtgtcattaactggggattcgggctggtggtcggggcgatgtttgcccgcgaagtggcccgccgtgtaccgggctctgactacccgctgctgatcgcctgtgcctatatcgggtttatgacctggggtggcggtttctccggctccatgccgctgctggccgccacaccgggtaaccctgtcgagcatatcgccgggcttatccctgtcagccagaccatgttcacaggctataacctgtttatcaccctgacactgattctggtgatgccgtttgtcacccgcatgatgatgccgcgcaaagacgacatcatgatgatcgacccggcgctgctcgaagaagagccggatttccagaaaaaattaccggaagacgcgccggtttctctccggatggaagaaagccgccttatcgcgtggattatcgggattctgggcttcacgttcctcggcatgtatttcatcaaaaacggtttcaacatcaccattaacaccgtgaatatgattttcctgctgaccggtctgctgctgcataaaaccccgatggcgtatatgcgtgccgtcagtgccgccgcccgcagtaccgccgggatcctcgtgcagttcccgttctatgccggtatccagctcatgatggaaggctccggactgggcgggcttatcactgaattctttatcaacgtcgccaacaaagaaaccttcccgctgatgacgttcttcagctctgcgctgatcaactttgccgtgccgtcaggcggcggtcactgggtgattcaggggccgtttgttattccggctgcccaggcgctgggggctgatctcggtaagtccgtgatggcgattgcctacggtgagcagtggatgaacatggcgcagccgttctgggcgcttcctgcactggcgatcgccgggctgggggtcagggacattatggggtactgcatcaccgccctgctgctctcggcaccgattttcattatcggcctcgctttcttctga

SEQ ID NO: 276315 - DNA, 1182 bp, Morganella morganii
atggaaaatatcgttattgtcagtgccgtgcgtaccgcaatcggcaactttaacggcgcactggcgggtgtcagtgcagtggaactcggctcggcagtggtcagcgcgttactgaaaaaaacgcagctggaaccggggctggtggatgaagtgattatggggaacgtgttacaggccggactcggacagaaccctgcgcgccagatcctgctgcgcagtggtataccggaaagcgcctgtgctttcaccgtcaataaagtgtgcggctccggcctgaagagtgtcgcgctgggcgcacaggcgatcagcagcggtgacgcggacattattatcgcgggcggcacggaaaatatgagtcaggcgccgtatctgctcgacagccgtgcccgctggggttaccgcctgggcgacggcgcagtgcatgatgtgattctgcgtgacgggctgttatgtgccgagaataactatcacatggggatcacagcggagaacatcgcaaaagcctataacctgacccgcgaagagcaggatgcactggcactgtcgtcacagcagaaagccgtcagtgcgattgagcgcggcgcctttaaggcggaaatcgtgccggtgacggtaaaaagccgtaaaggggatatcgtggtggatactgatgaattcccgaaagccggatcaacggcagaagggctggcgaaactgcggccggcctttgataaagcgggaacggtgactgccggtaatgcctccggtatcaatgacggcgcggcagcactgatgctgatgacggaaacccgtgccaaatcactgggactgacaccgctcgcccgtatccggggttatgcctccggcggggtttcaccgtcgatgatggggctgggaccggttccggccacgcggaaagtgctggaaaaaacagggctgtcactgaaggacatcgatcttatcgaagccaacgaagcatttgcctcccagttccttgcggtcggccgtgacctgggttttgatcctgacaaagtaaacatcaacggcggggcgattgccctgggtcacccgattggtgcgagtggtgcccgtatcctggtgacactgctgcatgcattacaggctcagaataaaaccaccggtctggcgacactttgtatcggtggcgggcaggggatcgcgatggtgattgaacgtctgtaa

SEQ ID NO: 276316 - DNA, 333 bp, Morganella morganii
atgatgaagaaatatgcgatatccgaagctatcggacaggttatcagacaataccggaccaatgcaggtttaaccacaaagcagctggcacacagaatagggattagccagcagcagctctcgcgttatgagcggggggtaaaccgtattgatgtggatacgttgttgcgtgtcagtctggcctttaaactcacaccgggtcgtttctttgaggaaatgaatatgaccggcaccgggctggatgacattctttatgaaaatgaagaaggggatattcaggaaatccggatgagccttattgcggacagtattatttctccgcgcgatttctaa

SEQ ID NO: 276317 - DNA, 1284 bp, Morganella morganii
atggcggacatgacctcaaccgagaattccgcgaaagcgctgggcaaaataccatttacaatgtatgacgccggctgggtagtgctttgtattggtatggcgatcggtgccggtaccgttgtaatgccgattcagatcggtctgaaaggtatttgggtatttattttagctttcatgattgcgtatccggcaacctatatgttgcagaagctgtacatgaatacgctgtctgaaagtgaagaatgtgaagactacacaaacataatcacacagtatctgggcagtaactggggtgtggcgctgggggttatttacttcctgatgcttatccacggtatctttatttactctctctctgttattttcgacagtgcctcttatctccatactttcggtgttacagagggtgtgctttcaagctcactgatctatcgtgtggctgtctttgccgcgctgattttcattgcctccaagggcgagaaactgctgtttaaaatctccggtccgatggttatcgtcaaagtcggtatcattgtatcgctgggtctggtgatgatccctcactgggatttcaataacatcactgcgttcccgccgattggtgactttacccgtgacgtgctgctgactgtaccgtttgcgttcttctctgcagttttcgttcagattctgaacccgatgaacatcgcgtaccgcaagctggaatcagacaaacgtgttgccacctaccgtgctatccgcgctcaccgcgtggcctatatcaccctggtgacaatcatcctgttcttctcattctcctttacgttctctatcagtcatgagcaggccgtatccgcgtttgaacagaacatttctgcactggctattgctgctcaggttattccgggcgcggtcgtgagtgtgatgaccaccgttctgaacatctttgcggttctgacagcattcttcggtatctatctgggcttccaggaatcagtgaaaggccttgcagttaacatcctttcccgcttcatggataaagagaaaatcaaccacaccgtattaaacatctgtatctctgtcttcatcgttgcattactgactgcatgggtgtcaacagggttctccgtggttgtcttcttccagattggtagtccgttatacgctatcgtttcctgcttaattcctgtttacctggtattccgtgtcgcgaaactgaaaaaattcaaagactggaaagcctggtgtgttatgggcttcggtatcctgctgctcatcgcaccgttcttcaaataccttgagtga

SEQ ID NO: 276318 - DNA, 1197 bp, Morganella morganii
atgcacgattatacgaataaaggttatgacactaagattgttcacgctggccagcaggctgatccactgactggtgcgttatcaaccccaatctatcagacctctacattcgtcttcgacagcgcagcacaaggggcagcacgtttcgcattagaagaagaaggttatatctactcacgtttaggtaaccctactaacgcagcattagaagaaaaaatgcgtgtactggaaaacggtgaagcagctctggcgacttcttccggtatcgcagctatctctaccactatcctgactatgtgcggccagggcgaccatatcgttgcttctgacactctgtacggctgtacttatgctctgctgtctcacaccctgcctaaattcggtatcgaagtcactttcgttcgcgcaaatgaccctgcgaacatcaaagcggcgatgaaaccaaacaccaaaatggtttacgtcgaaactccggctaacccgactctggcaatgatcgacctcgaagcagcggcaaatgttgctcacgaaggcggcgcaatgctggttgtggataacacctttatgtctccgtactgccagcgtcctctggaattaggtgcagacatcgtggttcacagtgtgaccaaatacatcaacggccacggcgacgttatcggtggtgtgattgtcggtcctgctgacttcctggttcctgcccgtctggttggtgttaaagacatcaccggtggcgtaatgagcccgttcaacgcatggttaaccctgcgcggtctgaaaacactgcacgtccgtatggaacgtcactgctctaacgcaatgaaagtggctaaatatctggaatctaacccgaacgtagaagcagtattctaccctggcctgccgtctcacccgcagcacgagttagcgaaaaaacagatgagcaacttcggcggtatgatcagctttgaaatcaaaggcggtatcgaagccggccgtaaagtgatggactctgttgagttatgcatgctggcagtaagcctgggcgatactgaaactctgattcagcaccctgcatcaatgactcactctccggttccggctgaagagcgtctgaaagcaggtatcaccgatggtctgattcgtatctctgtcggtctggaaacacctgaagacatcattgctgacctggaacaggctattgcgaaagcagttgcttaa

SEQ ID NO: 276319 - DNA, 1647 bp, Morganella morganii
atgtctgcatatagatggttaattaataccattgaccgcgtcgccatggtggaagaagtcatcaatgagttttcggcctcagaaatcagcatcaattccatggaagtttttccgtgcaaaatttatgtcaaattcaacgcggaatgcgagcgggatgttaagctgttgctgagtaaactcctgcttaatcctgatgttatcagtgtcacccgttccaaattacagccctacgaacgtaaagaaaaagaattacaggcgattctggaatccaccacggacggcattatcggtatcaataatcagggtaatatcaactacttcaataaagtggcggaagattttttctcgatctctcgggaaaatattgtcggcgttaatatcagcaaaattctcagcggcaaaaaccaggcggtgctcaccaaactgctcggcggtaacagtttcgatcactatcagatggttaccagtacgccgaaaggggagttgtactatatctgctccggccgtccgattctgagtgaagagtcccaggtgatgggggcggttatcaccttcaaaagcctgcgctcggtgcagcaaatggcgtcttcggtgaataaaagcctgccgttcagctttgatgacattatctgtgaaagcgaaatcatgatgaacctgattgatttcgctaaaaaaatctcaataagcccgtatacggtactgatccgcggtgaaaccggtaccggtaaagagctgtttgcccgcgccattcataacgccagtgaccgcagcgctcacccgtttgcgccgattaactgtgcggcactgccggaaaacctgattgaaagtgagctgttcggttatgagggcggggcattcagcggcgccagcaagggcgggaagatggggctgtttgaatcagccaaccacggcaccgtgtttctggatgaattcggcgagctttcccttatcctgcaaagtaaattactgcgggtattacaggaaggcgtgatccgccgggtcggcgggcacaaggagatcccggtggatgtacggatcattgtcgccaccaaccggaatctggaagagatgatcgagaacaaatcgttccgtgaagatctctattaccggatcaacgtgatcccgattaatatcccgccgctgaaagagcggaaaacagatatcccgctgttattacagcgctttatcagcaaatacacgacagagctgaataaacagctcagtttgtctcaggatgcatatcaccagttaatggcctattcctggccgggtaacgtgcgggaactgcaaaacgtgattctgcgggccattcatctggcttccggacgggaaattaccgtcggggatctgtggctgccccatgaggaagtgatggcctctccggcactccggccgaaggcggcaccgaaaacggaaataccccctgcggtattgccggtgcaggaagacattaacctgaaagaaactcttgcacggcaggaaaaaagcctgctggaagattatctgcgccgctatggttcggcccgtaaagtatcccgcgaaatcgggatgtctcacaccaccgtactgaataaagcccgttattataatctggagcatctgctgacctacagcacagtacgccggtcagcagacaaaacagattaa

SEQ ID NO: 276320 - DNA, 1440 bp, Morganella morganii
atgacggattcagcaccggccgttgtctggctgcggcacgacctgcggctgacagataacacggcgctttacgccgcctgtcaggcacaccggcaggtaaaactgatttttacactcacgccgggacagtgggagcagcacgctatgtccccgtcacagcaggcgctgattttctgtcagctgcacgcgctgaacacatccgcagccgcactcgggatcaccctgcatgtgcagccgtgccatacctttgaggatgccgctgactggctggccgcatggtgccgcgaacatcgtatccccgctgtctatgtcaataaacagtacgggctgaatgaacagcgccgtgatgcccgctttgccgcgcgtctgccggacacctgccgcttttatgcctttgatgacagtgtcctgctgccgccgggcagagtaagcacacaacagggcggactctacaaagtgttcaccccgttccggcgggcctttctcaccgtactgatgcagaccaccgtccgtgtgctgccggtaccggaggccaaaggcccgccggtctccccggcaccgcttaatctgccgcagcaggagcatgcccttttcccttccggggaagaggccgcactgcagcggctggcggatttttgtcagaaacatgctgcggattacaaaacagaacgggattttccggcgattgacggcaccagccgcatctccgcgtatctcgccaccggaattttgtccccccgccagtgcctgagccgtctgcgcctgcatttcccgatggtcgctgatgagccggaaagcggcgcttatacctggctcagtgagcttatctggcgggaattttatctgcatcagctggcacagcacccggatatcagccgtcaccgcccgatgcagcgctggacagagtcaattatctggtcaccggataacagcgggctgcttgcctggcagcagggtaaaaccgggttcccgctggtcgatgcagctatgcgtcagctgaatgaaaccggctggatgcataaccgtctgcggatgatcacggcaagttttctggtcaaggatttactgactgactggcggcgcggcgagcactattttatgtcacagctgattgacggtgaatttgccgccaataacggcggctggcagtgggcggcctccaccggccatgattcagtaccgtatttccggattttcaacccggtcacgcagggaaaacggtttgatccggacggcagctttatccgccgctggctgccggagctggcagacgtacctgcgaaatacattcatacaccccatgaatgggcggaaaaaaatcagcgtgagattgattatccgaaaccggtggtggatcaccggatggcgaggatcagggctatcgatgcttacgaaaccgcccgccggaccgctgccggcggggatgataatccgtattaa

SEQ ID NO: 276321 - DNA, 1503 bp, Morganella morganii
atgagacgcaagaaaacaaaacaaaaacctttaaatatcaatgatattactatcattgatgatggaaaattaaagaaagccatcaccgctgcctcactgggtaatgccatggagtggtttgatttcggggtctacggcttcctggcgtatgtgctgggtcaggtctttttcccttccgcctccccgggcatacagatgatcgcggcgttagccacgttctccgtaccgtttctggtacgtccgctgggcggggtctttttcggcattatgggcgacaaattcggccgccagaaagtgctttctgtcaccatcattattatggctgtcagtaccttctgtatcggtctcatcccgtcttatgaaagtatcgggatctgggctccggtgctgttactgctggcaaaactggctcagggtttctccgtgggcggtgagtattccggtgcagctatctttgtagcggaatattcaccggatcgtaaacgcggatttatgggcagctggctggacttcggctcgattgccggtttcgtctgcggtgccggtgtggtggtgctgatctccagtattctcggtgaggaaaccttccgtgaatggggctggcgtatcccgttcttcctggcgctgccgctgggcgttatcggcctgtatctgcgtcatgccctggaggaaacaccggctttccagcagcatgttgaggatatgaaaaatgccaacccggaaaccggcgaagataagccccgcgtttcactgcgcagcattgcctcacagtacggtaagggtctgatgatttgtgtcgggctggtgattgccaccaacgtcacttattacatgctgctgacctatatgccgagttatctgtcgcataacctgaattacagtgcggatcacggtgtgctgattattatcgcgattatgattggcatgctgttcgtacagcctctgatcgggatgatgagtgaccgcatcggccgtaaaccgtttgttctcgcgggcagtatcgggttatttgtgctggccattccggcatttatgctgattaacagtggtgtcatcggcctgattttcttaggcttactgatcctggcggtgctgcttaactgctttaccggtgtgatggcctctattttaccggccattttcccgacaaaaatccgttacagtgcactggctatctcattcaatatctctgtgctgattgccggtgccaccccgaccgccgccgcctggctggtcgaggcgaccaataatctgtatatgccggcctattatctgatggtgattgccgttatcgggatgattactgcgattgtgatgaaagaaaccgccaataagccgttacgcggtgccacaccggccgcatctgaccgcgcggaagccaaagagattttgctcgagcattacgataatatcgaacacaagattgaggcgattgatgaggagattgccgcgttgcagaaacgccgtcagtcactgattgatcagcaccctaaactggactga

SEQ ID NO: 276322 - DNA, 312 bp, Morganella morganii
atgaccaaagcaaaaaactcgatagcacgcgccgtcgggcaaaaaattcaggtgttacggaaagatcacggcattactgcagcaagactggctgaaatgattgaaatcagtcagcagcagatgtcacgttatgaacgtggtgtaaaccgtgttgatgtggattgtttagtccgtattgcggatatctttgaagtgccggttggctggttcttcaccgagattgaaggccggagtaaacgcgacagtggaaatgaacgggaatcctggaaagcagaaaccgttattttgccggtcgaatctgaactgatgtaa

SEQ ID NO: 276323 - DNA, 978 bp, Morganella morganii
atgaacattaatcagctcaaaagttttgttgaggtggtcaggagtgactttaatatcacgaatgccgccgagaagctgtatacctcgcagccgacagtgagcaagcagcttaaaattcttgaagatgaactgaacgtttctttattcaaccggaaaaataataacttattatcgctcagtccgattggtgaggaagttcatcgtgttgcctgcgatattctggcgcagtttgataaaattaaaagtctggtatcacacgaagataccacgacaaaacagaatctccgtattgccaccacccacacgcaaatccgttataaattaccgaaagtgattgaacgctttaatgcgcgctatccgaatatttcgctgcatttccatcagggagcgccggcacagctggcggaaatggtgaaaaacggggatgtggattttgcaatcgccaccgaatccctgcatctgtatgacgatttactgacgctgccgtgctatcagtggtcccgcagtgcgattgtgccgcacgatcacccgctggcacagaatgagcagctgacgattcaggagctggctcattatccgctgatcacctatgtattcggattcaccggccgttccaagctggatcaggtattttatcagaaccacctgacgccgaatgtggtattaaccgcggtcgatacggaaattattaaattctatgtgaagcgcggagcgggtgtcggtgttatttccaccgtggcgtttgatccggcggaagacagtgattcactgcgctgtattaatatcggtaacctggtgaaaccgagctatacccatatttgtatcagccgtcatacacatctgaaggattatatgtatgactttatttcctgttatgcgccgcatcttgacctgaattatattcaccagccggaacagtggctgccggttgatcccaaagcccgtgaccggctttaccgcgcattgccggaactctga

SEQ ID NO: 276324 - DNA, 1263 bp, Morganella morganii
atgaccggtttccggtcatacccgcgcttacatcagggattctttatcagcacacaaaccggtttcagttacggggtaaatgtaatgaccaataaatacaatgtcagtgaaaaactctttgcgcttgaggcgttcagcaagaaaacgcgccaggatttacataaaatccctgagctgtccggtgaagaatataaaacctcaaaatactgccgcgagctgatggaaagcttcggctacaccatccgtcagtttgagggatataccggctttaccgctgaactgaccgttaatccggcataccgcctgattgcttaccgcaccgacatcgacggcctggaaatgccggacatgacctgcaacgagcacagctccgtacacgaaggctgcgcccacaactgtggtcacgacacccatatgaccatcgcgctgactgcggcaaaatacctcagcgaacaccgcgatgaactgacacacaatgtccgttttgtcttccagatggcggaagaagatatgcgtgtgccgggtgcggataaaatggtggaaatgggctgcatggacggcgtggatgaagtctacgggctgcacaacgacgctgcgattgaaaccggctgcatccgttttaatgcaggtgtgatgtcctcttacggctccgcctggacgctggacgtacacggtgtttccgcgcacggctccacgccgcacaaagggctggatgctatccgcgaagccacccgtatcattgattacatggattatatcgtcgccaagaaaactgatcctttcagcccggctgttttcggctgcggtatgatcaacggcggtaccattccgaatgcgctggctgattatgtgcaggcacgcggtaccatccgttctatggatgaagaaaccgataaaatcttaaaagccagctttaaagagatcgttgcccgcagtgaagccggtgggtttaaaaccacactggaagcctgcggttacccggccgtaattaaccatccgcaggcagcggaagtcattaaaaacgcggcagccgccttcttaccggctgaaaatattgactcaaacggtaaaccgatgaccggcagtgaagatttcagctatatgattaatgccaccaaagataaattaggtgccatgtatttcctcggcagcggtaacaaagccaaaggaattaataactatctgcatgccaatccgtattttgttgatgacgattgcctgctgatcggtgcgcaaatctttattaatattgccacccgataa

SEQ ID NO: 276325 - DNA, 1722 bp, Morganella morganii
atgaagcagactgtagcgggttatatcgcaaaaatgttggcggatgcaggaatcaaccgtatctggggtgtcaccggagactcactgaacgggttaagtgacagcttacgtaaactgggcagcattgaatggatgggcacccggcatgaggaagtggccgcgtttgccgccggggcggaggcccatctgaccggtaaactggcggtgtgcgccggttcctgcgggccgggtaacctccacttaatcaacggattatttgattgtcagcgcaaccgcgtgccggtgctggcaattgccgcacatattccttccggcgaaatcggcagccattacttccaggaaacccatccgcaggagctgttccgtgagtgcagcgtctattgtgagctggtttccaatccggagcagatccagcaggtgctgggtattgccatgcgcaaggcgattctggagcgcggcgtggccgtggtggtcattccgggggatgtggcattaagaccggcaccggaatcggcccgcaatgtctggtatgagccgtctctgccgctggtgatgccgcagcgggatgagctggtgaaactggcggatgcccttaacggcgcgaaaaacatcacactgatgtgcggagccggatgtgccggggcacatgatgaagttatcaaactggcggaaaccctgaaagcaccggtggtgcatgcactgcgcggaaaagagcatattgagtatgataacccgtacagcgtcgggatgaccgggcttatcggtttctcctccggatattatgcgatggaaaatgcggataccctggtgctgctcggtacgcacttcccgtaccgcgcgttttatccggccaaagcaaaaattattcaggtggatatcaacccgggcagcctcggcgcgcactgcgcggtggatatggcggttatcggggatatcaaagccacactcaacgctattcagccgcgcttacaggccaaagaggatcgcacccatctggatgcggcgctgaaacactatcagaccgcccgcagtgacctcgatgcactggcaaccgccagcaaacgggaactgatccacccgcagtatctggcgaagaaaatcagtgagctggcggatgatgatacggtattcacctgtgatgtgggcaccccgacggtctgggcggcgcgttatctcaccatgaacggcaaacggcggctgattggctcctttaaccacggctcgatggcgaatgctatggcgcaggctatcggtgctcaggcgcatgaccgtaaacgccaggtggtggcgatgtgcggtgacggcgggttcagtatgctgatgggggatttcatttccctggcgcagatgcagctgccggtgaaaatcgtcatctttaacaacagcgtgctgggctttgtggcgatggagatgaaagcgggcggttatctgactgacggcaccgatcttcacaatccggattttgccgcgatggccaatgccatggggatcaaagggatccgtgttgaagacagcgagtcactggatgatgcactgaaaaccgcatttgcccatgacggcccggttctggtggatgtggtgacggccaaacaggaactggccatgccgccggaaattaagtttgagcaggccaaaggcttcagtctgtatatgctgcgcgcgattatcaacgggcgcggtgatgagattgtggagctggcgaaaaccaactggctgcgctga

SEQ ID NO: 276326 - DNA, 912 bp, Morganella morganii
ttgaataataacaaaaagttaacgattactgttccgttacctgagccctatcatacagcggattttctcgcatttcatttacgtgataatcaccatgtggccgaagagatcacggaaaaccgggtgatgaaagggatttgcctgcacagccatcctgcattactgacgctggaaatcagttcaggagaagcacgtgtcaccctcagtactgacggtcccggccccctgccggaagacgaagcccgtatgcattatcttgcccggcatatgctcggtctgatccagccggttgaggagttcgagacacagtatcataatcacccgctggccggtccccttatccggcaacagaaagggctgcggatctaccaatccgccacaccgtttgaagccattaactgggcgattatcgggcagcaaatcagtgttcaggccgcgatttccatccgccgccgcctgattcagcatatcggcctgcgccactcctccgggctgtggtgctacccggatgcggcacatattttacagaccgactttgacgggctgcgcagctgcggtttttctgtcggtaaagccaatgccctgctggcactgagtgagcaactggaaagcggagcgctggtgctgccggatgtggtcacaccggagaatgccgacgcggtttccgcctcactgacggcgattaaaggtatcggcacctggacggtcagctatgccctgctgcgcggctttaactatctgaacggctcactgcacggagatgttgcggtgcggcgtaatctgcagcgcctgctggcgcgggatgaaaaaataacggcggatgaaacgcaggaatggctggcggatttcgctccgtggcgggccctgatggccgcccacctgtggcggctggagtccgccgccgggtactga

SEQ ID NO: 276327 - DNA, 1431 bp, Morganella morganii
atggatataaaacaatattaccttgaggttgcggaaggtaaaggtaagaggatgacgtcggaggtagtggcattctctccctcgcggctcaacctggcagagttagaagagcgtctggcatcacaaacctttttcacacagggtgatattgaatacgcggaacatgatgagaacagcttttattacacctgtcattacggtgatgaagaactgctgtttctggtgtcactggcaccgcgggctctggaactggaaatcaatccttactattcaaccgatccgctgtcagccggactgctggccgaagtcaaccagactgagcaggacatttatgttgaatgccttttacagaatgacgtgctgcgaagttaccggtatcagctgaagatggtacagattctggtgccggatttattactgggtatcgatatctcggcagccgggcgcggttttacccgtgagtggctcaattttcagctggaaaacgacgtgcagctgaacattgaatctctgtataccattcatgcaatctatgacacggaaaattccccgccgaccatgtactggttccacacacacggcctgctgcgctgcgggatcccggaagtggaactgctgctgccgcataccattaatgcgtactacggcattcctgatctgctgcgcagttttatcgggcagagtcttaatgaaggtaaagtgctgtttaatgagccgatgttgtgcggccagacggaaaaacagctggaatatattgtggcgctgccgtatcaggaagggatccgccagatcaacaaaaataccccgatcgaccagctgaaacctctcgaagagatcgattactctcacgataatatgccggaaaatgaatttctcggcgatcgcggagatcgcgacgatcagcatgaccatccgtcctgtatgctgttccgtgtaaacgagagttcgccggtgttacagacatttttccgtggtttcgacgacgatgccgccattatgttttaccgcccgaacagtgaaacctatgaaatggcggtaaaagcccgcctgcgctggcactattttgcccagatgtttgcggaatacgggcagccggtggtcaaaacgaaaaaaggtctgctcggcggattattcggtaaaaaagcccgtgatgaagaggatgagcatccgtgggtgtttatggtcaaatgcggcattccgtacggggatgaggatgacctggagcacatgtggtttatcccggaaacactggataatgacgtgtttaccggcaaactgatcaaccagccgttttatgttgaagagatggaagagggcggtgtgtatcctctgaatacagagatgctgactgactggaatatctatttttccggtgagaaatataccccggataccatttatcagctgctcagcccgtcacaggttcactga

SEQ ID NO: 276328 - DNA, 633 bp, Morganella morganii
atgcctgatttgacgtcattgctcggatttgctctggttgcactgggaatggtattaacgcccggccctaatatgatttatctgatctcccgttccctctgtcagggaaggcgggccggatatatttctcttgccggtgtcggcctggcatttattttttatatgctcagtgcggcatttggtatcacagcactcttttttgctgttccttacgcctatgacgctctgcgtatcgcgggagcattatatttgctctggctggcgtggcagtcggtcagaccgggcggacgctctgcattttcggtgcgggatttaccggaagataagccgaaaaaactgttcaccatggggtttctgaccagcctggcgaacccgaaagtggcggtgatgtatttatcgctgctgccgcagtttattgtgccggggcatggcagtgtgctggtgcagtctctggcgctcggaacaatacaaattatgatcagtctgacagttaacggactgattattctgatggcgggttcggtggctgtctttatgacggggcgcccgttctggcaagtggtgcagcgctggctgatggggactgtactggccgggctggctgtccggatggcgctggaatcccggcgctga

SEQ ID NO: 276329 - DNA, 1488 bp, Morganella morganii
atggaaacgaaagatttgatcgttatcgggggcggaatcaacggtgcaggtattgccgctgatgcagccggacgcgggctgtctgtgctgatgctggaagcacgggatctcgcctgtgccacctcatcggccagctcaaaactgatccacggcggattgcgctatctcgaacattatgagtttcgtttggtgagcgaagcactggctgaacgcgaagtattattaaaaatggcgccgcatatcgccttcccgatgcgtttccgtctgccgcatcagccgcacctgcgcccggcgtggatgatccgcgcggggctgtttctgtatgaccatctaggtaaacgcaccacactgccgggcagccgcggcctgactttcagcactgcctccccgctgaaagcagagtttaaaaaaggctttgaatattccgactgctgggtggacgatgcccgcctggtggtgctgaatgcacaggaagtcgtgcgtcagggcggcgaagtccgcacacggacaaaagtcacccgcgcatggcgcgaaaacggtttatggcaggtggaagcggaaaatgccctgaccggcgaaaccctgcgctggcaggcaaaagggctggtcaacgccgccggaccgtgggtaaaaaccttctttgatgacggattacagctcaaatccccttatggtatccgtcttatcaaaggcagccatattgtggtaccgcgcgctcacgacgagccgcaggcctatatcctgcaaaatgaagatcaccgcattgtgtttgttatcccgtggatggatgaattttcgattatcggcacgaccgatgtggaatatcacggcgatccggcagacgttaaaatcgatgataacgaaattaattatctgctggatgtgtataacgaccacttccgtaaaaccctgacccgcgacgatatccgctggacatactccggcgtgcgtccgctgtgtgatgatgaatcggactcgccgcaggcgatcacccgcgattacacgcttgatttgcatgatgacaacggacaggcgccgctgttatcagtcttcggcggcaaactcaccacttaccgcaagctgggtgaacacgcgctggataaactggcggcctactatccgcacgccgggaaagcatggacaaaacaggcggtactgaccggtggtgaactgaacggccggagccgtgacggctatgcccgtgtgctgacagaacgctggtcatggctgccgaacggactgacactgcgcctggcccgcacctacggcagtcagacagaaaaaattatcggagatgcgcaatccctcagcgacctcgggcagttattcggccataacctgtatgaagccgagctgcgctatctggtacagcacgagtgggtgatcaccgcagaagatgcgctctggcgcagaaccaaactgggaatgtggctcacacaggaagaacaactgcaggtggagcagtggctccgccgggaagagcaataa

SEQ ID NO: 276330 - DNA, 759 bp, Morganella morganii
gtgaaacaaacacagcgtcatgatgctatcgttgagttagtcagtaaacagggctatgtcagcacagaagagctggtcgagcactttaaggtcagtccgcagaccatccgccgtgacctcaatgaactggcggagcagaataaaatccaccgtcaccacggcggggcggcacagccgtccagttcggtgaatgccgcctatcatgagcgtaaaagcatgtggtcggatgaaaaacgccggattgcccgccgtgtcgcggcgctgatcccggacggtgccacactgtttatcgatatcggcaccacaccggaagcggtcgcgcatgaactgctggaacataagaatctgcgcatcgtcaccaataacctcaatgtcgccaccctgctgatggcaaaagatgatttccggctgatcctggccggtggtgaagtccgttcccgtgacggcggcattgtcggtgaggccacgctcgattttatctctcagttccgtctggatttcgggattctcgggatcagcggtattgatactgacggctccctgctggaatttgattatcacgaagtccgcaccaaacgggcaattattgaaaactcccgctgtgtgatgctcgtgaccgatcactccaaattcggccgcaacgccatggtcaacctcggtaatatggggctgattgattgcctgtttaccgacaaacgcccgccggaaagcattatcaaaatcctggacgaacaacaggtgcagctcgaagtctgctga

SEQ ID NO: 276331 - DNA, 834 bp, Morganella morganii
atggtttatctgatcaccatcgccaacccgcggattgcccagtcatttattgattatatggccgcgcgggatattgagctcactatgcgtgccacccgcgaagggcgcggtgcggaattgtggctcgacgacgaaagcaagctggcacagacacaggctgagctggaaacctttatgcgtgatccgatgaacaaacgctatctcgccgccagctgggaatccggtgaaaccgattccccgttccgctatccggcctctcatgccttcagtaacctggtgaccccggccggaccgctgaccatcaccatcaccgtactgtgcgcactggtttttctgtggatgcagataagcggtactgacgcagtgatggactatctggcctggccgcagcctgaccagcagggtgaactgtggcggtgggtaagcccggtgttcctgcatttcggcctgacccatattctgatgaacctggcgctgtggtggtatctcggcggtcaggtggaaaaacagctcggcagcggacggctgctggtgatcaccctgatttctgctctggtcagttgctggtcgcaatcctttttcagcggctcatccttcggcggcctgtccggcgtggttttcgcgctgatcgcttatgtctggtacaccggctcgcgcaatccgtccgccggtatttatctgcccgccgccatgatggtattttcggtattatggctggttatcggttactttgatttatttggtacaatgccgattgcaaacatggcccatgcatccggtctcgcgaccggcctgctgatggcggtatgggataaccgccgccggacggcctga

SEQ ID NO: 276332 - DNA, 327 bp, Morganella morganii
atggaacaaatccgcttaatcacaccggatacggcgtatgaactctggcagcagaacggggctgtcctggttgatatccgtgatccgcaaagcttccgggccggtcacactgacggcgcatttcacctgacaaacgacaccgtgaataccttcatggatcagacagattatgatcagccggttatggtcatgtgttaccatgggcacagcagtcagggcgcggcccagtatctgcttaatgtcggctatgaaacggtatacagcatcaacggcggctttgaggcctggttgcgcaattacccggacacagtcaggtcacttgcttaa

SEQ ID NO: 276333 - DNA, 579 bp, Morganella morganii
atgattactattactgacgctgcgcaggcacatttttccaaactgcttgccaaccaggaacccggcacacaaatccgtgtttttgttattaacccgggcactcccaatgcggaatgcggagtctcttattgtccgcctgatgctgtggaagcgaccgataccgcgctgccgtttgagcagctgaccgcttatgttgatgaactgagcgcgccgttccttgacgaagccgtgatcgacttcgtgaccgatcagctcggctctcagctcaccttaaaagccccgaacgccaaaatgcgtaaagtggcggatgatgccccgctgatcgagcgtgtcgagtatgttctgcaatctcagatcaacccgcagctggccgggcacggcggccgtgtttccctgatggaaatcacggacgaaggctatgccatcctccagttcggcggcggctgtaacggctgctccatggtggatgtcaccctgaaagaagggatcgaaaaagagttactgaatatgtttgccggtgaactgaaaggcgttaaagacctgactgaacatcagcgcggcgaacactcttattactga

SEQ ID NO: 276334 - DNA, 684 bp, Morganella morganii
atggttattattgagaattactgcctgctgtgcaatcagccgctggcaattgccgcacacggtatctgcggattctgcgagcgggggctgccggatatgccgccggtctgccggcgctgcggcctgccgctggtgacaccggagccggaatgcggccgctgtctgcaatccccgccgccgtggcagagcctgctggccgtgaccggctatcagccgccgctggcggccctggttcaccgcctcaaatacagcggacagacccacattgcccgtgcactggcacggctgctgctgcgccgggtgctggcggattaccgcgcgggagagtgtccgaagccggatctgctgctcagcgtcccgctttaccgttaccggcaatggcggcgcgggtttaatcagagtgatcttatcatccgcccgctggcaaaatggctgcgctgcccttatgacagttccggccttatccgcacccgtgctacactgagccagcggatgctgtcccgcacgcagcgcctgacaaacctgtcctctgcatttgccgtcacccgtgatgtccgcggactgcatattgcgctgaccgatgatgtcatcacaacaggggcgactatgacagcgctgtctgaattgctcattcgtgcgggtgcggcggcagtccgggtgtggtgcctttgccgcaccttgtag

SEQ ID NO: 276335 - DNA, 774 bp, Morganella morganii
atggcaacgcttttttggcagcagagcggacagggttcgcgcgatcttgtgctgttacacggctggggactgaacagcgaagtatggaacagcattgaattgcggctcgcaccgcatttccgtattcataaggttgacttaccgggttacgggcgtagtcaggaattcggagagatgtcactgacggagatgtcggataccgttttcgcgcagatgccggaaaatgcggtgctggcgggctggtcactgggcgggctggtggctgcggatattgcactgcgttacccgcaggcggtgagtcatctggtgacaatctgttcttcaccttgttttggtgcacaggaagaggaagggtggccggggattaaaccgacggtactgagcggctttcagcatcagctggcgacggattttcagcgcactgtcgagcgttttctggcactgcagacactgggaaccgcaagtgcgcgccaggatgcccgcatactgaaatcagtggtgctggaacagccgatgccggatgtggcggtactgaatgccgggctggagattctgagaaccgccgatctgcgcagcggactgccgtctctgacaatgccgttcctgcggatctacggttatctcgacggcctggtgccgcgtaaagtcgcgtcactgctggatgagcaactgccgtcctcaccgtctgttgttatgcgcaacagcgcccatgcaccgtttatttcacatccggatgagttttgtgaggtactgacggggtttgcaggccggtaa

SEQ ID NO: 276336 - DNA, 129 bp, Morganella morganii
atgaatcagacagccaatacaacaccgggagtcgccgttaaaacatcaggctcttctgagggcaaagtcttcagcgccgcatcacttaaagcacgcctggcacagcgtaaagctgaaggccgcagctga

SEQ ID NO: 276337 - DNA, 234 bp, Morganella morganii
atgatcagcctgatcgcagtacgtgacgccattgcactgaacggccgggcagatgcccggctgctcagccaccagttgaatgccccggaagccctggtccgggccatcatggaaaaactggctgccatgggaaaaattgaagcggtggatgtcagcagctgcctgagcagcagttgcaaacagtgccccgaaagtcagggctgtgacacaaaggtgtatcagattcattcataa

SEQ ID NO: 276338 - DNA, 2319 bp, Morganella morganii
atgaaagcactcaccctgggactcatcggtaatcccaattcagggaagaccacgctgtttaaccagttaaccggatccaaacaacgcgtcggcaactgggccggtgtgaccgtggaacggaaaatcggttacttcaccacgccggaacacaaaattgagctggtggatttacccggcacctattcactgaccaccatctctgaacagacatccttagacgaacagattgcctgccactttatcctcagcggtgaagcggacatgctgattaacgtcgtcgacgcatccaatctcgagcgtaacctgtatctgacgctgcagctgctggaactgggtgttccctgcattattgccctcaatatgctggatatcgccgataaagcgaatatcaatattgatgttaaagcactgtcagagcgcctcggctgcccggtgatcccgctggtttccacccgcgcgtccggtatctgtgagctgaaagccgcgatcgacaaacacacaatgacaccgcatgaagtgctggtgaactatccggcggctctgctcgacagtatgaacactctcgcacagtcgattcctgcggaagagttcagcgccacacagcgccgctggctggcactgcaaagcctggaaggggatatctacagccaggcacgcgccggttttaccccggagcatgtgcagtctgtccgtgacgcgatgcaggcacagcagcaggaagagccggaactggtgattgcggatgcccgttatcagaccatcgcggatatctgcgaaacaaccattgataacagccattccgagccgaataaactgaccgccgcgatggacagaattgtcctcaaccgctggctgggtgtaccggtattcctgtttgtgatgtacctgatgttcgtgctcgccatcaatatcggcggggcattgcagccgctgtttgaaggcggttcggaagctattttcattaacgggacacaatggctggggatgaccctcggcttcccggactggctgaccatattcctcgcccagggggtcggcggcggtatcaacaccgtgctgccgctggtgccgcagatcgggatgatgtatctgttcctctctttcctggaagactccggttatatggcccgtgccgcgttcgtgatggacagactgatgcaggcgctcggactgccgggtaaatccttcgtgccgctgattgtcggtttcggctgtaacgtaccgtccattatgggtgccagaaccctggatgccccgcgtgaacgtcttatcaccgtcctgatggcaccgtttatgtcctgcggcgcgcgcctggctatcttcgcagttttcgctgctgccttcttcggcaaaaacggcgcgagcatcgtgttctccctgtatatcctcgggattgtggtggctatcctcaccggtctgctgctcaaacacaccattatgcgcggcgaagcatcaccgtttgtgatggaactgccggtgtatcacgtaccgcacatgaaaaccctgtttatgcagacctggcagcgcctgaaaggctttgtggtgcgtgcgggtaaagtgattattgtcgccagtatggtgatcggtgcactgaacagcttcagtttctccggtaaaccggcggacagcattaatgattccgcactggcctcagtcagtaaagtggtcactccgctgctcagcccgattggtgtcaccaatgataactggcaggcgactgtcggcctgatcaccggtgcgatggcgaaagaagtggtggtcgggacactgaataccctctacaccgctgaaagtatcaccaacgaaccgtttgatccggaatcctttgatttatggggagaactgggtgatgcggtaaatgaaaccctggattccctggcggaaaccttcacgttcgcggcattatccaacccgattgaagccagcaaaggcgacggcgagatggacggcggtaccatgggcacgatggccgcgaaattcggctctgatattgctgcttacagctatctgatctttgtgctgctgtatgtaccgtgtgtctccgtgatgggggctatcgcccgtgaaaccagccgcggctggatgaccttctccatcctgtggggtctgaacgtggcttactcactggccgccctgttctaccaggccgccacattcagtgcccatccgggcagcagttcagtgattatcgctgtagtggtgattttcaacctgatcctgtttgcactgctgcgccgcacacgcagccgggtgaatctcagcttccgccgtgatgcacacagccgctgtggcggctgctccggcaacgagtgtcactga

SEQ ID NO: 276339 - DNA, 228 bp, Morganella morganii
atgacacttcagccacaacacagttataaaattctgggcttttccgggcaaatcagcccggcataccgtcagaaattattgtctctgggcatgctgcccggctctgttttccgggtgatccgcagcgctccgctgggcgatccgatccaaatcgaaacccggcacgtcaacctgatgctcagaaaaaaagacctggcgctgctgatgcttgatgacgtgcaggcgtaa

SEQ ID NO: 276340 - DNA, 2331 bp, Morganella morganii
atgatgaatgaatctctgagccagattattgccggtgaactgaatgcgcaaacccgccaggtcaccgccgcgattaccctgctggatgagggaaataccgtcccttttatcgcccgctaccggaaagaagtcaccggcggcctggatgatactcagctgcgtcagctggaaacccgtctcagctacctgcgcgaactgaacgaccgccgccgggccatcctcaaatccattgaggaacaaggcaaactgacccctgaactggcgggagcgattaacggcacgctcagcaaaacggagctggaagacctctacctgccttacaagcccaagcgccgtacacgcggacagattgcggcggaagccggtctggagccgctggcagacaccctgtggcaggatccgtcacaggatccggaaaccctcgccgccacctatactgacagcgaaaaaggggttgccgacaccaaagccgccctcgacggcgcccgctacatcctgatggagcgtttcgcggaagatgccggtctgctggggaaagtccgtgattatctgtggcgcaatgcgcatctggtttccgttgtgatcagcggaaaagaagcggaaggcgcgaaattcagtgattatttcgatcaccatgaaccgattgccaatgtcccgtcacaccgcgccctggcgatgttccgcggccgtaatgaaggaattctgcaactctccctcaatgctgacccgcagtgtgaggagccgccgaaagagagctattgcgaagaattaatccgcgattacctcggcgtccgctttaacaatgccccggcggacagctggcgcaaagcggtggtgagctggacatggcgggtcaaggtgctgctgcacctggaaaccgagctgatggccgcgctgcgcgagaaagcagaagatgaggcaattaatgtcttcgcccgcaacctcagtgatctgctgatggcggcaccggccgggatgcgtgccacgatggggctggatccgggtctgcgtaccggggtgaaagtcgcggtggtcgatgccaccggtaaagtgctggccaccgacaccatttatccgcacaccggccagaccgccaaagcagcggcgtccgtcgcggcgctctgcctgaaataccatgtggagctggtggcgatcggtaacgggacggcatcccgtgaaactgaacgtttctttgccgatgtgcagaagcagttcccggatatcaaagcccagaaagtgattgtcagcgaagccggcgcctccgtttactccgcgtcagaactggcagcggcagaatttccggacctggatgtttcactgcgcggtgctgtttctatcgcccgccggttacaggatccgctggccgaactggtgaaaatcgacccgaaatccatcggagtcggccagtatcagcatgatgtcagccagacgcagcttgcccgtaaactggatgcggtagtggaagactgcgtaaacgccgtcggtgttgacctcaataccgcgtctgttgccctgctgacccgcgttgccgggctgagcaaagtgatcgcacagaatattgttgactggcgtgatgaaaacggccgttttgcggatcgcaaacagctgctgaaagtcgcgcgtctcggtccgaaagcctttgaacagtgtgccgggttcctgcgtattgcaggcggtaaaaatgcgctggatgcctccaccgttcacccggaagcctatccggtggtggaaaaaatcctgcaggccacacagaaaaccctcagtgacctgatgggtaacagtgatgtgctgcgcaacctgaaagcacaggattttgtcactgaacaattcggtgtgccgaccgtttccgacatcctcaaagagctgcaaaaacccggccgtgacccgcgtcctgagtttaaaaccgccacctttgccgatggtattgagaccatgaatgatttacgtccgggcatggttctggaaggcgcggtcaccaacgtcaccaatttcggtgcttttgtcgatatcggtgttcatcaggacggactggtgcatatctcctcgctggccaaccgctatgtggaagatccgcataccgtggtcaaagccggggatatcgtcagtgtcaaagtgctggatgtggatatcgcccgtaagcgtatcgcgctgaccatgcggatggatgaagagccggaaacggcagcccgccgtggtggcggcagcagcgataaaccacgggcggaaaaacgccagaacagccgcccggcccgtaacggtaataatgacacctctgccggtaacagtgcgatgggtgatgccctcgccgcggcattcggtaagcgtaagtaa

SEQ ID NO: 276341 - DNA, 486 bp, Morganella morganii
atggcaaaaagtaacctgattacccgtgaaggatgggatgcgctggatcaggagttaaaatatctctggaaaacagaacgtccgcaggtcactcaggcagtgtcagaagccgctgcacagggggatcgctcggaaaacgccgagtatatatacggaaagaaacgtctgcgtgaaatagacagacgcgtccggtttctttcaaaacgtctggataacttaaagatagtcgagccggatccccgccaggaaggaaaagtatttttcggggcgtgggtggaactggaaaatgatgatgaagaaattcagacttttcgcatcgtcggatccgatgaattttccccggcaaagaaatggatttctgttgattcccctgtggcccgggcattaatcggaaaacaggcggatgatgaagtaacggtaataacacctgacggtgaagtgaattatgtcattttgtctatccgctatcagccgattgctgaatag

SEQ ID NO: 276342 - DNA, 720 bp, Morganella morganii
atgcaggaaagttataaggtccttgtcgttgatgatgacatgcgtctgcgtgcgctgcttgagcgctatctgagtgagcagggtttccaggtccgtaccgccgcgaatgcggaacagatggatcgcctgctgacgcgtgaatctatccatcttattgtcctggatctgatgttaccgggcgaagacgggctgtctatctgccgccgtctgagaagccagaataacccgattccgatcattatggtgacggcgaaaggggaagaagtggatcgcatcgtcgggctggaaattggtgcggatgattatattccgaagccgtttaacccgcgcgaactgctggcgcgtatccgtgcggtgctgcgccgtcaggcgaatgaactgccgggtgcaccatcccaggatgatgcggtgattcagttcggtaagttcaaactgaacctcggcacccgtgagatgttccacgaagatgaaaacatgccgctgaccagcggtgagttcgccgtgctgaaagtgctggtgtcacacccgcgcgaaccgctgtcccgcgataagctgatgagcctggcgcgtggccgtgagtacagtgcgatggaacgttcaatcgatgtgcagatttcccgtctgcgccgcatgattgaggaagatccgacacatccgcgttatatccagaccgtatggggactgggttacgtgttcgttccggacggcaacaaggcatga

SEQ ID NO: 276343 - DNA, 1335 bp, Morganella morganii
atgaagcggctgcggttctcgccgaggagcaccttttcgcgttcgttatttctggtcatctttctgttgtttgcaaccataacaacaagttatctggccgttgtgaatttcattgtgatgcccagcctgcagcagtttaaccgggtgctggcctatgaagtgcgcacactgatgagcgaagagatggtgctgaaggacggaaccgcggtacgtgtttctccggcgctgcgtaagaaaatttatgaagagctgggcattaccttttttaccgaagagacagccgatgagggcggactgcgctgggcgcgtcattttgaatccctcagtaaacagatgagccattatctggacggttatgcggatgtccggctggaagtcagccgtgattatcccgtgctgtggctgaactcctatattgccccggatgtctgggtgagagtgccgctgaccgaaatcggtcaggatcagttctcgccggtcttccgttatatttttgcctttctgctgattgtctttgcaggtgtctgggtatttatccgctatcagaaccgtccgctgaccgagctggaatccgcagcccggcagatcggcaccggcggcccgctggttccggtacgggaagccggggcggcagaagtgcgatcagttatccgctcgtttaaccagatgtccagagatatcaaaacgctggagcaggatcgcactgtgctgatggccggtgtcagccatgatctgcgcacgccgctgacccgcatccgcctggcaacggaaatgatgaacccggatgacgattatctggcggaatccatcaacaatgatattgaagagtgtgatggtatcattgagcagtttatggcgtatctgcgcaccggccgtgagatggagatgatgcatctggaactgacatccgtcctcaatgaggtgattgaagcgcacatccactcggatgtcacacttcagaatgatgttattcaggcgccggtttatctcaccggtaacccgattgcgattaaacgcgcactgggcaatatgctggttaatgccacccgctacggcaacggctggatccgtgtcagcagcggcagtgatgagcatttcgcctggttccaggtggaagatgacggcaacggtattgacgaggccgatattccggatctgttccagccgtttgtacagggtgaaaaagcgcgcagtaataaaggtaccgggctggggctggcaattctgcgccggattgtggatgcacatgacggcaaaattgatgtcggccgcagtcagcgcggcggattccgtatccgcgtgatgctgccgctgccggatgacagagatgattaa

SEQ ID NO: 276344 - DNA, 1041 bp, Morganella morganii
atgaaaccgatgcgtaccgcagtagccactgttatggcagcgacactttctctctctgcattttctgcatttgccgcgaccagtctgaccggggcgggtgcaacattccctgcgccggtgtatgcgcaatgggctgatacttaccagaaagaaaccggtaacaaagttaactaccaggggattggttcctccggcggtgtgaagcagattgtggccaataccgttgatttcggggcgtcagatgcgccgctgtccgaagataaactggccgcagataatttattccagttcccgaccgtgatcggcggtgtggtgctggccgtcaacctgccgggtctgaagtccggtgaactggtgctcgatggtaaaaccctgggtgatatctacttgggtaaaatcaaaaaatggaatgacccggcgatcaccaaactgaacccgtcagttaagctgccggatcaggatatcgcggttgtccgccgtgcggatggttccggtacctctttcgtcttcaccagctacctgtcaaaagtcagccctgactggaaagagaaggtcggtgcaggctctaccgttaactggccggttggtctgggcggtaaaggtaacgacggtatcgcagcattcgttcagcgtctgccgggttctatcggttacgtggaatatgcctatgccaaacagaataaactggcttacaccaagctgatttctgcggatggtgatgcggtttccccgaccggcgaaagcttcagtaacgcagcacgtaaagccgagtggtcaaaaagcttcgctcaggatctgactaatcagccgggtccgaatgcatggccgattacttccaccaccttcatcctggttcacaccaatcagaaagatgctgccaaaggtcaggaagtactgaaattctttgactgggcatacaagaatggcggtgagcaggcagaaaaactggattacgctgtactgccgaaagaagtcattgaacaggtccgtgcatcatggaaaaccagtgtcaaagacagcagcggcaagccgctgtactga

SEQ ID NO: 276345 - DNA, 957 bp, Morganella morganii
atggccgaactgaaaacggcaatgaaaccaccaggcaaacgcggcgaccaacttttcagtgctctggtaaaactggcagcgctgattacgctattgttacttggcggaattattatttcactgattattgcgtcatggccgagcattgaaaaattcggcttaggtttcttatggaataaagagtggaacccgccggcggaagagtacggggcactggtaccgatttacggcaccatcgtgacctcggttatcgccctgctgattgcggtcccggtgagtttcgggattgcactgttcctgacagaactggcaccgaactggctgcgccgtccgctgggtatcgcgatcgagctgttagccgctattccgagtatcgtttacggcatgtggggactgtttgtctttgccccgctgtttgccacctatttccagcagccggtcggcgaggtgatgtcgagcatcccgattgtcggcgagctgttctccggtccggccttcgggatcgggatcctggcggcgggcgttatcctcgccatcatgattattccgtatattgcctcggtgatgcgtgatgtatttgagcagacgccggtgatgatgaaagaatccgcttacggcatcggctgtaccacctgggaggtgatctggcggattgtgctgccgtacaccaagaacggggtgatcggcggcgtaatgctgggtctgggtcgtgccctgggggagaccatggcggtgacctttatcatcggtaacacctatcagctggacagcttctcgctgtatatgccgggcaacagtattacctcggcgctggcaaacgagttcgcggaagcagaatccgggctgcacactgcggcactgatggagctggggctgattctgtttgtcatcacctttatcgtcctcgctatctccaaatttatggtgatgcgtctgaataagaaagaggggcgctga

SEQ ID NO: 276346 - DNA, 888 bp, Morganella morganii
atggctgaaatgaatattcaacaaccgaaagtggatatcagcgcacggcagaaacgccagttctggcgccgtcagaaaaaccgcgttgctctgtttttatccatgtccacgatggcattcgggctgttctggttaatctggatcctgttctcgaccgtcaccaaagggatggacggcatgtcgctggcgctgttcaccgaaatgacaccgccgccgaataccgaaggcgggggtctggcgaacgctattgtcggttccggcctgctgatcttatgggcgactgttatcgggacaccgctgggtattcttgccgggatttatctggcggaatacggccgcaagtcctggctggcggaagttacccggtttattaatgacattttgttatccgcaccgtcgattgtggtcgggctgtttgtttacaccatcgtggtgatgcagatgcagcacttctccggctgggcgggggtgatttccctggcactgttacagatcccgattgttatccgtaccacggaaaacatgctgcgtctggtgccggacagcctgcgcgaagcggcgtatgccctcggcacaccaaaatggaaaatgatttcagcgattaccctgaaagcctcggtctccgggattatcaccggggtgctgctggcgattgcccgtattgccggggaaacggcgccgctgctctttacctccctctccaaccagttctggagtacggatctgatgcagccgattgccaacctgccggtcaccatcttcaagtttgccatgagcccgtttgcggagtggcagagtctggcctgggcgggtgtcctgctgatcacactgtgtgtgctgttaattaatatcgtggcgcgtgtgctgtttgcgaagaaaaagcactga

SEQ ID NO: 276347 - DNA, 777 bp, Morganella morganii
atgagtaaaattcaaaacgtaaccgaaagcaaaattcaggttcgtgatctgaacttctattacggccagttccacgcgctgaaaaacatttcgctggatatcgccaaaaataaagtcacggcctttatcggcccgtccggttgcgggaaatcgaccctgctgcgtaccttcaataaaatgtacgcgctgtataatgaacagcgggcggagggggagatcctgctggatggcaccaatattctgaccgatacccaggatatcgcgttattacgcgccaaagtcggcatggtgttccagaagccgacgccgttcccgatgtctatttatgacaatattgcctttggtgtccgtttgtttgaaaaactgccgcgcgccgagatggatgagcgggtacagtgggcgctgaccaaagcagctctgtggaacgaaaccaaagataaactgcatcagagtggctacagcctctccggcggtcagcagcagcgtctgtgtattgcccgcggaattgctatccgccctgaggtactgctgctggatgagccgtgttcggcactggatcctatctccaccgggcgtattgaagagcttatcagcgagctgaaatcggaatacaccgtagtgatcgtcacccataacatgcagcaggcggcgcgctgttctgaccacactgcgtttatgtatctgggcgaactgattgaattcagtgatactgataccctgtttaccaccccgggtaagaaacaaaccgaagattacatcaccggtcgttatggctga

SEQ ID NO: 276348 - DNA, 765 bp, Morganella morganii
atggaaaatctgaatcacaataaacatatttccgggcagtttaatgctgaattagagcatatccgcacagaaatgatgacaatgggcgggctggtggaagagcagctcagcaaagcgatcaccgccatgcataaccaggacgaagacctggcgcgtgaggttatcgccggtgacaagcaggtcaacatcatggaagtgatgattgatgaagcctgtgtccgcattattgccaaacgccagccgaccgcgagcgacctgcgtctgattatggcgatctccaaaactatcgccgagctggaacgcatcggggatgtggcggataaaattgccaaaaccgcgctggaaaaattttcacagcagcatcagccgctgctggtcagcctggaatccctcggccgccatgctatccagatgctgcatgatgtgctggatgcctttgcgcgtatggatattcaggaagctatccgtatctaccgtgaagaccagaaagtagaccaggaatatgaggggattgtccgtcagttaatgacctatatgatggaagatccgcgcactatcccgagtgttctgaccgcgctgttctgtgcccgctctatcgagcgtatcggtgaccgctgccagaatatctgtgaatttatcttctactatgtgaagggacaggatttccgccatgtgaaaggggatgatgtggaacgtatcctgctcggcgagcacgtgattgaagtttctgcgggcagcggcagtaacaatggaaagccggcatga

SEQ ID NO: 276349 - DNA, 2289 bp, Morganella morganii
atgaatataaaatatatttctttactgatttgcagcctccttttgtctgaaaatgctatctctgctgttcatatcagaaatgaatcaaatatagtacttgaaaatggtgatacacaaaatgtaaatgccggagaagctgttgcagatactaccattaataatggcggatatcagactgttaccggatcagaggacagctttgcgcatgcggataatacagttatcaatgatggcggtgttcaggatgtatttgctgacggtattgctaccggtacgaaaattaatgacggaggtgagcaaaatatcctgagttcgggtacggctaatgataccgttattgaaaatggcggaacccagcatttatatggcagtgatggtgctattgcacatgcggataacactttgattaatgaaggcggacttcagtcagtttcacataactctctggcaacgggaactaccattaatggcggtgaacaacgggtattcggtgacgctgtggataccactatcaataatggcggataccaaaaggtcaccggtgcaggtcacggggcttattttgcacatgcggataagaccgtaattaatgaaggtgggatccagtatgtcggaaataatggtattgcatcaaatactgtcattaataatcaagggcttcaacaaataactaatggcgggaaatctgtaaatagtgttattaatggtggtgggtatctggaagtctttctcggaggaacggcggataatacggtagttaataatgaagggtggctgattttacatcatggtgcttcagcggcagattcaacgacggtcggtaccggcggtaatatgctgatggagcacggagcttcagcgggcgatattgattcagccggtaatattatcattactgaaggtgacggttctcatattgtcagaatgggtaattttaagaacagcggtttcttgtcagttgatggttctgctattggtaccacaataattgtcgatggtaattacaccggtgctgatggtcatctcaattttaatgcggtattaggtgatgataattcactgacggataaacttgttgttaatggtaatacagcaggtaatacctatgtcagcgtgaataatctcggtggtaaaggtgataaaacgctgaatggtattgagctgatcacggtaaacggggagtctgacggtatttttacccgtgacggccgtattgttgccggtgcttatgattattcactggttcgtggtcaggaggaaaatgctaaaaactggtatcttaccagtgaacagaatacaccggatgatcttgaacaggtccatattacccgtccggaaagtggcagttatatcgctaatatagctgcggctaatgctatgttcgatattagtctgcatgaccaccccggggaaactcaatatacggatgcactgacaggtgaaaagaaagtaatcggtctgtggctgcgtaataccggaaatcataaccgctggcgtgacagtggtaatcagctgaaaaccagaagtaacagttatgccgtacaactcggcggggatatcgcgcaatggagcacagacggtgcagatcgcttatcctggggacttatggccggttacggtcataatcacaataaaacacatgcttcactcaccggttatagttctgagggggatatcaatggttatagcattggtacttatggttcatggttcgcgaatgaggataaatcgggcttatatactgatgtctggctgcaatataattggttccataatcatatacacggacaagggctggcaagtgaatcttataaatccaaaggtgtaactacttcatttgaaacaggttatgttcttccggtaaataagttttcagaggggcataatacctcggaatggtattttcagccccgggcgcggttaacatggatgaatgtgaaagcggataatcacagagaatcaaatggtacttatgtcagcagtgacggagagggtaatattcaaaccagcttagggttacgtacgtatataaagactgaaataaataaaggcgataatattgaaccattcgttgaaatgaactggttacataacacccgtaattacagtgtgaaaatggatgatatccgtatcacccgggcaggtgcaaaaaatattggtgaaattaaactgggtactgagggacagataaactcatatctgaatttatggggagatgttggcgttcaggtgggagatagaggatataataatactatggttatgataggagccaaaattaacctttaa

SEQ ID NO: 276350 - DNA, 690 bp, Morganella morganii
atgcggacaggcattctaatcattctgctcctgtacatgcaggcggtatgcgctggtgttgtcatcaataccacgcgggtaatttttccgggcaatcaggaaaatacagagatccagctgaccaacagcggggaaatgccgtcactggtacaaagctgggtggatgagggggacatcaattcctcgccggaaaccagcagtgccccgtttatggtggtaccgccggtgacgcggttagccgggggcggcggacagcagctgaaaatccgtgttctgaaaaacaatctcccccgcgaccgggaatcggttttttatctcaatgtagtggatatcccggctaagacagctaccaccggtaataccctgcaatttgccctgcggacacggataaagctgttttaccggccggatggcctgccgcagctgccggatgcggtcccggaacagatttctgcctcgttatcaggagaaatgctgatactgaaaaacccggcaccttactatttcacattatccgcgctcgtctccggcggagataatccgccgtcacatatcagcactgtgatgctcgccccttattcagagagccgggtggcatatacagggcaattatctgcaggagagtccgtcacgctgatcagcattaatgataaaggacgcaatgtgcggacagagaaaaaactacattaa

SEQ ID NO: 276351 - DNA, 1077 bp, Morganella morganii
atgaaaacatccgccgctgtattacttttattcctgacggtgataagcagccgggcggcttatgccacctgctctgcaacatccacccagacagcaccggccgtgatactgaatctttccgctgatttgatcggctccaccacaaccgtatcgaaagtatctcagaccaacttcagcggcccgttcacctgtactgccgcgctgccccttttcccgaataccatcggaatcgactctccttttaatggccggacagccacaatcggatttaataacggcgcacaactcgtcaatatcaccctgacggctcagacaacaaagagtgtttccggcctggcagcaggtactcacaacgggacagaactcaataccggtttcacactgcgttttgatctcgtcactacaccaaccggtaactacaccaaagtcccgggtgatacagtgacgattacaccagtcatttttgcctctgatgccaccaccctggggctggtaggctggctggccgcgcttgtcagtaagattttacagtttttactgacactgcaatggccggctgatccgaatgatatgtttttgcagccggtgcagattacctataatccgccggtgaccacctgcacctttaccaatgccgggctgaccgtcaatctgcccctgatgagcatcaatgccgttaaaaccacggataaagccggatacaccccgttccggctcaattttacctgtggcggcctcctcccgggtaacaccgcgtcccgggatattgccatgttcctgtcgtcgtccaatttacagccgtccgataaaaccgtgctgaccaataccgtttccggcggtgcgggcggtgtcggcttcagggtggtgaaagccaataacctcagcagcccggtgcagttttctgacagtgccaatgctcagggcagtgccaccagcattttcactgccgccaaaggcagtgcggtttcaccggctttctctgtcgatctcggcgcgtattactacccctacagtccgggcacagtgacacagggaaaaatgagcagttccgcgactctggttttttcctacaactga

SEQ ID NO: 276352 - DNA, 2511 bp, Morganella morganii
gtgaaaacacaacactgcctgccgattctgattattgccggattatggagctatccccgcgaaggcttcacggaagagttcgataccaccctgctggccggtgaatccgctaaaggggatatttcacgtttatatcaggaaaatacactgccgtccggcgatcaactgatggacgtttatgtcaataacacctggaaaggtcagtttaccgttgaagtaggggagcataataatgccctgaattttcagccggaagatattaataagctcgggctgaatctttctgatgacgcgaaaacattatccgcagagaaacagccggttccggcagatgatctgacttccggactgacttaccacctgaataaaagtacattacggttagatttgtccgtgccgcaaatcggggtaaagaccgccgatgccggttatattgatccggaattatgggatcacgggcagcccgccgttattctcggctataacgttaattactataacgccagacaaaaaaagaataacaaacagagcaatgacagcttttttgccacagtaaactccgggctgaacctcggtgtctggcaattccgcgatgaatcggtttatacctcttattccggcggacacaaaggctggaaaaataacagccgttacctttaccgcccgatcagccgtattttatctgcgctgacactgggggatttttatacgccaccttcgctgttcggcagttttaaattcagaggcgcatcactgggaacggatatgaatatgctgccgccgtccggccagggattcgcaccaatcatccggggtgttgctcagaccaacgccctcgtcagtatttaccagaacggcaatcttatttttcaggaaaacgtaccgccgggtgagtttatgttccgtgatattcagccgaccggcggcagcggcgatttttctgtcattattcaggaagcagacggacggaaagaatcatttaccgtccccttctccgctgtacccgatatgctgaaagagggaatttataattacagtctgaccgccggtcaggcccggctggataatacacactaccgcccggagtttgtgcagggggaattccgttacgggctgaataataccgtgacactgtataccggcgggattgccggaaaagattaccgctctcttttggcgggaagcgcctggaatctgccgttcggtgcgctttctgttgatgtgacacaggcggatgcggactttaaaaccggccgcaaaagcggccagagctaccgtatcgcctacagtaagtttgtcagcaccacctcaaccaacctgactctcgcgacataccgctactccaccgggaatttttacagtttcaccgatgccatctatcagcaggataactaccgggcgtgggatgcttaccgtaatgagcaggaaaacctcaccgataacacaccgcgtcagataccggatctgatgacgatggatgccatgcgcggcgcacgcgctaaaaataccttcaccgtgaatttaaatcagtatctgggcgagaaccggggggtgatttatatctccggcacacaccgggattactggaattccggcggcagtaaccgggaatatcagcttggatattcaaacagttataacgagatcagctataccgtgtctgcatcacgcacccgcaattttgatgataaaaatgaaacccggttttacctgaatgtcagcgtgccgatttctgttttcggtaaaagtgcatcactcagcagcggtatttacgccaccgattcccgttatcagcaggcgaccgtcagcctgagcggcacagccggtaaagatgatttggttaactacacgctgaccggctcaaaccagaacggcggcagtaacctggcgggcgcgaaccttacttaccgcaatccgtacagcaccctgtccggctcattcagtgaggggaacgattaccgtcaggcgggcgccggggcaaaaggaactatcgtcgctatcccgggccacatcgccatgtccggtgacaccggcaatacctataccattattgatgccccgcaggccggtaaccggatggtgaattcggataaagcatccctgacaaacagtgatggtgtggtgctgatgacacaatccgtcccttaccgcgccaattcttacaccctgtcagacacagaaaaaagttcaggtgccgaagtgaccggcaatatcggccaggtcagcccgtataaaggcgcggtcagttatatccgtatggaaaccgatccccgtcagaccttcattctgcaggcggcacgggaaaacggcggcacactgccgttcggcacagaagtgaccgatgagcagcatcagccgctggggtatgtcgggcagtcggggctgctctatctgaaaagcgggcagttgccgtcatcgctgatcataaaactgacggcagacggaaaacagcagtgtgttatccgcaatccggtggtcaccccggataaaaaccacaatatctgccggtaa

SEQ ID NO: 276353 - DNA, 693 bp, Morganella morganii
atgaaacgccgattcttttttctgatgatgcttattttatccgctaatgccgccgccaatatcgtgattaacgggacccggcttatttatcatgaagaaaatgacagtattactgttcagctaaataataacagccagacatcatcattagcccagagctggacggatgacggtgacattaatgccacaccggaaaacagcagttccccgttttatgtttatccgccgattgtcaaaatagacggaatgcagggacagcagcttaaaataaagaaaaataatgaaaaactaccggatgaccgggaaagtgtcttttatctcagtgtgctggatattccggccacgcccgccaataccaaaggaaaaagtgtgttacaggtggccctgcggtcacggataaagctgttttaccgcccagccgggctgacggcaaatccggaaacggttattgataatattcagtggaagctcaacggtgaccatttatccgtcactaataattccccgtatcattttaccattgcggcggtcaatgctaatgacagcagccacacctggctggccgcctccgaaatgattccgccattttctgaaaaacaattgccactgaaaaataaacccgcagcccgtaatgcctcagtgacctatgtggatgattacggtgtgtataagtcgaagaatattaccttctga

SEQ ID NO: 276354 - DNA, 588 bp, Morganella morganii
atgttaaagaaaacgcttattacggcattagtttctgccgcctttttttcaggctcagcgtccgcggtcactgctgcgggcgggattataaacatcacaggtgctatcagtgataccacctgtaccattaacggaggcaacagcgccgacttcgccgtattattagatcctattacagtaacggatgccggggtaaccgcaaataccgtcattaccaaaaatcagaaagcatttaccatgacattctctgattgtgcacccgcttcagtcccgcccggaagtaacctgaaaatacatttcgcgtcccctaacaatatatcgtcaaccggaaactacctgattaacgataccgttaatgaaggggatccgtctgtcgcgaaaaatgtcgggttcagtttatcgtcaacaaccgcaccgtcagtggcactttcactgaatgcggcgtatgacaccggagtgaagggagataaaaccgctccggcatcggatcaggtgacattaattgccagttattacaaaaccaatacctctcctgcaaaagtcgggcctgtacattccaacgtgatttatacagtctcttatttataa

SEQ ID NO: 276355 - DNA, 834 bp, Morganella morganii
atgaaaccgacattatttgttccggctctgcttgccggtttagcattagtaagtggtacagcacaggctgataagcttgatgatattcagaaagccggggtgatccgtatttcggtttttgacagcaacccgccgttcggatttatcgacccgcagaccaaaaaactggccggttatgacgtggatattgcacaggctgttgccgatgacctgggtgtgaagctggaactgcgtccgaccaacccggcaaaccgcattccgctgctggtctccggtaaagtggatttaatcggggcgaacttcaccattaccgatgagcgtgcgaaacaggtggatttttccattcctgattttcagaccggacaaaaatttattgcccgcaaaggcgtgctgaaaaccccggaagatgtggcaaaactgcgtatcggtgcggataaaggcacggttcaggaagtgacgctgcgcgagaaatatccgggcaccaaagtgatttcttatgatgataccccgctggccttcgcggcactgcgtaatggtaacgtcgatgctatcacgcaggatgatgccaaactggtcgggttgctcggtaacctgccggagtcagtaaaagcggagtttgaactctctccgttcagtctgacccgtgaataccaggcgctggcggcgccgaaaggagaaacccgtctggtggaagcggtgaacaaaaccctgctgaaactcgaaagtgagggcaaatcacagcagatttataaccagtggtttggtccgggcaccaaagccgaacaaccgcgcggtgaatttaagttcgctccgctggctgaccagccgaagtaa

SEQ ID NO: 276356 - DNA, 738 bp, Morganella morganii
atgtttgagcaatttataagtgcgcacttacttgcgccggaatatctggaatggctggggcaggggtttgtgatcaccctgcttatctcattctggacgattctcgcggcgacactgctgggttttctgctggtggccgggcgggacagtcagctcgcaccgctccgctggttagtcagtacttacaccagtgtattccgtaatacaccgttgctggtgcagctgtttttctggtatttcgcctccggggaaattctgccgcaggcgctgaaaatctggctgaacacgccgcatgaaattgaactggccgggctgacactcgcatggccgtcatttgaatttatcgccgggtggttcggactgacactctattccgcgccgttcattgcagaagaattacgggcggggattgccgggatcgggcggcagcaaaaatcagccgcgctggcgctcgggctgactccgtggcagtccatgcgttatgtggtgctgccgcaggcggtcagaatcgctatgccgccgctgctcgggcagtatatgaatgtggtgaaaaactcgtccctgaccatggcgatcggggtggctgaactctcttatgcatcacgtcaggtggaaagtcagtccttacaaacctttgaggccttcggggtcgcgacaatcctctatatcgccattattgccgtaatggaagccttcgggcagtggcggacacaacgggcactggcacaggggcattaa

SEQ ID NO: 276357 - DNA, 774 bp, Morganella morganii
atggatttttccgtaattcgtgacaactgggaatacctgttgttcggcactttcccggacggtccgctggaaggtgcggcgctgacgctggtgatcagcctgattgccggagccatttccgtggtactcggaactatcggcggggtgatgctggcaatgctgcgcggctggtgggtaaacctgtttgcggcatttctcgggtttttccgcgctattcccatcattatgctgatattttgggtctatttcctgctgccgattgcctttggtgtggatgtgccggaaatcactacggtcgtctgcgcactggcactggtgacctcggcttatatcgcccacggtgtgaaggccggtattctggctatcggcaaagggcagtggcaggcagggatgtctctcggcttcagccggtgggaagtgctgtggcatatcgtgttgccgcaggcgctgcggatgatgatcccatcctttattaatcagtggattgcgctgattaaagacacctcgctggcctatatcgtcggtgtgggggaactgtcgttcctcgcgtctcaggtcaataaccgcagtatggtctacccgacagagattttcctgtttgtcgcttttatctattttgtgatgtgttccgggctggaactgggtgcgaatgccctgatgcgccgttattcattacagcggcagccccgtcagtcatggcttgcccgtctgttcggccgcggcagggagaaaccggtacagttgtcagaaaaaccggccgcctgtacatcataa

SEQ ID NO: 276358 - DNA, 1335 bp, Morganella morganii
atgactactccgacttccggcactgatcctcatcagggcctgctccagcgcgtgttcaaattacaggaacacggtaccactgtccgcacagaaattattgccgggctgaccaccttcctcaccatggtgtatatcatctttgtaaacccgcagatcctctctttcgccgggatggatatcaaagcggtgtttgtcaccacctgtctgattgctgccatcggcagtatcggaatggggctatttgctaacctgccggtggcggttgcaccggcaatggggctgaatgcctttttcgcctttgtggtggtgggtgcgatgcactactcctgggaagtggcgatgggcgcaattttctggggcgcagtcggactgtttatcctgaccttactgcgcatccgttactggctgattgctcatatcccgctgagtctgcgggtcggtatcaccagtggtatcgggctgtttatcgccatgatggggctgaaaaacgccggtattattgtgccgaacccggatactctggtaactatcggtaagtttaccgatcacagtgtggttctgggtgcactgggtttctttattatcgctattctggctgcgcgcaatatccacgctgcagtgctggtatcgattgtggtgacaacctccatcgggcttttcctcggggatgtgacctacaagggcgtgtttgatgtgccgccggggatcacctcggttgtcggccatgtcgatattatgggcgcgctggatttatccctcgccgggattatcttctcgtttatgctggtgaacctgtttgactcctccggcaccctgatcggcgtaacagacaaagccgggctggcggatgaaaaaggccgtttcccgaacatgaaaaaagcgctgtatgtggacagtatcagctccgttgccggttctgcgatggggacatcctctgttaccgcatttattgaaagtacctccggggtttctgtcggcgggcgtaccggcctgacagctatcgtggtcggcctgctgttcctcgcggctatctttatttcacctctggcatcaatggtgccggcctatgccactgccggagcactgatttatgtcggtgtgctgatgacctccagcctggtgcgggtaaactggaatgatctgaccgaatctgttccggcgtttgtgactgccgtgatgatgccgttcagtttctctatcactgaagggattgcattagggtttatcgcttactgcgcaatgaagctgggtaccggccgctggcgtgagctgaacctgtgtgtggtggtggtatcactgctgtttattcttaaaatggtatttgtggacgcctga

SEQ ID NO: 276359 - DNA, 645 bp, Morganella morganii
atgacgtcccaaaatcccctgattcaggtcagcaatctggttgtcagccgcaacaatgcgccgataattcaggatctgagctttgaactgaacgccggagaacggctttttctgtgcggtgatatcggcagcgggaaatcaacactgctgcacacactgttaggttttatcccgttcaccggggatatttcggttttcggtaaatcccgtctttccgaagatgatttcacagaggtgcgcggcccgctgggattgctgtttcagcatccggatgatcaactgttcggcccgggtgtgctggatgatgtgatgtttggtccgctgaatatggggatgacacaggatgcggcgcgggaacgcgctttacagtgtctggagatgctggatattgtccggctgaaagaccgcgctgtgactgagatttccggcggagagaaaaacttcaccgcactggccggtgtgctggcaatgtcaccgtctgttctgctgctcgatgagccgaccaacggcctcaatgagaaaaatattcagcgtctggaagatattcttacacagctggatctgccgatgattgtggcctcgcataatcagcagtttacacagcggatggcgcaccgtgtgatcccgttcccctgccactcctga

SEQ ID NO: 276360 - DNA, 633 bp, Morganella morganii
atgcatttatctgaaggcgtattacatcttcctgttctggccggtgccggtgtggtggctgcggccggggttgccatcggcatccgtcagctggatacctcgcgtctgtcgctggcagccctgttcggggcggcattctttgttgccggtaccatccatgtgccgatcggggtcagcagtgtgcatctgatcttaaacggacttgccggattgttcctcggctgggcggtttttccggcattcctgattgccctcgcgctgcaggtgctgtttttctccttcggcggcttcgcggttctcggggttaacctgtgtaatatctctatcccggcgctgctggtctattacctgttccgtaactccctgcgtcctgggctgagtcaggggcgtctggtttatctcggggtaatggccggggttatcggtacgctgggtacggtgtgtctgacctcgctggcactggtgctcgacagcggtaagtcttatatcgatctggtctggctgctgtttatcggacacctgccgatttttgtcaccgactccctgatcagtgtggggatcctgctggcgctggccaaaatgcgtccggcttccctgatggtcaatcagcccggacagcatacctatggataa

SEQ ID NO: 276361 - DNA, 513 bp, Morganella morganii
atgaaatctgtttatttatttgccattttactgattaacggggtgctgttggcaacaacagcacaagctcactccatgcatgtggttgcacagctggaagggaatgtgatcagcggccagtcttattattctgatatgtctccggcaaaagatacttatgtcggtacgtatctgaaaggccatgaagatgatgaaatatccggtaagaccgatgaaaaagggtattttaaaatcgaagtcccggcgaccggtgattatattctctatgttgagggtgatgaagggcacaaagtggaaacggaagttccggttatttccgctgcagccaacaccggcagcagtgattcgtcttccggctatattcagatccgccaggatattgaccagctgaagaataaaatctatctgcagaatattctcggtggtgtgggctatatcgtgggtattttcggtgtgattgcgttcttccgtgcccgtgaattaacaaagcaggccgctaaaaacgccgcataa

SEQ ID NO: 276362 - DNA, 690 bp, Morganella morganii
atgtctctgaagaaaatgacgttaatttcagccgccctgttatttggtagttttcaggcaaatgcacacaatgtttggattgaacaaactgacggctctgattatgttgtccgttttggtcataatccgacagaaaaatatccggaaaataaattaaaaccggttcaggctgtaatgcatgacggtaaagtggaaaccgtcagtaccacctttaaagatggcgaagcttactttgtcatgcctgagaatgcgtcaattatattattaggttacgacaacggtgtctggagtaaattaaagaatggccgcaccgttgagaaaaataaaattgaagtaccggatgcagagttcagtaagaacccgattaaattcagcaaaaatatcgttaagtgggatgacaatgccacaaaagtcttcaataccccgtatgagctggtaccgatgaccaaaccggtggccggtcaggagtttgagatcaaagccctgaaagatggtcagccactggaaggcatgaaaatcgccaaaagcgaagaagacccgggtgtgctgaccaacaaagacggcctggcaaaattcaaagctgaaaaaggtgccaataaagtttacgccgaatacaaactggatacaccggataataaagagtacgggttccagcagctggaatatgttttatcttttgacgctgagtaa

SEQ ID NO: 276363 - DNA, 1101 bp, Morganella morganii
atgcataacacgttacctattgaaaattatgaagaacaacttgcggagaaggtaagaagtctgcaaacaatgatgcagccttttcaggcaccggatgctcacgtatttgcgtcaccagtttcacactaccggatgcgcgccgaattccgtatctggcatgaaggggatgacctctggcatatcatgtttgatcagcagaccaaacagcgtatccggattgatacctttccggccgcgagccagctgattaatgacatgatgcaggccattttgccgttactgaaacagactcatctgctgcgtcataaactttttcagattgattatctgtcgacacgcagcaacaaaattattgtctccctgctctatcataaaaaactcgatgacagctggacagaagccgccaaattattgcgggcacaactgcagtcacagggttttgatttacagctgattggccgtgcctctaaaacaaaaatcatgctggataatgattatgttgatgaagttttaccggtcgcaggtaaagagatgatttaccgccaggttgaaaacagcttcacgcagccgaatgctgcggtcaatattcatatgctggagtgggcacttgccgcgacagaaggttcacagggcgatttgctggagctgtattgcggtaacggtaatttttcactggcgctggcgcgtaatttccgccgcgtgctggcaaccgaaatcgccaaaccgtcagtggctgccgcgcaatataatattgatgctaaccatatcgataatgtgcagattatccgtatgtccgcagaagatttcacacaggcaatgcagggcgcacgtgaatttaaccgcctggcgggaattgatctgtcctcttatgaatgcaataccatttttgtcgatccgccgcgcagcgggctggatgcggaaaccgtcaaactggttcagggctacgagcggattctctatatttcctgtaatccggaaacattatgtgaaaatctggaaacactgaaccagacacatgatgtcgtgcggctggcgctgtttgatcagtttccgtacaccccgcacatggaaagcggcgttttgttgatccggcgcggataa

SEQ ID NO: 276364 - DNA, 1881 bp, Morganella morganii
atgacctcgccttatgcgctgtccgctgtcggactggccgtgttttccgcgttatcgtttaacgcttctgctaatactaatgatgatcagataattgtttctgctaaccgattccagcagccggtttcgtccgttttggcgccggtaaccgttgtgacccgtgaagagatagataagtggcagtcgaattctgttgtcgatattctgcgccggttaccgggggttgatgtgacacagagcggcggtctgggtcagaacagtacagtatcggttcgcgggacagatgcaaaacatttactggtattgatagatggtatccgtctgaataatgccggtatttccggccagccggatctgaatcagttcccggtggcacttgtacagcgggtcgagtatatccgtggtgcacgttctgctgtatatggttcggatgccatcggtggtgtgctgaatataattactatccgcgatgatatcggctcaaatatcacagcgggtattggttcacacggctatcagaattataccggaaccactcagcagcagattggtgaaaatacccgtgtgacagccgcagcggcgtatacctattctaaaggatttgatatccgccgtgattatgacggttacgccacaccaagcggccgtgactatggctttatgaataaaacctactggctggatgtgcaccataaactggatgatcggtttgcagtgtacggacgtgcatatggttatgataaccgtagtaaatatttcggatttaaatctgagatgtggtcgttacccgctgatccggcaagtgatcgccgtgagttagaaaaccggacatatgatgcgggtctcacatttaatcagggggattattcttctcagctgatcatgagctacagccgggttaaagactataactatgataaccgttatggtcgctatggtgatggcgcaaccctggacaattcaaaacagtattctgcacagtggggtaacaattaccgtgtcggatatggcagcatcaatgccggtattgattatcagaaacaggaaatggaacccggcaccgcaatgatagccgacagtaaatctatttctgataccggtttatatctgaccgggcagcaggaaatagataaggttattcttgaggccgccatccggtctgaccatcattcagaatttaactggcataccacctggcaaaccagtgccggatgggagtttgttgatggttaccgggttatcggttcttatgcaacagggtttaaagcaccgacgctggggcagttatatgctaatacgacatttgactggggaactatcgttggtaataaggatttaaaaccggaagagagtgaacaatgggaattagggctggaaggaaataccgggccgctttcctggcaactgaccggctaccataatgatattaagaacctgattgactatgaaatgggttcaccgaatacctatatcaaccgcagtaaagccaaaatcaaaggtgtcgagtgggtaggggaatttgatacctggattttccatcatcagatgacttatcaatacctggatgcaaaagacaaagagactaataagcgtctggcgcgccgtgcacagcagcaggttaaatatcagctggactggacggtggccgatgttgatatggggctgacctatcagtatatcggtaaacgttatgatgatgcggcgaataagcaaaaactcggtggagtcagtatttttgatatcacagctgcatatccgatcactgaccacctgacaattcgtggtaaagtagctaacctgtttgataaagactacgagactgcgtatggctatcgaaccgctggccgcgaatacttcctcacaggaagctacaacttctga

SEQ ID NO: 276365 - DNA, 867 bp, Morganella morganii
atggctatcgaaccgctggccgcgaatacttcctcacaggaagctacaacttctgatccgaaaacccgcccgacagtgctgctgtttgactccggcatgggcggtttatctgtctatcaggaagtaagaaaattacttcctgatctccactatatatatgcattcgataatgaggcgtttccttacggtgaaaaaaccgaagcctttattgtcgaacgtgtgacgaagattgtccgtcagattgctcagcagcatccgctggcagtgattgtcattgcctgtaataccgcaagcaccattacgctgcctgcactgcgtgcaatgtctgatattccggtggtcggcgtggttccggcgattaaaccggcagcgaaactgacacgcaacggcctggtcgggctgttggcaacgcgggcaacggtaaaacgggcttacacccgggaactgattgaccggtttgcttctgagtgtcaggtatcactattaggatcggcagaactggttgaactcgcggaacgcaagctgtacggcgaggcgattccggcaggtgccctggaaactatccttgcgccgtggcggaatatgaaagagccgcctgacacagtagttctgggatgtactcacttcccgctgattgccgaagaattaaaatcggcattaccggatggtacccggctggtggattccggggcggcgattgcccgccgcgtgcagtggttaatcaataacagtgagaaacctcattacttaaccgctgaaaaaaacgtggcgtattgcatgcgggatgatgaaacgacacagaaattactgcctgttttgcagcaatttggactcgaatcgctgaaaaaactgacgattacaggatga

SEQ ID NO: 276366 - DNA, 687 bp, Morganella morganii
atgcagttttcagaacaactcaatgcgtcacaaaagaacctgtcttatcttctggctgaaaaactgggacagcagattttatccggcaagtatccgccggagtctattctgccgggagagattgagttggcggagcagttcggggtaagcagaaccgctgtccgtgaggcagtaaaaatgctggcggcgaaaggaatggttttaccgcgcccgcgcatcggcacccgggtaatgccggtgataagctggaattttctcgaccatgactttattaagtggtggctgagcagcggagaccaccggcaggtactgacgtatttccgcgagctgcgcgccgcgattgaaccccaggcttgcgcactggccgccatgaatgccggaaaagatcagaagcagtcactctcgtttctgttaaaagagatgaccttattatccgcccattttgagcgggataaatggataaccgttgatcaccgcttccaccaccttatttatcaggcgtgcggaaatccgttcttttcctctttcgctaatttattcgattttgtgtatcacaacttttttgaatccatcaccactaatcaggttattgagattgatctccacaaagaaattgtggatgccattatcgacgggaacggagaacgtgcccgtcaggcatgtcaggtgttgttgagtaaagtgtga

SEQ ID NO: 276367 - DNA, 1416 bp, Morganella morganii
atgtttaaaacagcccggaatatggcgggcctgccgtggattgccgcaatggcgttctttatgcaggcgcttgatgccaccattctgaacaccgctctgccggatatagcaagaagcctgaaccactctccgctggcgatgcagtccgctgttatcagttacacactgacagtggcgctgctgatcccggtcagcggctggctggccgaccgcttcggtacccgcagggtgtttattatcgcggtgattctgttttctctcggttctttattatgtgccttttcacctaacctgccgtttctggtggtgtcacggattattcaggggataggcggagcaatgatgatgccggtggcccggctggcactgctgcgggcttatccgcgcagcgagctgctgccgattctcaactttgtcaccattccgggattggtcggcccggtgctggggccgctgctcggcgggatcctggtgacttatgccacctggcactggatttttatcattaatatacctatcgggattctggggattatttacgccatccgccatatgcctgatttcaccatgccgaaacgccgctttgatacactcggttttgccctgctcggtgccgggctggtctctgtttctgtcagtctggatctgttcggggataatgctctggcagcggcaacgccgttcctggtgatgggcagcggttttgcgctgctgaccttctatgccctgcacgcccgccgtatttctgcgccgattattccgctgagtctgttccgcacacggacattcagtgtcgggatcgccggtaacgttgccacgcgcctcggcaccggctgtattccgtttctgatgccgctgatgttacaggttggttttggttatcccgctgtggtggcagggatgatgatggcaccgacggcgatcggctctattctggcaaaatcggcggtcacgcagattctgcgccgctacggttatcgtctgacattatttgcaatcacactggtgatcggcgcaatcatttcttctttctatttccagtcaccgggaatgtcgatttacatgctggtgctgccgctgtttattctcggcatggcgatgtccacccagttcaccgcgatgaataccattaccctcgcagatctgactgagcacaatgccagttccggtaacagtgtgctggctgtgacccagcagctttccatcagtttcgggattgcggtgagtgcgtctgtattacgctattttgagtctcaggattgggggtcaatcgttgataatttccacgcgacctttgtaacggtcggggtgatgacaattctgtcggcgtttgtgttcctgttcctgagccggactgacgggcggaatatgattaagaagaaaacccgcccttcagacagcccggcctcacattaa

SEQ ID NO: 276368 - DNA, 993 bp, Morganella morganii
atgaaagatgtggcacggctggcgggggtatccacctcgacagtctcccatgtcatcaacaataaccgttttgtcagtgacggtgtgcgcaagaaagtaaatgatgctattgccgagctgaattacgcgccgtctgcacttgcgcgcagcctgaaaatgaaccgcacaaacaccatcgggatgctggtgaccaccagtaataacccgttttatgcggaagttgtccgcggcgtggagcgcagttgctacgagcgcggctacagcctgatcctctgtaataccgaaggggatcacaaacggatgaacagcagcctggaaaccctgctgcaaaagcgggtggatggtctgctgctgatgtgtaccgagataaaaggcccgtcagcggaggtgttcagccgctatccccgtctgccgatggtgatgatggactggtcgccgtttgcattcggcggggatgtgattcaggacaactctttcctcggcggtgaaatcgccaccaatcatctgatcgaaaacggttttacccggattgcctgtattgccggaccgctggataaatcgccggcgaaatcccgtctggacggtttttaccgcgcaatggcgcaggccgggctggatgtgccgccggagtatgtactggaaagtgattttgaattcagcggtggtttcagtgccatgaatcagctgctttcactgccggtgccgccgcaggcggtatttgccggtaacgatgcgatggcggtcggtgcttatcaggcgatctggcagaaagggttgcgtatcccgcaggatattgcggttatcggttatgatgatattgacctggctgcatttctcaccccgccgctgaccacaattcaccaaccgaaagatgaactgggcaaactggcggtggataagctgctgcgccgtatggatgacgcagacgcgccttctgatttgctggtgctgaccccggcactgataaaccggggctctgttatctgcggttaa

SEQ ID NO: 276369 - DNA, 927 bp, Morganella morganii
atgacaacatcccgtctgaccgttctcggcagtattaatgtcgatcatattatgaatattgcacagttcccggcacccggtgaaacggtgatcggtaagcaatatcagacagccttcggcggcaaaggcgctaaccaggcggtggcctgcgggcgcagcggtgctgatattacctttattgcctgtgtgggggatgatgccatcggcgcggaaatcctggcgcagctgcagcgcgaccgtattcacaccgccgcagtcagcgtggtgccggaagcggccaccggcgtggcgatgatctttgttaatgaagacggtgaaaacgtcatcggcatcagtgccggtgccaatgccgcgctgacaccggaacattttgcgccttataaagggcttgttgaacaatctgatgccctgctgatgcagctggagtccccgctggaaacggtgattgccgctgcacaggctgcgaaaaatcatcagaccagagtgatcctcaatccggccccggcgcgggagttaccggacagcctgctgaagctggtggatgttatcaccccgaatgaaaccgaagcggaaaagctgaccggtatttctgtcagtgatgaaaccggcgcagccagagcggcgcaggtactgcatgataaaggtatcggacaggtactgatcaccctgggcagccgcggtgtctggctgagcgtcaacggtgagggccgccggatccccggctttaaagttaatgcggtggacactattgcagccggcgatacctttaacggcgcgtatgtcacggcgctgctggaaggaaaaccggcagatgaagcggtgcgttttgcccatgccgccgccgcgattgctgtcacccgccggggtgcacagccatcggtgccgtggcgccgtgaaatagatgctttccttgcggagcgtggttaa

SEQ ID NO: 276370 - DNA, 891 bp, Morganella morganii
atgaaactgaaaaagattgcgacccttttctccgttgttgcactgagcgccactatcagcgccaatgcactggcaaaagagtccattgccctggttatctccacactgaataacccgttctttgtcaccatgaaagacagtgcacagaaagaagcggataaactcggttacgacctggtggttctggattccatggataacccggcgaaagaactggctaacgtgcaggatctgaccgtgaaaggcaccaaactgatgctgattaacccgacagactctgatgcggtcggtaacgccgtgatcctggccaacaaagctaatatcccggttatcaccctggaccgtgttgccaataaaggtgaagtggtcagccacgttgcctctgataacgttctcggcggcaaactggccggtgattatattgcccgtaaaaccggcgcggatgccaaagttatccagctggaaggcatcaccgggacttcagcttcccgtgagcgcggcgaaggtttcaaacaggcggttgctgagcataaaatgaatgtgctggccagccagccggctgatttcgaccgtaccaaaggtctgaacgtcatgcagaacctgctgactgcacatccgactgttcaggcagtatttgcccagaacgatgaaatggcattaggtgcgcagcgtgcattgcagactgcaggccgtgatgatgtgctggtggtcggcttcgacggtacagctgacggtatcaaagctgtgaaaggcggtaaactgggtgcaaccgtggcacagcgtcctgaccagatcggtatcattggtattcagacagctgataaagtcctgaaaggcgaaaaaatcgacaaaaccattccggttgagttagaactgattgtaaaagactaa

SEQ ID NO: 276371 - DNA, 972 bp, Morganella morganii
atgcgtacagattcaaccccggcgtcaaaacgctggttttccaaagaatggctgcttgagcagaaatcactgatcgcgctgctgatcctgattgtgattgtctccatgatcagcccgaacttttttaccctgaataacctgttcaatattctccagcagacctctgttaacgccattatggcggtggggatgacactggtgatcctgacctccgggattgacctgtctgtcggttctctgctggcactgaccggtgcggtggcggcctccatggtgggtgcggatgttaacgccattgttgctgtcgcaggtgcgctggcactgggggcggctatcggcggtgtgaccggggtgattgtcgcgaaagggaaagtgcaggcttttatcgccacgctggtgatgatgctgttactgcgcggtgtgacccgtgtgtataccgacggcagcccgatcagcaccggattcagtgataacgccgatgtattcagctggtttggtatcggccgtctgtttggtattccggcaccggtctggctgatgattgtcgttttcgcggcggcctggtatctgctgcaccacacccgcctgggccgttatatctatgcgctgggcggtaatgaatccgccacccgcctgtccggtattaatgtcgataaaatcaaaatcattgtttacgccctctgtggtctgctggcggcattagccagtgtgattgaagtggcgcgtttatcgtccgcacagccgatggccggtaacggttatgagctggatgcgattgcggcggtggtactcggcggcaccagtctcgccgggggtaaaggccgtattatgggcaccctgatcggggcgctgattttaggttttctgaacaacgcgctgaatctgctggggatctcctccaactaccagatgattgttaaagcggttgtgattttgctggctgtactcgttgataacaaaagcagtaaataa

SEQ ID NO: 276372 - DNA, 1506 bp, Morganella morganii
atggaaccgttacttgaactcaaaggtatcgataaagctttcccgggtgtgaaagccttatccggtgccgccctgcgggtttatcccggcagagtgatggcgctggtcggagagaacggcgccggcaaatccaccatgatgaaagtgctgaccgggatctataaaaaagacgccggtcagattctgtttctggggcaggagcgtcagtttacggggccgaagtcgtcgcaggaagccggtatcgggattattcatcaggaactgaacctgatcccggaactgacgattgcagaaaacattttcctcggccgcgagtttaccggccgtttcggtaacattgactggaaaaaaatgtatgccgaggcggataaattactggcccgtctgaatctcacttacagcagtcaccggctggtggcggaactgtccatcggcgatcagcagatggtggaaatcgccaaggtgctcagttttgagtcgaaagtcatcattatggatgaaccgacagatgcactgacagacaccgaaaccgaatcgctcttcagtgtgatccgcgagctgcgtgagcagggttgcgggattgtctatatctctcaccgtctgaaagagatttttgagatttgtgatgacgtgacggtgtttcgcgacggccagtttatcggtgaaaaaccggtatctgacctaacagaggatagcctgattgaaatgatggtcgggcgtaagctggaagatcagtatccgcgtctgactctgccgcgcggcaaagagaagctggtggtaaaaaacctgtgcggccgcgatgtgcatgatgtcagtttcacgttgcatgagaatgaaattctaggcgtttccgggctgatgggcgccgggcgtaccgaactgatgaaaatcatttacggcgcaatggcaaaaaccggcggaacggttgaaatggacggcaaagcctgccagataaactcgccgaaagccgggcttgataacggcatcgtgtatatctcagaagaccgtaaacgcgatggtctggtgctggggatgtcagtaaaagagaacatgtctctgacggcgctgccgtatttcagcagtaaaaccggatgccttaatcataaagaagagcatctgactgtcagtgattttattcagctgttcaatatcaaaaccccgggcatggatcagataatcgggttcttatccggcggtaatcagcagaaagtggcaattgcacgcggtctgatgacgcggccgaaagtcctgatcctcgatgaaccgacacgcggtgtggatgtcggggcgaagaaagagatttatcagctgatcaacaaatttaaacaggaaggcctgagtatcatccttatttcatcggaaatgccggaagtaatggggatgagtgaccggattctggtcatgcacgaaggacggataagcggggagtttgccgcggaaaacgtcactcaggaagcattaatggccgccgcagtcggcaaacaatatggcgcagggcaggagtaa

SEQ ID NO: 276373 - DNA, 420 bp, Morganella morganii
atgaagaaaggggctttactgaacggtgatgtctccgcggttatcgcgcgtctgggtcataccgaccatattactgttgctgatgccgggctgccaatcccgcccgccacgccacgtattgatctggcgttaactcagggtgtgcctgattttatgtcggtgtttaaagtcatcacgcaggagatgcaggtggaagccgcactgatggcggaagacatccagacacataacagtgagctgcacgatgccatcgtggcacatctgaaagcgctggaattacagcagggtaatgtgattcagattcagtatgtgactcacgcctctttcaagttacagacacaaaacagccgtgccgtgatccggaccggtgagtgcacaccgtttgccaatgtgatgctgttctccggcgttacattctga

SEQ ID NO: 276374 - DNA, 576 bp, Morganella morganii
atgatgaaaaaaacggcatttgccggcatacttttctgtttactgacttctcaggcgtttgctcacggctatatcactgaaccggcctcacgggcagcaaattgccgtgacggtaaaaatcccgctgcaatgtgtggctccgcccaatgggaaccacaaagtattgaaacattctccggatttccggacggaaaattcccgccggacggccggcttgccagcggtggtattgagcgttttctgccactcgatacccccggtgataactggcatcagataacggtaaaaccgggaaccgccatgttcacctggaaaataacagccgcccacaaaacccgtaactggcgttactacatcaccaggccggactggcagccgggagccccgctgacccgggcatcatttgaacccgaaccattctgtagttatgacgataaaaatcaggttccgccgcagacagtgacacatcagtgcaccattccggaacggagcggctatcaggttatttacggtgtatgggaaatcgcggataccgccaacagtttctatcaggtgattgatgtccggtttgactga

SEQ ID NO: 276375 - DNA, 1527 bp, Morganella morganii
atgcaacgttctgaacgtatcgcccggctgagccgccacctggaatccgggctgtatgaacgacagcacgccatccggctctgcttactggccaccctcagcggggaaagtgtttttctgctcggcccgccgggaattgccaaaagcatgatcgcacgacgcatgaaactgattttcagtgacgcccgtgcttttgagtatctgatgacccgcttctccaccccggaggagatcttcggtccgctctccattgcggccctgaaagatgaagggaaataccagcgcatcacgcagggatacctgccggatgcggaaatcgtgtttctcgacgaaatctggaaagcgggtcccgctatcctcaacaccctgctgactgcgattaacgaacgtaaataccgcaacggcgacagcgaaagccctattccgatgcggctgctggtggccgcctccaacgaactgccggacaacgacagcagcctggaagcactctatgaccggatgctgatccgcttatggctggataagttacaggagaaacagagcttccgcgctatgcttatcagcacaccgggagcatcggatgaacagatccccgcgcatctgcaggtaaccgatgaggaatatcatcagtggcaggaagaaattgaccgtgttgtgctgaccgatcagatatttgaactgatttatcagctgcgtcagcagattgagcggctggataacgcgccgtatatctcagaccggcgctggaaaaaggcactgcggctgttacaggccagtgcgtttttcaacgaccacagcagtatcacgcctcttgacctgatcttgctgaaagattgcctgtggcatgattccgcctcactgaaatccgttccgcaactgctgacacaactgatgtgtgaacaggcctatcagcagcgcagcctgttactgaaactggaaaaatattatcaggaatggatcctggaaacgcagactcagcaacagcgggatgccttcagtgtgatccgcagcagtgcccgtttcggacgcaaagtcagttacgctctgccggatacgctgccgcccggcccggtcaccctctttttacataacccgctgacattacatgatatgactgtcactcatgtgactattgaacgtagtgcttttgataccttctttgataaaggcgtctttgataaaggagggaacattgcggcaaaactcaacggtatcggctttacccagtctgtttccgccgccgtgaatgataacggccttctggaactgcgtgatgtcagtctgcgcagcagcaccctgttcccggcgggtaccgaaagccggatgacagaggcgcagaagcaaatctggctggataaactttcggtgatacgccagacactggtacagcagcgccagctgtttgcacagcatcagcccgccctgtttgtcagtgatgactggatagcgcagatagaggaaagctttctgccggtggcagaacgcctcgataaactgactcagcaaatgagcagcactccgtgttaa

SEQ ID NO: 276376 - DNA, 1455 bp, Morganella morganii
gtgttaagtctttcagcactggatctggcgctggcagttaatgaaggggaactcattgaggagatcctgctgacactgctggccgctccgcaactggcctggttttttgaaaagcatccgcggttacgccgtgcggtgctgactgatatgccgtcatggcggaaatcgctggaagaacgggtgaaagaggcgctggttccggccgccctggcagatgagttccgtctttaccagaaaagcaccgctgcagacaggacagaattttaccgcctgctgccggagatcctcaaagcgctggaggatataaactcgccgttctcgccggaagcacaccgcctgcacagagatgagcaggaaaccacctcccatcagatattattcaatcagcgctggcgtctcagcctgattttacaggtcaccacctatcacaaagagattctggagcaggaaaaagaacagctcctcgccgaacttcagcaacacctggcgctgagcggtaatcttgatccgctgatcagtgaaaatgagcaggcttccggtaagttatgggatctggcgaaaggatcactgaaatcccccggcccgtcggacgatctcctgcttcgttacagcgagtttttaaaatcccagccggaactggaaaaactggcctcactgctggggcgcagccagacggcaaaatccgttcctcaggacagtgcagtgacagagccggtcaccattaccgaactggtgccggatcagaccccggaagaagtcagcggggtcgggctgagtgatgatgtgctgcgtcttctgcccgccgagttggcgttactcggtatcagcggtctggagctggaattttaccggaagctggccgagaaacagttatacacctaccggttacagggcgatcactggcaggagcggcaggtgatgcggccgatcgttcatcataaagatgaaaagcagccgcgcggtcccttcattatctgtatcgatacttccggctcgatgggcggttttaatgagcgctgcgccaaagcattttgtctcgcgctggtcaaaatcgctatggccgataaccggcagtgccatgtcatgctcttttccactgaacaggtgcattatgattttctcggcccggacggcatcgagcagatgacccgctttctgcttcagagttttaaaggtggaacagacctggcgtcctgtctgacagaagcggcaaaacggctggaaacgccgcagtggcgtgatgcggatgtggtggtaatgtctgactttattgcccagcggctgccggatgaggtggtgaagcaggtaaaacgttcgcagcagcagggaaaacaccgcttccatgcggtagccctgtcccattacggaaagcccggtatcatgcggatttttgatcacatctggcgttttgataccggcttaaaaaatcgtctgttgcgccgtttcaggcggtga

SEQ ID NO: 276377 - DNA, 993 bp, Morganella morganii
atggaaaaatcattcatccgacagcagcagcaaatcagcttcgtgaagtcttacttctcacgtctgctggaaaaacaactgggccttattgaagtccaggggccaatcttaagccgcgtgggtgatggtactcaggataatttatccggcagcgagaaagcggttcaggtgaaagttaaatcattgccgggctcaacctttgaagtcgtgcattcactggctaaatggaaacgcaaaaccttagggcgttttgattttcagccgggtcagggtctgtacaccgacatgaaagcgttgcgtcctgatgaggatcgcttaaccccaatccattctgtttatgttgatcagtgggactgggaaaaagtgatggcagatgaggagcgtacgctgccttatctgaagcagacagtgagtaaaatatatcagacaataaaagaaacagaacttgcagtaagtaaggaatttggtctgacaccgttcctgccggaccaaattcattttattcactctgaagaactgcttgcacgctacccggacctggatgccaaaggccgtgagcgcgccatcgcgaaagaactgggtgccgtcttcttaatcggcatcggcggtaaattatctcatggtgagtcccatgatgtccgtgcaccggattatgatgactggaccactgagaacagtgacggctacaaagggctgaacggggatatcctcgtgtggaacccggtactgcaggatgcgttcgagttatcctcaatggggatccgtgtcgacccggtcaccctggcgcgtcagctggatctgaccggtcagcaggtacggatggagctggactggcacaaatcgctggcagccggtgaaatgccgcagactatcgggggcgggatcggccagtcacgtctggtgatgttactgctccagcgcagtcatatcggccaggtacaatgcagtgtgtgggcaccggaagtgcgcgaaaccatcactgatatgctgtaa

SEQ ID NO: 276378 - DNA, 462 bp, Morganella morganii
atggccgaaatttatcagatcgacaatctggaccgtgacatacttcacgctttaatggcgaatgcccgcacaccttacgctgaattagcgaaaaaatttgccgtcagtcccggtacgatccatgtccgggtcgagaaaatgaagcaggcaggtatcattaccggcacccgggtggatatcagtgaaaaacagctgggatttgatgtgacctgctttatcggcatcatcctgaaaagcgccaaagattacccggccgccctcaagaaactcgataagctggatgaagtggtggaagtctattacaccaccgggcagtacagcatctttataaaggtgatgtgtaaaacgatagaatctctgcaggacgtacttatcaacaagatccagagtattgatgagatacagtccactgaaaccctgatctccttacagaacccgatcatacggacgatccgcccgtaa

SEQ ID NO: 276379 - DNA, 444 bp, Morganella morganii
atgaccacagttactctcattaccggcagtaccatgggcagcgcagaatatgttgccgagcatgttgccgaaatcctggaaaatgccggttttaccacggatgtgcaacacgggccggaagcggacgatgtaccgcagcaggacagtacctggttaattgtcacctccactcacggtgccggtgatctccccgaaaatatacagccgttcgctgatgccctgcgtgagcagcagcctgatctcagttccgtccgttacggtgccatcgggatcggcagcagtgaatatgacaccttctgtggtgcagtccgtacactggatgctctgctcacctctctgggtgcgaaaaaaatcggtcagtcactcgaaattgatattcagaaacacgagattcctgaagatccggctgagatctggatcgaagaatggaaaaatttactctga

SEQ ID NO: 276380 - DNA, 1890 bp, Morganella morganii
atgttttatccggatcattttgacgtcattgttatcggcggtggccacgccggtactgaagctgcaatggcagcggcacgtatgggccgtcaaacacttttactgactcacaatatcgacactctgggtcagatgtcctgcaaccctgctatcggtgggatcggtaagggacatctggttaaagagatcgatgcactcggcggactgatggcacatgccactgaccgtgccggtattcagttcagaaccctgaatgccagcaaaggaccggcagttcatgccacccgtgctcaggctgaccgcgtgctttaccgtctggcagtgcgcacagcactggaaaaccagcctaacctgatgattttccagcagccggtagaagatcttatcgttgaaaacgataccgttaccggtgcagtgacccagatgggactgaaattcagagccaaatcggttgtactgactgtcgggacattcctggacggaaaaattcatatcgggctggaaaactacagcggcggccgtgccggtgatccgccgtccgtctcactgtcacaccgtctgcgggaactgccgctgcgtgtcggccgcctgaaaacagggacaccgccgcgtattgacgcccggaccatcgattttgctcagctgacaccacaattcggtgacaacccgatgccggtattctccttcatggggagtgcggatgagcatcctgaacagatgccgtgccatatcacgtacaccaatgaaaaaacccatgaggtgatccgtaataacctcgatcgcagcccgatgtacgccggtgtgatcgaagggatcggtccgcgttactgcccgtccattgaagacaaagtgatgcgctttgcggatcgtaaccagcatcagatcttcctggagccggaagggctgaccagcaatgaaatttacccgaacggtatctccaccagcttaccgtttgatgtgcagatgcagattgttcactcgatgaaaggcatggaaaacgcgcgtattgtgcgtcccggttatgctatcgagtatgatttctttgacccgcgcgacctgaaacagaccctggaaagcaaatatctgcacggcctgttctttgccggacaaatcaacggcaccaccggttacgaagaagcggccgctcaggggctgctggccggtctgaacgccgcccgctattctgccgatcaggaaggctggttcccgcgccgtgatcaggcgtatatcggcgtgctggtggacgacctgtgcacactcggtaccaaagaaccgtaccggatgtttacctcacgggctgaataccgtctgatgctgcgtgaagacaacgcagatgcccgtctgacagaaaccggccgcaaactggggctggtggatgacgcgcgctgggcacacttcagtgaaaaaatggagctgatagagaaagaacgtcagcgcctgagagatatccgcgtacacccgcagtccgaaagcgtgaaagagatcaacgcgatcctgaacacgcctctctccaaagaagcgaccggggaagatcttctgcgccgtccggaaatggactacaaccgtctgatgaccctgagtgattttgcaccgggggttgattcaccggctgcggcacagcaggtggaaatccaggtgaaatacgaaggctatatctcccgtcagcaggacgaaattcagcgccagctgcgtaatgagaacgcgacactgcctgttgatctcgattacaaacaggtgagcgggctttccaacgaagtggtggcaaaactcaacgaccacaaaccgacttcgatcggacaggcatcgcggatctccggtatcacaccggctgctatctctatcctgctggtttggctgaaaaagcagggccttctgcggcggagtgcgtaa

SEQ ID NO: 276381 - DNA, 627 bp, Morganella morganii
atgagtgatttacagcaacaactttccgcgctgctgcgcagtgcggatatccggctgaccgatcagcagaaacaacaactgaccggttatgtggagatgcttcacaaatggaacaaagcctataacctgacgtctgtccgccagccggaacagatgctggtgcgccatatcatggacagtatcgtggtggaaccgcacctgaccggcagccggtttattgatgtcggcaccggcccggggcttcccggcgtgccgctggcgattgtccgcccggactctcactttgtcctgctcgacagcctgggtaagcgtgtacgcttcctgaaacaggtacagcatgaactggggctgagcaacatcgaaccggttcagagccgcgtggaagagtatcagggcgaaccatttgacggggttatcagtcgtgcatttgcatcactggatgatatgctcagctggtgtcatcacctgccggtaccggaagccgggcgcttttttgcactgaaaggcagtgtgccggaagaggaattaacccggttaccggaggggatttctctcgtcagtgtcgaaaaactggtcgtgccgcaacttgacgagcagcgccatctggtgattcttaaagcaaattga

SEQ ID NO: 276382 - DNA, 378 bp, Morganella morganii
atgtctgtctcccttttcaacggaaaattgaccaaaaaactgttgtttttgcagtttatgacgtttgttgttcttagtgcgcttttttgcataaaaagtatcgagtggggtgcttccgcgctggccgggggagttgccgcatggataccgaatgcgatttttttgctgatcagtaaccggcagaaagcgcatgaggaaccgcagtcgtaccggattgcatggttttttgtggtaggggaagggtttaaagttatcttcgcgatagcgatactgatgattgctttaggagtgtttaaagcggcagttgcaccactggtcttgacctatttagcggtgcttttcgtgcagattatcgcaccggccgtgctaagcggttag

SEQ ID NO: 276383 - DNA, 825 bp, Morganella morganii
atgtctgcatcaggagaaagtttaaccacaaaagagtatatcggtggccacctgaataaccttcagctggacctgaatactttcgagttggtcaatccccatgcgaacgcgactccatctttttggacgctgaacattgactcccttttcttctcagtcgtattaggtattttctttttatggcttttcagaagggtggcaaagaaagcgacaagtggcgttcccgggaaatttcagactgcggtagaaatgcttatcggcttcgttgacagcaacgtccgtgatatgtatcacggcaagagcaaggttattgcacctctcgcattaactgtgttcgtgtgggtgctgctgatgaacgcactggacttattaccaatcgacttcattccgtatatcggtgaacacatcctcggtttacctgcgctgcgtatcgttccgaccgcagacgtaagtatcacactgtcgatggcgattggtgtattcgttcttatcctcttttacagcttcaagatgaaaggcgtgaaaggatttgcaaaagagctgacattacagccttttaatcatccgttattcattcctgtcaacctgattctggaaggggtaagcctgctgtcaaaacctgtttccctcggtctgcgactgtttgggaacatgtatgcaggtgagctgatcttcattcttattgcaggtctgctaccgtggtggtcacaatggttactgagccttccgtgggcgattttccacatactgattattacgttacaagcctttattttcatggttctgacgatcgtctatctgtcgatggcgtctgaagagcattaa

SEQ ID NO: 276384 - DNA, 240 bp, Morganella morganii
atggaaaacctgaatatggatctgctgtacatggctgccgctgtaatgatgggcctggcggctatcggtgctgcgatcggtatcggcatcctcggtgggaaatttttagaaggcgctgcacgccagccggatttaatccctctgctgcgtactcagttcttcatcgtaatgggtctggttgacgccatcccgatgattgctgtgggtctgggcttgtatgtaatgtttgcggttgcgtag

SEQ ID NO: 276385 - DNA, 471 bp, Morganella morganii
gtgaatcttaacgcaacaatcctcggccaggccatcgcgtttgtcctgtttgttttgttctgtatgaagtatgtatggccaccgatcatggcggccattgaaaaacgtcagaaagaaattgctgacggtttatcttccgcagaacgtgctaaaaaggacctggacttagcgcaagccaatgcgaccgaccaaatgaaaaaagcgaaagcggaagcatctgccctgatcgatcaagcgaataaacaacgcgctcagatcatcgatgaggcgaaagcagaagcggaagttgagcgtagcaaaatcgtagcacaggcgcaggcggaaattgacgccgaacgcaaacgtgctcgtgaagagttacgtaaacaggtcgccattttagctgtcgcgggtgccgagaaaattattgaacgttccgtggatgaagctgctaacagcgacatcgttgataaacttgtcgctgaactgtaa

SEQ ID NO: 276386 - DNA, 534 bp, Morganella morganii
atgtcagaaatcgttactgtagctcgcccctacgccaaagcagcttttgactttgctgtggaaaaccgggccgttgaaaaatggcaggatatgctggcatttgccgctgaagtgacacgcaatgagcagatcgacgatctgatttccggttcttttgctccggaaaccctggctcaggcgtttatcactgtttgcggtgagcagattgacgagcatgttcagaacctggttcgtatcatggctgagaatggtcgcttagtgaccctgccggaagttagccgtcagttcgcaacactgcgggctgcgctggagtcaactgttgaggttgaagtcacttcagccggcgaactcaatgaacagcagctggcgaaaatttctgcagcgatggaaaaacgtctgtcacgcaaagttaagctgaattgcaaaattgataagtcagttatcgcggggtttgtattgcgcgccggtgaccttgtcatcgacaacagcattcgcaatcgactcgagcgtttaaccgacgtcttgcagtcttaa

SEQ ID NO: 276387 - DNA, 1542 bp, Morganella morganii
atgcaactgaattccaccgaaatcagcgaactgatcaagcagcgcattgctcagttcaatgtcgtgagtgaagctcacaacgaaggtacgattgtctccgtcaacgacggtatcattcgtatccacggtttagccgaagttatgcagggtgagatgatctctctgccgggcaaccgttatgctatcgcactgaacctggagcgcgactctgttggtgcggttgtgatgggtccttatgccgacctggcagaaggcatgaaagtcaaatgtaccggtcgtattctggaagtgccggttggccgtggcctgttaggccgtgtggtcaacaccctgggtgagcctatcgatggtaaaggccaggttgagcacgatggtttctcacctgtcgaagttatcgcaccgggtgttatcgaccgtcagtccgttgatcagcctgtacagaccggttataagtctgtcgatgcgatgattccaatcggccgtggtcagcgtgagctgattatcggtgaccgtcagaccggtaaaaccgcactggcaatcgatgcaatcatcaaccagcgtgattccggcatcaaatgtatttacgtcgcaattggtcagaaagcgtccactattgctaacgttgtccgtaaattagaagagcacaatgcgctggccaacacaatcgttgtggtcgcgagtgcgtctgaatctgcggcactgcaatacctggcgccgtattccggttgtgcaatgggtgaatacttccgtgaccgtggtgaagacgcgttaatcatttatgatgacctgtcaaaacaagcggttgcttaccgtcagatctccctgctgctccgtcgtccgcctggacgtgaagcatatcctggtgacgttttctatctgcactcccgtctgctggaacgtgctgcgcgtgttaacgcggaatatgtggaagcgtttaccaagggtgaagtgaaaggcaaaaccggttctctgaccgcgctgccaatcatcgaaacgcaggcaggggacgtatcagcgttcgttccgactaacgttatctccatcactgatggtcagatcttcctggaatccgcgctgttcaacgccggtatccgtcctgcggttaacccggggatctccgtatcccgtgtgggtggtgcagcacagaccaagatcatgaaaaaactgtccggaggtatccgtaccgctctggcacagtatcgtgaactggcggcgttctcacagttcgcatctgaccttgatgatgcaacccgtaaacagcttgaccacggtcagaaagttactgagttgctgaaacagaaacagtatgcaccaatgtcagtggcacaacagtctctgtcactgtatgcagctgagcgtggttacctggaagatatcgaaatttcgaaagtcgtgccgtttgaagctgctctgattggctacgccactcgtgaacatgctgatcttctgaaagaaatcgaccagacgggtagctataacgatgatatcgaagcgaagttgaaaaacgtgctcgataccttcaaggcaactcagtcctggtaa

SEQ ID NO: 276388 - DNA, 864 bp, Morganella morganii
atggccggcgcaaaagagatacgttctaagatcgccagcgtacaaaatacgcagaagatcactaaagcgatggaaatggtcgcggcgtccaaaatgcgtaaaacgcaggaccgcatggcggccagccgtccttatgcagagaccatccgcagtgtgattggtcacattgcattaggtaatctggaatataaacatccatacctcgaagaacgcgaggttaagcgtgtcgggtacctggttgtttctaccgaccgtggtttgtgtggtggtttgaacattaacttgttcaagaagctgattgtcgaaatgaaagactggtctgacaaaggtgttcagactgatctggctctgatcgggtccaaagcaacatcattcttctcctctgtgggcgggaatgtggttgctcaggtaaccggcatgggggatgacccgtcgctggctgaccttatcggttcagtaaaagtcatgcttcaggcctacgacgaaggtcgtcttgacaagctgtacattgtaactaaccggtttgtgaataccatgtctcaggttccgaccattgttcaggttctgccgttaccgccaagtgatgacgaaaacctgaagaagaaaacctgggattatttatacgaacctgatcctaaagcgttactggattcccttttacggcgctacatcgaagcgctggtataccagggcgttgtggaaaacctggccagtgagcaggccgcccgtatggttgcaatgaaagctgcaactgataacggcggtaacatgatcaaagagctgaatttagtttacaacaaagcgcgtcaggcaagcattacacaagaactcaccgagattgtgtccggtgctgccgcggtttaa

SEQ ID NO: 276389 - DNA, 1383 bp, Morganella morganii
atggctactggaaaaatcatccaggttatcggcgccgttgtggacgtcgaatttcctcaggatgcagtaccgaaagtgtacgatgcgcttgaggtaaaaaatggtaatgaaaagctggtgctggaagttcagcagcagttaggcggcggggttgtccgttgtatcgctatgggtacatctgatggtctgagccgtaatctggaagtaaccgatttaggccacccgatcgaagtccctgtcggcgtgaaaaccttaggacgtatcatgaacgttcttggtgatccgatcgatatgaaaggtgacatcggcgcagaagaaaaatggtctattcaccgtgctgcaccaacatacgaagaactgtctaactcccaggaactgctggaaacaggtatcaaagtaatggacctgatctgcccgttcgcgaagggtggtaaagtcggtctgttcggtggtgcgggtgtgggtaaaaccgtaaacatgatggaactgatccgtaacatcgcgatcgagcactccggttactctgtattcgcaggggtcggtgagcgtacccgtgaaggtaacgacttctatcatgaaatgacagactccaacgttctggacaaagtatcactcgtgtacggccagatgaacgagccaccgggaaaccgtctgcgcgttgctctgaccggtctgaccatggcggaaaaattccgtgatgaaggccgcgacgtactgctgttcgttgataacatctaccgttatacccttgccggtactgaagtatccgcgctgttaggccgtatgccttcagcggtaggttaccagccgacactggcggaagaaatgggtgtgcttcaggaacgtatcacatcgaccaaaacaggctctatcacgtctgtacaggccgtttacgtccctgcggatgacttaactgacccgtctcctgcaaccacgttcgctcaccttgatgcgaccgtcgttctgagccgtcagattgcgtctctgggtatctaccctgcggttgacccgctggattctaccagccgtcagcttgacccgctcgttgttggtcaggagcactacgatgttgcccgtggcgtacagtcaatcctccagcgttatcaggaactgaaagatatcatcgcaatcctcgggatggatgagctgtcagaagaagataaactggttgttgcacgtgcccgtaaaatccagcgcttcctgtctcagccgttcttcgtggcagaagtcttcaccggttcaccgggtaagttcgtttccctgaaagacactatccgtggctttaaaggtatcctggaaggtgattacgatcatctgccggagcaggcgttctacatggttggtaccatcgaagaagctgtggaaaaagcgaagaagatttaa

SEQ ID NO: 276390 - DNA, 426 bp, Morganella morganii
atgtctgcaatgacgtttcacctgacggtagtaagtgccgaaaaacaactgtttaagggcttagtccagaagattcaggtgacaggcagtgaaggtgagctgggtatttacccgatgcataccccgctgctgactgccataaaaccgggcatggtacggattgttaagcaatttggtgaagaagagcttatctacctttcaggcggaatgctcgaagtacagccaaacggcgttatcgtacttgcggacacggctatccgtgcaaacgatctggatgctgcactggcgatggaatcaaaacgccgcgcggaagaaaacatccggaaagcacatggtgacgtggattatgctcaggcatcagccgaactggcaaaagcaattgcaaaattacgtgtaattgacgaattagccaagaagatgatgtaa

SEQ ID NO: 276391 - DNA, 1374 bp, Morganella morganii
atgtctacgaatgctaaaagtgtggtaattctcgctgcgggtaaaggtacccggatgtactccgctctgccgaaggtattacatcacctggcgggcaaaccgatggttcagcatgtgattgatactgccctttcactgggcgcacagaatgtgcatctggtttacggacacggcggtgatttattacagagtacgctgtcggatcagaatctgaactgggttttacaggcagaacaactgggaaccgggcatgcgatgcagcaggctgcacctcactttgccgatgacgaagatattctgatgctgtacggcgatgttccgctgattgcggctgaaacgctggaacgcctgatggcggtcaaaccggaaggcggcattggcctgctgacagtgattctggataacccggcgggttacggccgcatcatccgtgaaaacggactggtgaccgggattatcgaacagaaagatgcctctgaagagcagcggaaaatcaaagaaattaataccggtattctggttgccaatggtggtgatctcaaacgctggttagcaaaactgaacaacaataatgcgcagggtgaattttatatcaccgatattattgccattgcgcatcaggaagggcgtcgtattgagacggctcatccggaaaaactgagtgaaatggaaggggtgaataaccgccttcagctcgcggcgctggagcgtatttatcagcgtgaacaggccgatcgtctgttactcgaaggtgtgatgattctggatccggcgcgttttgacctgcgcggcactctgacacacggtaaagatgtcatcattgacgtgaatgtcattatcgaaggcaatgtgacactcggtaataatgtagtgattggcgccggttgtgtgctgaaagactgcgttatcggtgacggctctgtgctcagtccgtataccgtggtggaattatctgaaatggcccgtgactgtactgtcggtccgtttgcccgtctgcgtcccggctctgtgctggcagacaaagcccatgtcggcaactttgtagaaatgaagaaagcgacactcggcgtcggctctaaagccggacatctcagctatcttggggatgcggaaatcggtaacgatgtgaatatcggtgccggaaccatcacctgtaactatgatggcgcaaacaaattcaaaacagtgatcggcgatgatgtttttgtcggctctgatacccagctggtggcgccggtcactatcgggaaaggcgcgacagtcggtgccggtacaaccgtaacaaaagatgtgggtgataatgaactggtgataagccgggtcagacaaacccagattgccggctggaaacgtccggtaaaaatgaaaaagtaa

SEQ ID NO: 276392 - DNA, 1830 bp, Morganella morganii
atgtgtggaattgttggtgcagtagcacaacgtgatatcgctgaaattctgttagaagggcttcgtcgtctggaataccgcgggtatgactctgccggtatggcggttgtggacagcgaagggcacctgacccgcctgcgtgaagtcggtaaagtgaaaatgctggcggaagaagcagaaaaaacgccggtttccggcggcaccggtatcgcgcacacacgctgggcaacgcatggcgagcctctggaacgcaacgcacacccgcatgtttccggaaatatcgccgttgttcataacggtattattgaaaactacagtgaattacgggaattactgaaaggccgcggctatcagttcacttccgacaccgacactgaagttatcgcacacctggtgaactgggaacattcacagggcggtacgctgcgtgaagccgtacagcgcgctatcccgcaactgcgcggtgcatacggtacggtgattatggattcccgcacaccggaactgctggttgctgcccgttcaggcagcccgctggtggtcggtctgggtgtcggtgaaaacttccttgcttctgatcagctggcactgctgccggttacccgccgctttatctacctggaagaaggggatatcgtcgaaattacccgccgtcatgttcatatttttgaccgcaatggtgatgaagcagaacgcgatgtgattgaatccaacgttcagtatgatgccggtgataaaggtatttaccgtcattatatgcagaaagagatctatgagcagccgctggccatcaaaaacacgatggaagggcgtctgcgcaatgaaacggtcgaattcagcgagctgggtgaaaaagcccgtgatgtgctgtccggtattgagcatatccaaattgttgcctgcggtacctcattcaacgccgggatggtctcccgctactggtttgaagctctggcaggtattccgtgtgatgtggaaatcgcctctgaattccgttaccgcaaaccggcctgccgtaagaacagcctgctgatcaccatttcacagtccggtgaaaccgcagataccctggcggcactgcgtctgggcaaagagctgggctatctgacttctctggctatctgtaacgttgccggttcatcactggtgcgtgaatctgattttgctgtgatgaccaaagccgggactgaaatcggtgtggcctccaccaaggcattcactactcagctgactgttctgctgatgctggtggcttacctcggccgcctgaaaggcaaaggtgaagcgctggagcacagtattgtgactgcactgcatgcgctgccgagccgtatcgaaagcatgctgtctcaggataaagtcattgagcagctggcggaggatttctctgataagagccacgcactgttcctgggccgcggggatcagttcccgatcgcggtggaaggcgcgctgaaacttaaagagatctcgtatatccacgcagaagcctatgccgccggtgaattaaaacacggcccgctggcgctgattgatgcggatatgccggtcattatcgtggcgccgaataacgaactgctggaaaaactgaaatccaacattgaagaggttcgtgcccgtggtggtctgctgtatgtcttcgcggataaagacgccggtttcagcgacagcgaaaatatgaaaattattccgctgccgtatgtggaagagcttattgctccaatcttctacaccatcccgttacagctgctctcttatcacgtcgccttaattaaaggtactgatgtggatcagccgcgtaacctggcgaaatcagtgacagttgaataa

SEQ ID NO: 276393 - DNA, 1161 bp, Morganella morganii
atgcttaaacatatcagtataagaaccgtcattgtcgtctttctcatctgtaatttcactacaattaatattatctttctcttgcccctgtccgcactaattaaattagtgatgcttaatattgttagtgtttttacgttcgcctgctcatggttttacattacgaagtatctggtgatgccgatcaatgccgtgaaaaacagtattgatgaggttaacgccggtaacttatcggtgcggatcccggtatttggtaataactgtgccggacgcctgatccccggggtgaatcagctggcggaaagcctttctctgctggtcagtgaaatccgcagctcatcagattccgcatctgtgttgtctgagcaactggcaatgcgcagttttgagctgtctgccaagacggagcagcaatcggccatgctggtggaaacagcggccaatatggaggagattgccgccgggactaaaaataatgcggagaatacggtgctggtcagtgagcatgcacaggaagcaaccgtgtttgccgggcatggcggtaagctgatggaggaagtggccaccaatatgcattctattaatgagtgcactaataagatgactgaaatcatcaccctgattgattccattgccttccagaccaacattctggcgctgaatgctgccgtagaggctgcccgtgccggtgagcacggcagaggctttactgttgtggccggcgaggtcagaaatctggctcaccgcagttcagaatcagcgaaaaatattaaatccctgattgctgtgacaaccgataatgttaagcagggagaggatattgttcaccgcgccgaagtgaatatgaataagattgttgagggtgcggagcgggtaaacggcctgatggcgcagatctctgtttccacacaacagcagcagcaggggattgagcagatagcaacggctctttccgagctggaacaggcaactcagggcagtgttatgatcgccgatgagcttgccggttcttctgatgcgcttaaggctcaggttgcggatttacactcacggacacgggatttccgcctgacgaatcacaccgctgctcagccacacagcaaaccggtattaaacaccggtaaacgggttgcgcggtttgccgcatcagctcaggcatga

SEQ ID NO: 276394 - DNA, 1542 bp, Morganella morganii
atgaaaaacaacattcctgtcacacagcatgaatactcgcttaacgataatgcaatattaatgtcaaccactgacactcagagccatataacctatgcaaactctgcatttattaccgcaagcgggtttgaggaagggcaattaaccggacagcctcataatattatccgacacccggatatgcctccggccgcctttgccgatatgtggtataccctgcagcagggtgacagctggacaggtattatcaagaaccgctgccgtaacggcgaccattactgggtgcgggcaaatgtcaccccggtatggcacgataaaaaactgacaggctatatttctgtccggacagtaccaacccgtgatgaaataaaaaaaagtgcctcactttacagcaggttaaagagtaataaattgaacggatatcgtctttttaaaggtattattatccgcaaaggtaaactggcatttttatcattactgaaatggctgcctgtcgggcagcggattaattattccttattaactgtaatgttattaactctggctctggtattttcaccgttaaatccgtttattcaggcaggtggtgtggcggctttatttattctgctgtcggtttaccttcagtcacaagtctctcagccggttaaattactgctgtcacagatgaaaaaagtcgtttccgggcggaaaccggatccggtacacatggacagggttgatgaaatcggactgctgatgcgtttggtgaatcagtccgggcttaatctgaactcgctggtggatgatgtcagcacacaggttgccgggatccgcgctatcaaccagcgggtttcacaggaaaccaccgcgctgcatacccgctctgaagaggcatccgcccatctgcagcaaaccgcggtcgccattgaggaaatcagcagtgcagtgcagcagactgccgaaagcgtttatctgacgatgaatatcgccggtaatgcgagtaacagcgcaacacaaagcaacgaaaccatgcagaaaaccatcgatatgatgcataccatttctgcggataataatcagattgttgatatcatcggcgtgattgaccgtattgcttttcagactaacattctggcgctgaatgcgtcggtggaagccgcccgtgcaggggacgccggacggggcttttctgttgtggccgcagaggtgcgcaacctggcgctgcattccgcctctgccgccaaagagataaaaaccctgattgagaaaaacgcggccaatgtccgcaccggcgtgacaatggcagagcagactgaaacccagctcggggaaatggtcactgatgtgctgaaaatgtcatccatgatcaatgaaatcggtcttgccaccaaagaacagactcaggcactggagcttatcaatgaatccgtcgcccgtatcggcaccatgaccggcaacaatactgaaatggtcaataatgtcaccggtgccaccactgaactgacacggcgctcctcacgattacagcaggcaattcaggttttcggcaatcatgcctga

SEQ ID NO: 276395 - DNA, 579 bp, Morganella morganii
atgaattttatcaatcacactatttttccggcgctgaattatgacagcgataatcatcaacatgatacatttcatatcgttgcatcacgtattacctatgatatccggataaataaccgtgacggacagagtcagcttgttatttccccggaacaatccctgctgaattatacggatgtcagctacaatgaaatggttgataccagtattgaatacgaaagtgatttagccccttataaaccgaaaaccgatattgtcattaacgccacagcgtttgtaccggaaaataatccggtttcggttttcgatgtcggtattcagatcggaaaatatcagaaagtcctgcgcatattcggtccccgttactggatcaaaaaggatgacgagtggtttctcacggaatctgaaccgatcagttatcttgatatccgttatgagcatgcctccggcggtacatacaacgccggtgatacggtttttacctctccggcaaacccggtgtcatcacacccgccacagacaccggataacctcaattactggtgtggtgcccacccgacaccgtcgttgtggatatga

SEQ ID NO: 276396 - DNA, 915 bp, Morganella morganii
atgtattacggttttgatatgggcgggacgaaaattgagcttgccgtttttaatgaagcactggaaccggtctggcaaaagcgtattgcgacaccgaaagagagctacgccgctctgcttgaagcattcagacaactgacagaacaggcggataccgaactcggatgcaaaggaaaaatcggcatcggcgttcccggtattgtgaatcatgaaaaaggaacggtgtttaccaccaatgtgcctgccgctcaatatcagccgctgcgtcatgatctggaaaccatattgcagcgcccggtaaaaattgaaaatgacgccaactgctttgcactctccgaagcctgggatccggcattccgccactatccgacagtactggggctgatcctcggtaccggtgtcggcggcggctttgtgattaacggcacggtgttaccgggaaaaaacgggattgccggtgaaatcggtcacatcaatatgactctggaaggggataagcttctcgggcatcaggttccggagaccctctgcggctgcggaaaaaccggctgttttgaaacctatctttccggccccgggtttgagcggattttcacggcattttacggcgaaaagctcagtgcggttgatattatcgcccgttattacgacggtgatcataatgcaaaactgcacgttgagcggtatatgtcactgctcgcgcactatctgggaaatgtgctgagtgtctttgatcctgatttactggtgatcggcggcggattatcacaatttgaggagatttaccgcctgctgccggaatatctgccgcagtatctctacggcgttgcctcactgcccgccattcataaagcccgttacggggattccggcggcgcccggggcgcagcctgtctcaatttttccggcagataa

SEQ ID NO: 276397 - DNA, 1110 bp, Morganella morganii
atgaaaaatgtgggatttgtcggctggcgcgggatggtggggtctgtgctgatgcagcgcatgacagaagagcgggattttgacgggatccgtccggtatttttctcaacctcgcagagcggcggggaagcgccgtcattcggcgggcaccgcagcacgttacaggacgcatttgatattgatgcactgcgcgcgctcgacattattatcagctgccagggcggcgattacaccaatgatgtttatccgaagctgtgtcagagcggctgggacggttactgggttgatgcggcatcagcactgcggatgaatgatgacgccattattattctcgacccggtgaacggtaagcatatagaagaagggctgaaccgcggcattaaaacatttgtcggcggtaactgtacggtcagcctgatgctgatgtcactgggcggcctgtttgaggcggatctggtggagtgggcctctgtggcaacctaccaggcggcatccggtgccggtgcgcgtcatatgcgtgaattgctggtgcagatgggggcactgaatgcccatgtggtgaaagagttacagaacccggcctccgcgattctggatattgaacgcaaagtcactgaatttacccgcagtggtgcattaccggcggaacagttcggtgtaccgctggccgggagcctgatcccgtggattgataagcggctggataacggccagagccgcgaagagtggaaagggcaggcggaaaccaacaaaatcctgtcacgcggccagaatattattccggtggatggcctgtgtgtccgtataggcgctctgcgctgccacagccaggcatttaccctgaaactgaagaaagatctgccggttgcggagattgagtctctgctggcagctcataatgagtgggttcgcgtggttccgaatgatcgcgatattaccgtgcgtgagctgaccccggcggcggttaccggcacactgaaaacgccggtcgggcgcatccgtaaactgaatatgggaccggattatatatctgcgtttactgtgggtgaccagcttctgtggggtgccgcagagccgttacgcagaatgctgaatattttactgaaataa

SEQ ID NO: 276398 - DNA, 1383 bp, Morganella morganii
atgtctcttcatgcagtgaaaggtaaaaatagttcagaatttattgatatttacgcatcaacggactcggatgcaaaactccctaaatacaaaatgccggacgacagcagtgacccgcgaattatttacagcgtggtccgtgacgaattactgctggatggtaactcccgtcagaatctggcgacattttgtacaacatgggttgaggatgaagtcaaacagctgatgaccgacagtgtcgataaaaacatgatcgacaaagacgaatatccgcaaaccgcagaaattgaaagccgctgtgtgcatattattgccgacctgtggaattccccgcaggcacaggaaactatcggctgctctaccaccggctccagtgaggcggcaatgctcggcgggctggcaatgaaatggcgctggcgtaaaaaccgagaaaaacaggggaaagagaccggtaagccaaacctggtaaccggcccggtacaggtgtgctgggaaaaatttgcccgctattttgatgtggaactccggcagatcccgctggaaggtgatgccctcggtatgcagccgtctgatctgcgcaaatattgcgatgaaaacaccatcggtgtggtggcgacactgggggtcacgtttaccgggatttatgaaccggtggcggaactggcaaaagaacttgatgcaatacaacgggataccggccttgatattccgctgcatgttgatggtgccagcggcgggtttatcgcgccgtttatccagccggaactggtgtgggatttccggattgagcgggtgaaatccattaacagctccggacacaaatacggcctgtcaccgctgggtgtcggctgggtggtctggcgcagcaaagaagacctgccggaagagctggttttcaatgtcgattatctcggcggcaatatgccgacatttgcactgaacttttcccgtcccggcgggcaaatcattgcacagtattataatttcctgcgtctgggacgcgccggttataccaaaattcagcaggcgtgtgcagatactgcgcaatggcttgcggatgaactgaataagctggggattttcgacctggtgtatgacggccgcggcgcactgccggcggtggcttacaagctgaaaccgggcgtgacacagttcaatctgtatgacctttccgatcgcatccgcacacgcggctggctgatagcctcttatccgctcccggcggacagagagaaaaccgttgttcagcgcattatgatccgtcacggcgtcagccgcgacctggctgcattgctgctggatgatattaagcgggctatcgatcacttcagacaaaacccggtagtgaactcgactgccaaagccaccttccatcacggttaa

SEQ ID NO: 276399 - DNA, 1482 bp, Morganella morganii
atgactgatacttcaaccaaaaaaccgtcttccggtgcagcaaaactgactgtcggcacacttatcgtcatgaatattgtggcggtggtgagcctgcgcggtttgcctgccgaagcggaatacggtctcagtgcgattttctattatctgtttgctgctgtgtttttcctgatcccggtatcactggttgctgctgaactggccaccggctggtcagagaaaggcggggtgttccgctgggtcggcgaggcgttcgggccgcgtctggcgtttctggcgatggcgatgctgtggattgaggtgacggtctggttcccgaccgggctgacattcggggcggtatcactcgcctttatcgatccgcatcagacatttgacgaagcactggcggcaaataaattctttgtgctcggtattgtcctgtttatctactggctggcgacctttattgcctttaaaggcgtgggcgcatttgcccgggtatcaaaatggggcgggattatcgggacgattgttccggcgatcattctgattgtacttggtttctcctacctgttcagcggccagacaccgcagattgacctggcgtgggatcaggttctgccggatttctcaaacttcgataacattgtactggcggccagtattttcctgttctatgcaggtatggaaatgaacgccattcacgtaaaagacattgataacccgaccaaaaactacccgaaagccatcattctggcggcggcgggtacggtggctatctttgtgctgggcacactggcgatcgcctttatcattcctcagtccgatatcagtctgacccagagtctgctggtggcttacgatgacatgttcaaatgggcacatattccgtggatggggccgattgtcgccgtcatgctggctatcggtgtgctggcgagtgtggtgacctgggttgccgggccgtcctccggtcttctggaagtggcgaaagcgggctatctgccgcactggttccagcataccaacaagaacgggatggcaacacatatcctgctggtacaggctgtgctggtctctctgctggcggtactgtttgtggtgctgccgtccgtgcaggcggcctatcagatcctcagtcagctgacggttattctctatctgattatgtatatgctgatgttcagcgccgcgatttacctgcgcttcagtcagccgcagcgtgcgcgtccgtaccggatcccgggcggtaatgcggggatgattatcctcggcggtatggggctgctcggctcgttaaccgcgtttctgttcagctttatcccgccggcacagattgcggtcggcagcccggaagtgtatgtgggggcgctgatcggactgaccgttctgttcgttcttcttccttttgttatttatcagatccgtaaacccggctggcgtgatccggatagtgatttcgcgccgtttacatgggaaaacaaaggaaaagcatcatga

SEQ ID NO: 276400 - DNA, 930 bp, Morganella morganii
atgacagatttaacagcaatcaaacaggcagtgaccaatgcctggcagcagtttcatcaggctcccggcggtgcgaatgcggattatattccgttcctggctaatatcccgtccgacctggcggcggttgcggtagtcactgctcagggcgatattatcagcagcggtgatgccgattaccggtttgccattgagtcgatttccaaagtctgcacgctggcactggcgctggaggatatcggcccgcaggcggttcaggatcagattggtgcggatccgaccgggctgccgtttaactccgtgatggcgctggaactgcataatgataagccgttgtcgccgctggtgaatgccggtgcgatcgcgaccgtcagtgcggtcaccgcaaaatctgccgatgaacgctggcagcgcatcctgaccatgcagcgccgtctcgggtcggagaatattgctctgtcggacgaactgaatcagtcagagcagaccaccaatttccataaccgtggcatatcctggctgctttacgccgctcaaaacctctattgtgacccgatggaggcctgtgatgtgtatacccgccagtgctccacactgctgaccaccaaagagctggccacaatgggcgcgacactggccggacacggcaaaaacccggtgaccggtgagcaggtgctgaacccggcacatactccgtttatcctggcagaaatgaccatggaagggctgtacggccgttccggtgactgggcatacacggtcggtttaccgggcaaaagcggggtcggcggggggatcctcgcagtggtaccgggtgtgatgggtatcgccgcgttttcaccgccgctggatgatgacggaaacagtgtcagaggccagaaaatggtggcttcagttgccgccgcactgggatataacctttaccggtga

SEQ ID NO: 276401 - DNA, 1281 bp, Morganella morganii
atgaagccagtgtcatcagaaaagccgttaacgttgttacaggttattgcgctggggatcggcgcaatggtaggtgccgggatttttgccctgctggggcagacggcactgattatgcaatctgcaacatggattgcctttgcctgcggcggtctggttgcgttatttgccggttatgcctatgcccggttatccgcctgctatccctcgccgggcggtattattgatttcttccggctgtcattgcctgccgtgctgacgatcgccttatcctttttgtatcttgtcacgctgatcctgacggtggcgatggtggcaagggcgttcggggcttacgccgttcagctttttcatcagggaaatgaatcggccttattaccggaagtgtataccgcgtttattatcatcgcggttggtctgatgaatatcaccggcagccatgctgtcggtaaagtggaagttcttctggtgggcaccaaactggtgattattatcgccctggtggcgacgggcgtatttaccgtggatacaacactgctgaatatcagcacgttttccggagatacccttttttccgccgtcgggctgacgtttttcgcctatgccgggttcggtatgatggcaaatgcctcagacaaagtggcagaccccggccgggtgatgccgagggcatttatgatcgccattttattcacgattgtgctgtatatcagcctggcactggtattgctcggcaatctctcgccgtctcaactggtccgttacgcggataccgccgtggctcaggtggcttatcccgtatggggaaaaaccggttttgtgattgtggccgccgccgcgctgctggcgacaacatccgccattaatgccaccctgttttccgccttcaatatcaccgacagaatgtgcagcaccggtattctgccggactcctggggcaaaacggtattccggcagggaacaaccgtgaatattttgctcattctgctgacactgctgctggcgctgttcctgaatctcagtgatctggccaatgtcgccagttttacgttcctcctgtgctatctgatggtactggtggtggcgtggcgtcagagcgcggttatccgggcatcaaaatttattaccgggaccgggattgtccttgtcaccgctgtattggccgggtttgtggtgacgttgctgagcggaggatttatttctgtcagtgtgattgccggggcgcttattctctgtctggttgccggttatctgcggaaacggagccggaaagatgaatga

SEQ ID NO: 276402 - DNA, 654 bp, Morganella morganii
atgaatgaatggctcgataatattcttcttaattatgtgacttttgtgtcgctgttcagccctccggcaaccatcaccgccgccacgattatccttggccggattgaccggaacatattgtggcaaattgcctggaaaattgcggcgggatacacgctggtcatgctggtggttatctggctgggaaactggctgctgacggctctcgggctgagtgcggatgccctgaccgtcaccggcggtattgcgttactggcacagggatggccgatgcttatccgcggggtcaaagaggagcacagcgatattccggtcagtgtgacgccgccgaaagatatcatgcggctggcaatggtaccgctgctttttccgctgtcgatgggcggcggcacgatagcggtcggaatttcactggccggacacagtgattccctgtccgggctgatacagctttctgttgtgatcctgctgatgttacctactattgccctgacctttctggcaaccgggccgctgcacgggcgtttatctcccggggtgatggacaccctggcgcggatctccggcattattctggttacactggcgattcagttactggtctcgggaatggtcggtcttatcacaacgaatctgaagcatcttacggggtga

SEQ ID NO: 276403 - DNA, 2415 bp, Morganella morganii
atgtcgaatacctatgactcctcaagtatcaaagtattaaaagggctggacgcggtgcgtaaacgcccgggaatgtacattggtgataccgatgacggaaccggtttacaccacatggtcttcgaggttgttgacaacgctatcgacgaagccctcgccggttactgtaaagacatcattgtgaccattcacaatgataattcagtctccgtacaggatgacggccgcggtatcccgaccgggatccatgaagaagaaggcgtctccgccgcagaagttatcatgactgttctgcacgccggcgggaagttcgatgataactcctataaagtctcaggcggcctgcacggcgtcggggtctctgttgttaacgccctgtctgaaaaactggaactggttatccgccgtgacggcaaagttcacgagcagatctaccgccacggtgaacctcaggatcgcctgactgttgtcggcgaaaccgataaaaccgggacacgcgtgcgtttctggccgagcatggacaccttcaaaggcgagactgaattccagtacgacattctggcaaaacgcctgcgcgaactctccttcctgaactccggtgtatcgatccgtctgatcgataaacgcgacggcaaagaagatcactttcactacgaaggcggtatcaaagcattcgtggaatatttaagccgcgccaaaacctcgatccataacaacgttttctatttctccaccgagaaagacgatatcggcgtggaagtctccatgcagtggaatgactccttccaggaaaacgtatactgcttcactaacaatattccgcagcgcgacggtggtgctcatctcgccggtttccgcgccgccatgacccgtaccctcaacagctatattgagaaagaagggctgaataaaaaatccaaagtcagcaccaccggggatgatgcccgtgaagggctggtagcggtcatttccgtcaaagtgccggatccgaaattctcctctcagaccaaagacaagctggtctcttccgaagtgaaaacggcggttgaaaccctgatgaacgaaaagctgtctgaatatctggatgagaacccgaacgacaccaaaatcattgtcggcaaaattattgatgccgcacgtgcccgtgaagccgcacgccgcgcccgtgaaatgacacgccgtaaaggcgcgctggatttagccggtctgccgggtaaactggcggactgccaggaacgcgacccggccttctccgaactgtacttagtggaaggggactctgcgggcggctctgcaaaacaggggcgtaaccgcaagaaccaggcaattttaccgctgaaaggtaaaatcctgaacgttgagaaggcgcgttttgataaaatgctggcttctcaggaagttgccacgctgatcaccgcgctcggctgcggtatcggccgcgacgaatacaacccggacaaactgcgctatcacagcatcatcatcatgaccgatgccgacgtcgatggttcgcacatccgtaccctgttactgaccttcttctaccgtcagatgccggaaatcattgagcgcggttatgtgtatatcgcacagccgccgctgtataaagtgaaaaaaggcaagcaggaacagtatattaaagatgacgaagcgatggagcagtatcaggtctctatcgcactggatggcgcggcactgtatgtaaacgaaaatgcagcaccgattcagggcgaacatctggaaaaactgctgcacgaatacaacggcgcacacaaaattatccgccgtttagagcgtctctatccgctggcactgttaaacagcctggtctaccagccgaaactggaagaatccgcgctgctgaacaaaaccgaggtagaagcctgggcacagagcctgacagaacgcctgacccgtcatgaagagcacggcagcacctacagctaccgtattgcggaaaacaaagagcgccagctgtttgagccggtactgactatccgtacccacggtgttgatactgactacaatctggatttcgattttgttcacggcagcgaatatgcccgtatctccaaactgggtgagcttatccgtggtctgattgaagaaggtgcttatgttgtccgtggtgagcgccgtcagaacgtcagcaacttcgaacaggcccttgactggctgatgaaagaatcacgccgtggtctggctgtacagcgctataaagggctgggtgaaatgaacccggaacagctgtgggaaaccaccatgaacccggaaacccgccgtatgttgcaggtcacggtaaaagatgcgattgcaacggatcagttattcaccacactgatgggtgatgatgttgaaccgcgccgagcctttatcgaagagaatgccctgaaagcagcaaacatcgacgtataa

SEQ ID NO: 276404 - DNA, 1083 bp, Morganella morganii
atgatcctctcgcgtttacttatccgtgattttcgcaatatcgaaaatgcggatttatcgctggccaccgggtttaactttctggtcggcccgaacggcagcggtaaaaccagtgttctggaagccatttacacactcggccacggccgggcattccgctcagtacaggcggggcgtgttatccgccatgataacgaagaatttattctgcacggcaaactcgggcaggaacagacagaccgggccaccagcgtcggcctgagtaaaaaccgccagggtgacagcaaggtccgcattgacggcaccgacggccataaaattgccgagctggcaaaattactgccgatgcagcttatcaccccggaaggttttaccctgctcaacggcgggccgaaattccgccgggcttatattgactggggctgtttccacaatgaaccgcaattttttgcgctgtggagtgatttaaaacgtctggtgagacagcgtaatgccgccctccgccaggtatcgaattacggtcagatccgccactgggatcagcagctgattccggttgctgagcaggtcagtcagtggcgggagaattatgtgacagcgattgctcaggatattgagcagacctgtcagcagtttttacctgaattttcgctgaatgtctctttccagcgcggatgggataaagagaccgattattcagagcttctgcagcgccagtttgaacgggaccgcgcactgacctacaccgcctccggcccgcataaagcggatttacggatcagggcggacggggtgccggtggaagatttactttcacgtggtcagttaaaactgctgatgtgcgcgctgcggttagcacagggtgaatatttcacccgtcagagcgggcagcaatgcctgtatctgcttgatgattttgcctccgaactggatgccgggcgccgtcttttactggctcaccggctgaaagccacacaggcacaggtttttgtcagtgccatcacccctgaacaggtcagtgatatggcggatgaaaacagtcgcctctttgtcgtggaaaaaggtaaaatacaggttcaataa

SEQ ID NO: 276405 - DNA, 1101 bp, Morganella morganii
atgaaatttatcattgaacgtgagcaattgttaaaacccttacaacaggtcagcagtccgttgggcggtcgcccgaccctaccgattctgggtaacttactgctgaaagtctctgatggcgtactgcatctcacagggacagaccttgagatggaaatgatggccgccgttccgctggatcagccgcatgaaaacggcgaaaccacggtaccggcccggaagttcctggatatctggcggggtctgccggacggcgcacaaatcagtgttgagcttgacggtgaccgtcttctggtccgctccgggcgcagccgcttctcgctgtccactttaccggcctcggatttcccgaatctggatgactggcagagtgatgtcactttctctctgccgcaggcaacattgaaacgcctgattgaatccacccagttctccatggcacatcaggatgtccgctattacttaaacggcatgctgtttgaaaccagcggctctgtgctgcgtactgtcgccacagacgggcaccgcctggcggtctgctcgctggatatcggacaggaactgccggaccattcggtgatcgtgccgcgtaaaggggttatcgaactgatgcgcctgctcgacggcggcgatgccctgctgaaactggaaatcggcagcaacaatatccgcgctcatgtcggcggatttattttcacctccaaactggtggatggccgcttcccggactaccgccgagtcctgccgaagaacccggacaaaacgctgacggcaaattgtgatatgctgaagcaggctttttcccgtgcggcgattttatcgaacgagaaattccgcggcgtgcggatttacctgagcaacaatcagctcagaattaccgccaataacccggagcaggaagaagccgaagagatcgtggatgtcacctatgacggaaccgacatggaaatcgggttcaacgtcagctatgtccttgatgttcttaacacactgaaatgcgaagatgtctcggtgaaactgaccgatgccacctccagcgtgcagattgaagatgacgccagtgatgcagccgcttacgttgtgatgccgatgcgcctgtaa

SEQ ID NO: 276406 - DNA, 1398 bp, Morganella morganii
gtgtctctttcgctttggcagcaatgtcttgcccgtttgcaggatgaattacctgccacagaattcagtatgtggatacgcccccttcaggctgagctgagtgatgacactctggcgctctatgccccaaaccggtttgtgctcgactgggtacgggagaagtacattaataacattaatgcactcctgtccgatttctgcggcaacgaaattccgcaactgcgctttgaggtcggtaataagccggccggcgctgtcagcacaccggaaagaagtattcccccgtcacggacgatgaaacagccgccttcgcgggaaaaagcccccgcactgcgcccgagctggcatgataacagcgcggagccggatgtggcttaccgttccaacgttaacccgaagcacacctttgacagctttgtggaaggtaaatcgaaccagctggcgcgcgcagccgcccgtcaggtggcggataacccgggtggcgcatacaacccgctgtttttatacggcggaaccggtctgggtaagacccacttattacatgccgtcggcaacagcattatggaaagcaaagccaacgccaaagtggtctatatgcactcagaacgttttgtgcaggatatggtcaaagccttacagaacaacgcgattgaagagttcaaacgttactaccgttctgtcgatgccttactgatagatgatattcagttctttgctaacaaagagcgttctcaggaagaattttttcataccttcaatgccttactcgaaggtaatcagcagataatcctgacctccgaccgctacccaaaagaaattaacggggtggaagatcgcctgaaatcgcggttcggctggggattaaccgttgccattgaaccgccggaactggaaacgcgggtcgccatcctgatgaaaaaagccgatgaaaacaacatccgcctgccggatgaagtggctttctttattgcgaaacgtctgcgctccaatgtccgtgaactggaaggtgcactgaaccgggtgattgccaacgccaactttaccgggcgggcgattaccatcgattttgtgcgtgaagcactgcgggatctgttagcactgcaggagaaactggtcaccatcgataatattcagaaaactgttgctgagtattataaaattaaagtggctgatctgctctccaaacgccgttcgcgctctgtcgcccggccgcgccagatggcgatggcactggcaaaagagctgacaaaccacagtttgccagaaatcggggatgcttttggcggccgtgaccacacgaccgttctgcacgcctgccgtaagatcgagcagctgcgtgaggaaagccacgacatcaaagaagatttttctaacttaatccggacattatcatcatag

SEQ ID NO: 276407 - DNA, 141 bp, Morganella morganii
atgaaacgcacttttcaaccgtccgtactgaagcgtaaccgttcccatggtttccgcgctcgtatggccactaaaaatggtcgtcaggttctggctcgccgtcgtgctaaaggccgcgctcgtctgaccgtttctaagtaa

SEQ ID NO: 276408 - DNA, 327 bp, Morganella morganii
ttgttaactcccgagcatttcaactttgtcttccggcaaccacaacgggcaagtactcctgaaataacacttctgggacgccgtaatgagctggaacatccccgcattggtcttaccgtcgctaaaaaaaacgttaaacgggctcatgagcgcaatcgcatcaaacggttagcgcgtgaatactttcgtctgcaccaacatgagttgcccgatatggatttcgtgcttctggtaagaaaaggggtatcggagttgagtaatcgcgagattacggaagcattgggtaagttatggcgtcgtcacagtcgcttggcgcacgcttcctga

SEQ ID NO: 276409 - DNA, 1623 bp, Morganella morganii
atggattcgcaacgtaatcttctattcatcgctttgctactcgtatccttctttgcatggcagacgtgggaaagtgataagacacaagcacttaacgcggctactcaggcaacgcagcagacgacaacgccaagtggtgaaagcagcgggcagaacaaatatattacggtcaaaacagatgtgctgtcactgaacatcaatctgcgcggcggtgatattgatgaagctgaccttttggcttacccggcaaccttaaaatccgcagatccgttccgtttactggaaacaacacctgaatttgcctaccaggcaatcagtggtttaaccggtgtgaatggtccggataacccgaataattacaaagatcgcccgctgtataccactgaaagcgatacatttgtgctggcggaaggccaggatgaactgcgtgttcctctgactttcgttctggatggtgtcacgtatgtgaaaacctataccctgaagcgcaaagactatgccatcagtgttgattacaccatcaaaaacgacacctccgctccgctggaaatggcgtttttcggtcagttaaaacaatctgtgaatttaccggaacgtcttaacaacggcagcagcaactttgcgctgcatacctaccgtggtgcggcgtactcgtctgaagacactaactacaaaaaatacagcttcagtgatatcgaagataaaccacttaacatcaacagtaatgttggctgggtggcgatgttacagcagtattttgcgacagcgtgggttcctgagaaaggcaccaccaataatttctatacgctgtacagtgccaaaaccggcgatgcattcatcggttataagagtgatgcaatccgtatcggggcaaacagcgaagcgaaatataacgcaacactgtgggtcggccctgaactgcagaacgaaatggaagctgtggcaccacatctggacttaaccgttgattacggctggttatggttcatttctcagccgctgttcaagttactgaagtttatccacagcttcatcggtaactggggcttctccatcatcgttatcacctttattgtccgcggtatcatgtatccgctgacccgtgcgcaatacacctctatggcgaaaatgcgtatgcttcagccgaagctgaaagcaatgcgtgagcgcatcggtgatgacaaacagcgcatgagtcaggaaatgatggcgctgtataaagaagagaaagtgaacccgctgggtggctgcttaccgctgattatccagatgcctatcttcctggcactgtattacatgctgatgggctcagtggaactgcgtcacgcgccgtttatcggctggatccatgacttatccgcacaggatccgtactatatcctgccgattctgatgggtgcaacgatgttcgtgatccagaaactgtctccgacagcggtcactgacccgttacagcagaagattttcacctttatgccggtgatcttcacagtcttcttcctgtggttcccgtcaggtctggtgctgtactatatcgtcagtaacctggtgactatcctccagcagcagattatctatcgcggtctggaaaaacgcggtcttcacagccgcgacaaaaaataa

SEQ ID NO: 276410 - DNA, 1386 bp, Morganella morganii
atggtcatgaataacgctgaaattcagagcaccgataccattgtggcacaggcaactccgccgggacgcggcggagtcggtattttgcgtgtgtccggcccgcaggcggcacaggtggctcagattgtactggggaaactcccgaaagcgcgttatgccgattatctgcctttccgtgatgaaaccggcaaagtgctggatcaggggattgcaattttctttcccggcccgaactcctttaccggtgaggatgtgctggaactccagggacacggcgggccggttatcctcgatttattgttaaaacgtattcttcttatcgataatatccgtatcgccaatcccggtgagttctctgagcgtgcattcctcaatgacaaactggatctggcgcaggcggaagctattgctgacctgattgatgccagttcggaacaggccgcccgttctgcgatgaattcattacagggcgctttctccggggaagtgcatcagatggtggaagcactcactaacctgcggatttatgtcgaagcagcaatcgactttccggatgaggaaattgattttctctcggatggtgtgattgaagctaaactcgataccgtgattgctgacctggaacgggttcgttctcaggcgcgtcagggcagcttgttgcgtgaggggatgaaagtggtgattgccggtcgcccgaatgccggaaaatccagcctgctgaatgctctggccggacgcgaagctgcgattgtcaccgatattgccgggactacccgtgatgtgctgcgtgaacatattcatatcgatggtatgccgctgcatatcattgataccgccgggctgcgcgaagccggggatgaagtggagcggatcggtattgaacgcgcctggcaggaaattgcacaggcagaccgcgtcctgtttatggtggacggtaccacggtggatgaacagacccccgaacaaatctggccggaatttatgtcccgcttaccggccggtatcccggtcaccattatccgcaataaaaccgatatcaccggggaaaccaccggcatcacagagcggaacggcgatacgctgattaaactttctgcccgcgaaggccacggtattgatttgttgcgcgatcacctgaaaaccaccatgggatttgaaggcaacaccgaaggtggattcctcgcccgccgccgtcacttacaggcactgaacacagctgcagagcatctgatctccggtcacgagcagttagtggttgcccgctccggcgaattactggcagaagaattgcgcctcgcccagcaggcactgagcgaaatcaccggggaatttacctccgacgatctgctcgggcgcattttctcgagtttttgtatcgggaagtaa

SEQ ID NO: 276411 - DNA, 948 bp, Morganella morganii
gtgatccagacacccaaaggccactttaccggaattgccgtcattatcctggcctccttcttatggggaaccaccggggtttctgccaccttcgcaccggatgtcagtcctgttgctatcggtgccgccgccatgggtttcggcgggttgctccaggctgcgattgccatcacccctatccgccgcagcctcggcactttccggcagcaatggcatttgctgttattgggtgccgttgctgttgccgtttatccgctcgccttttacggctcaatgcgactagccggggtgactatcggtactgtggtgtctatcggtacagctccggttttatcagcaattattgaaataatcatggacggtgcccgcatgacactgcgctggctgagcggtgcagtactcggcctgacaggtatagcgcttctttccctttccggtggcacagaacagattgccgcggcggatgcatccgccacactgaccggtgtcatactggggttgctcgccgcctttacttatgcgctttattcctgggccgcacgccgcctgatgcagcgcaacatcccatcacgggcagctatgggcggtattttcgggatcgggggattactgctgatgccggtattagcactttacggcgcgccattcctggattcgtggcaaaacgccgcagtcggcatttacatggcttgtgtaccgatgtttctgggctatgtctgtttcggttatgcgctggcgcgtattcccgccagcaccgccaccacaattacactgctggaaccggttgtcgccgccgcactcgccgccattattgtcggcgaacaactcaccgctgccggctgggccggagtcgtactgattttcacctgtctggtctgtattacactacctacccggcgtaaggcacaggcagtgaatgtagctgtcgttaaaccgaatcagtgttag

SEQ ID NO: 276412 - DNA, 594 bp, Morganella morganii
atgaaggacaccgacacaacacagacccggctcagtgccagagaccgtttactggaagccgcaggcatcctgttttacaacgagggcattgcggcaaccggtattgatacgatcaccaaaaaggccggtgtcgccaaaaaaagtctgtataacaatttcagctccaaagctgagttggtgaccacttacatccggctgaggcatgaagaatggctagcgttatatgatgtccgtctgcaacaggcaacaaccccggtacagcggatcctggcggtatttgatgcttatcacgaccatgctgagtttgcctatgaacggggattcaggggatgcggcctgctgaatgcagcggcagagtttccggtcggcagtgaggaacgccgcgaagtgtgtgctcacaaatctgaagtggctgatattatccgcaagaatctttatcagctgctgccggaagacaccacgaaagcagagcaactgaccgcacacctggcgttcttactggaaggtgcgattgtactcgccgggctggaagagcatggtgcgcgggtattacaggctgccgccatggcaaaaaccatgctggaggcactgtga

SEQ ID NO: 276413 - DNA, 798 bp, Morganella morganii
atgtacggcgcaatagcattaccgcatccgcctttcctgttttcccgggaaagaaccggaacgtggcagcagatggtttctgttgctgcgatcggtgtgtgtttctccgtcgccgggctgctcatcacgggcagccccccggtgaccaccccgcaacagcatcagattgataaccggggacaaacaccagcggtttccgttgccattcagatgaatgcagcacctgtatatcaggaaacagagccggaagcggaacaattaccaccaccacaggaatcaccgtctcaggcagaactggcaaccgcccgccggaaaacaccggagaaaacaaccaaaccgccatcagcaaaaccggcagtaaaagcggtgaacaaaaaggcggagaaatcagaaccggttaccacagcaaccaccgcagataccggagaggataaaaccacacagcagcagtccggcggacaggcagtatccccgacaaattctgccaccgcaggaaccgataaccggaaagcacaggaggattactttaatctgctgcggcaaaaaattgaggagcaaaaacattacccccgccgggcccgcagcgccgggcaacgggggatcagcaccatctcattttcactcgacgataacggcaaaccttttgcaccggtggttacccgctcttccggttatgaattactggataacgccgcaatggatgccgtcatcagggttgctgctgtcggtacgccgccgccgggcgcaaagcggagggtgacattctcattacgttttcagctgaataaggggttttag

SEQ ID NO: 276414 - DNA, 2943 bp, Morganella morganii
atgtcttcgcattcaccattatcaggtcatccttataaaaccgtcacactgcttctgcccgtgttgtttattccgctgccggggctggcagcagaggaaaaaaatcagcacctgggcgacattacgctccgtaatgaacaggccgctgctgacagcgccaaagataaaatctatgacaaaaatgtctccaccctgatcctcaccaaagaagaaatagagcgctataaaggcgcctctgccgccgatattcttaaaggcgccaacggggtattcagcggtgatgcccgcaacggtaatgcgctggatgtcaatatccgcggaatacaggggccgggccgtgtaccggtcaccatcgacggcaccgaacaggccgtgacggtgtaccggggttataacggtgccaataaccgtaactaccttgacccgatgctgatcagtgaaattgagattgaaaaaggcccatcccttaatccgctcctgaaaacgtcggtaggcggcggcgttgccatgaaaacactcaccatcaatgacgtggtgaaaaacggtgaccagtttggtgccgcactgatgctggaaaacagcagtaacaccaccaaagcccggataccaaatctgggggtcggagaagattaccgccttgtggataatatgcagttcaattggtttatcattgacgaccccggcacccatttaactccggaaaaccgggataatgcccccgcactgaataacagtgattatgcctggcgtctggcagtgggtacccgtcaggaaaatatggatctgttactggcttatgcctaccgtgaccggggaaattattttgccggtaaacgccacagcgaaaactataatgacgaaatgtctgacgatgatatcggtattctgcaaacatccaacaaaacctatgacccgtatatgccgtttgtgtcccgtatttaccgcaagggtaatgaagttcccaatacatcggcaaaaacggaatcctggctgataaaaaatacctggtatctgaatgatgaccacgcgcttcaacttagctggcgcgatacccgctctgatttcggcgatattatgccttcacggctgggctggatccgcgctgaagataatattatcccgcagtggccgctggctgacctgcatgcacaggccggttatcttcacttaaaatcacaaccagcacatcttgcctatattgatgctgatatccgcctgtggaccaccctgaccaccagcaacactaactctgccggtggctggccgcgctacccgaaaaatatggactacggctataaacagggggatatcagcactatcaatccggcaatcgacggcacactggtaaataccgctaccctgaatgtacagaatcagcgctacgggctggatttcagcaataagtttgctttcactccggaactatcggtgacactggccgccaatatgcagtttgaacatctggacagcaataccagcctggaaaactacaaactctttatgtttgcagtccctgcccgtaaaggccgccgctttgaatatcagcaatccgtcagtctggattggcagccggtctcctggctgtcgctcagtgccggcggcagacaaaccgtatactggagtgtggatgatctctccaatgagtgcgccgcccgcaaagacccctactgtaaacaaaactatgaagttaccggttattacctgaactatttccggaatatgactgaaacagaatcacaggtttataaaaaacggcagcagggcctgtggcacgagctaacccccgaagaaagacaagcaatacagggaaaaatttttcagcctatatacccgaaatggcgtcgtgattatcttgataaccgaaaagaccggccaatggtacatgaacgggcattctggccggtggataccagtgacggacgcctgaaaaataaagataagccagatatagataccgcattgcggggtattgatccctataccgggcaggaaacttatctctatgaatacggcccccatcctattcagcacggtgacagagaagtgcaacccgttacccacacctggaaagaaaaaccccgccgccaggccagtgcctggacaccgatgctgtctgcctcggtgcacctgaccgatgatcttcgtctgtatggtcgctatgcggaaaccgtacgtatgccgagcctgtttgaggatactgtcggcttttccggttcctctaccccgcatatcggttaccgttataaaccggaacgcgctgtaacccgggaatacggtgtggtttttaacgggaaatcactgctccgcgccgaccgtcactcagatatccggctgaattatttccatacggatatccataatgtctttgatcgtgataactatttccgttttacacaaatggataagcagatcctgaaagggattgaaatccaggcccgttatgatcatggctggatcttcagtgatctgggggtgacctataacctcaccaataaagtctgtgatgaaacatcccatgcctttatggatcctaccgggctgaaagatattccgccatgcattgacggtggttatccgggcgggttcctgcgcacccaaattcagccgcactactctgtgacctttaacctcggcgggcgtttattgcaggagtcattagaaatcggcagccgctggctctaccacagtgcagtggaaaacagccaggagaaacgcctgatgacgattgtccctaaccaatacagcaattttaataactacccgatgcgatggaattcagtactgaccgtagatgcttatgccaaatataaaatcaccccggatgttgccctcgaactgacggccaccaacctgaccaatgaatattacctcgacccgctcacccggtcgatgatgcctgcaccgggccgggccgtaaaattcaatgtctctgcgaggttctga

SEQ ID NO: 276415 - DNA, 1353 bp, Morganella morganii
atgtcgtcgcagataaagttaatttacggatttattctttttttattattacttgttttttcattacctgtatctgcaactatacaaaaaaacaatcattcagaaaataataatactgcaaaaaacttatatctttcactaaagaaaaataacctcaaagcgatttatcattacttatccgtttatcagcaggaacatcaggctgatccgttactgattatcttcagccaggcaaaactggcctatttaaaccagcgccccggggttgctatcgggttatataataccattctgcaacagaaaccccatttctttgccgcacaactggaactggcccgcagctaccgggccgatcgccagatcgggaacgccttgcttttgttccgggaactgagtcagcgcctgccggtgacctctccccactatccggagattacccgcaccattaccgaactcacccgggtactcagttggtcattactgctcagcgccggcagccattacacggataattattatcagaccccgctgccaaaaacacactgcctgcactacagccccgatggttcctgttacgccagccttattccgcagatcccctatgccgtcttgcaatggcgcagcgactgggatctgcgcaagctgacaccgctgtccggctcgcattttctgacgcagcactaccgggtatccacccgctatgatgccgcgaatcaggcagccaataccgtaacactgacggctaaaacgggttatcactatcaggatcgccatactttatggcaactgaccccgctgctggagcagcatttttccgccgggcgccgtttttcctccgcttacggcttacaaacatatctgaatcagcaactcagcccggagtggtctctgggcggactggcggcactgcgacagcaccgttatcagcccggtctgaactcacataacggtaccgaatatcagctgataccgcagataacctggcatccgcatccggcagccacgctgtatttacaggcagaaaccaccgttcacaaaaaaaatgatccctataaacattaccggacggctgccctgcataccggcatgacctacctgtggcatccatctgtgtcccaatctgttcatgccgtttacacccgtaaacgttatcaccatacacatccgttacaccgccaggccagggaggatttaacccgacagtacagcacaacactcgcgctctacccgccgtcattcgcgcagatttcacctcagctttcactgatccacacccgtaaccgcagttctgtaccgtggctttatagctaccggcagactgaagtcatgctgcgttttgaacggctgttttaa

SEQ ID NO: 276416 - DNA, 780 bp, Morganella morganii
atgaatacattcaacatgaaaaccccgctcgcgacactggttaccctgtgtgccgcattctccgcggtacaggctcaggctgacgcgggctatggatcatcatctgccgaaggcttaagtaactatatatctgtcggcgtaaccgctgcatcagagcgtcaggggcacccgtcaccgggcggagaaccgggaatcggttattccggcatgcacaacggaatgaaaatcagctttgccggactgcagggccccaaccgtgcagcaccaaacgataacggagtttctgttatcacctccactccgcagtcacaccgcaatatgggctcttttaactttgccaaaatagcggatgccgatatttattacggtgaatgggcttccggtactgatttcagcgatgattcccatatggtgtactacgcagggaaagatatcaccgctgctatgccatccgaagggacggcacagtacagcattaaaggactcagcaagtacagcagcggtgaacagatcagcggcacattcagcacggattttgatgctaatacctttaccggctctctcagctcaaccgatctcagctacagcctgagcggcactgtcagtggttcagcctttgatggtactgcatctgtcagcaccaccggtactgataccacaactgtcagcggtacgaccaacgggcatttctttggtgacaatgcacagcatgttgccggttatgctgagttcagcagcgataaagagaaaaatatcgcgttcggcggaaccaagtcctga

SEQ ID NO: 276417 - DNA, 435 bp, Morganella morganii
atgaaacaaacgctgatatttttactgttaacggtgctgacctgcggatccgcgtcggccacatggccgcaaatagggagaagtgatttttctgagcgttatgaggtgattaccctgacaccggatatgccggtgcccggtgcggcggataatgacccggcaacaaaaggtttgcggctgatcggcctgcggcgtgacggtaacggggagtacactgaggttacccggcagttttctccgggagcgacaaaacatatccgctataaaggacggcagtaccgggtggccggggatgtttaccgtgcggataatctgtcagataccggacgctgggataaagggcagtccgtggtgacggaagagtattacgagattctggataaagacggaaaacggacaggaaagggattttatttttcgtcgcgtgaccgctga

SEQ ID NO: 276418 - DNA, 765 bp, Morganella morganii
atgtcatcagtccggatcctcagtgttgcacagtgtcatgaatcgctgctggacagcgcggaagcactggttgcggaacaatggccgttgtttatgttagccagtccggtttctgaccagtactgggatgcactttatcgtgaggaaaatttgccttttcagcaggttgcggttgtaaccgttgccggagaggaacaggtcatcgggcttctgagtgcgattccgttttattttccggaagatgcaccgctgactgatctgccggatgagggctgggatgcggtgctgacacagggagcaaccgatacccggaaaccgacatttgtatccgcactgtcagtgaccgttgacccggattttcgcggacgcggtatccctgcacagctgatcaccgcgctgaaagcggccgttgcacaagccgggctgaagggcgtggtggttccggtgcgccctgcgcttaaggcacagtatccgttacaggatttcgcggaatattgtcagtggcagaccccgcagggtgagccgtttgacccgtggatccgcacacatgtccggctgggcgggcagattatcaaaccggctatgcgttcgatggatattacatcctccgctgataactggtctgaatggacaggaatggcctttccgcacgccggtcagtatattgtgccgggtgcgctggtgccggttcaggccgatcctgaaacggatcgggtcatttaccatgagcctaacctgtggatctatcatccgctggctgaatag

SEQ ID NO: 276419 - DNA, 831 bp, Morganella morganii
atggatgacatttattccatagaatcgttacataattgcctaattcgcggtgcgcatctcacaaatgtgcaacaaaaaagtaaacccgggcataatgaaaatgactgggtcgcagaagagacgccggttgccctggtgtacaacggtatctcccatgtggtgatgatggccagcccgaaaaacctcgacgactttgcggtcggtttttccctttccgaaggcattattgaatccgctgatgaaatccgcgggattgatattacggatgcctgccacggcggatttgaagtccacgttgaattatccgcccgccgttttgccgggctgaaagagcgccgccgcaatatggccgggcgcaccggctgcggcatctgcggcaccgagcagatcagcgagattttccgcccgatcacaccgctggatttcacacagaccttttctctcagccacctcgatgaggcactcagcctgctgccgcaggtacaggaaataggaaagctgaccggctgcactcacgccgcaggctggatttctccgcagggtgaattactgggcggttgtgaagatgtcggccgtcatgtggcgctggataaactgctcggtatgcgggcaaaagcacagtggactgatggtgttgtgctggtctccagccgcgccagctatgagatggtgcagaaaagtgcgcagtgcggcgcggaaattctgtttgcggtttccgccccgaccacgctggcaattgaaaccgccaaacgctgccgcctgacattggccggcttctgtaaaaaagggcgggccacaatctatacccaccctgaacggctgatcccctga

SEQ ID NO: 276420 - DNA, 588 bp, Morganella morganii
atgcaagtcagcagaaggcagttctttaagatctgcgctggcggtatggcgggtacaacggcagcggctctgggctttgccccggcggtcgctattgccggttcacgtcagtataagcttttacgcgcacgtgaaacccgtaatacctgcacgtactgttccgtcggctgtgggctgttaatgtacagtctgggtgacggggcaaaaaacgccaaagaatctatttttcacattgaaggggacccggatcatccggtaaaccgcggcgcactgtgcccgaaaggcgcaggtctgatcgattttatccacagcgaaagtcgtcttaagtatcctgaagtccgtgagccgggcaccaacgagtggaaacgtatctcgtggaatgaggcgtttgatcgtatcgcccgcctgatcaaagatgaccgcgatactaactttattgaaaagaacagcgatggcgtcaccgtcaaccgctggttaaccaccgggatgttatgcgcatctgctgccagtaacgaaaccggatttgtcacccagaaattctcccgcgccctcggcatgcttgccgtggataaccaggcgcgtgtctga

SEQ ID NO: 276421 - DNA, 2412 bp, Morganella morganii
atgaccaaccactgggttgatattaaaaatgccaaccttgttgttgtgatgggcggaaacgctgcggaagctcaccctgtcgggttccgctgggcgatggaagccaaaattcataacaatgccaaactgatcgttattgacccgcgctttacccgtactgcggctgtggcggatttctatacgcctatccgttccggtactgatattgcgttcctgtcaggtgtcattaagtacctgatggaaaatgaaaaaatcaaccgtgaatatgttgaggcgtacaccaacgccagcctgatcgtccgtgaagattacgattttaaaaacgggctgttcaccggttatgatcctgaaacacgccagtacgataaaaccacctggaattacgaactggatgaaaacggctttgcgaaacgcgataccacactgcagcatccgcgttgtgtgtggaacaagctgaaagagcacgtcagccgttataccccggatgtggtgaccaatatctgcgggacgccgaaagaagacttcctgaaagtctgtgaatatatcggcgaaaccagcgcgaaagataaaactgcctcattcctgtatgcactgggctggacacagcacactgtcggtgcgcagaacatccgtaccatggccatgatccagctgctgctgggtaacatggggatgctgggcggcggcgtgaacgcactgcgcggtcactccaatatccagggcttaaccgacctgggtctgctgtctcagagtctgccgggctacctgacactgccgtctgacaaacagactacactggaaagttatctggctgccaacacaccgaaaccaacggtgcagggccaggttaactactggggcaactatccgaagttctttgtcagcctgatgaaaaccttctacggcgacaaagcgcagaaagagaataactggggctttgactggctgccgaagtgggataaaggctacgacgttctgcgttatttcgacatgatggataaaggggaagtgaatggctatatctgccagggctttaacccgttagcctcattcccgaacaaaaacaaagtggttaaggcgctttcaaaactgaagttcctgatcacggttgacccgctgaataccgaaacatcgaacttctggcagaaccacggcgagatgaacgatgtggatccggcacagattcagaccacggtgttccgtctgccgtcctgctgtttcgcggaagagaacggttctatcgttaactccgcccgctggttacagtggcactggaaaggcgcggatgccccgggcgaagctatcagcgacggcgaaatcctctccgggattttccaccgcgtccgcaagctgtatgaagcggaaggcggtaaggtgcctgagcaggtgctgaacatgacctggaactacttcgaccgtgataatccgacaccggaagaagtcgcgcaggagagtaatggtctggcgctggtcgatctgaaagatgctgacggcaatgttattgtgaagaaaggcgagcagctcacctccttcgcacagctgcgtgacgacggtaccacggcaagcggatgctggattttcgccggcagctggacaccgcagggtaaccagatggcacgccgtgataacgctgacccgaccgggctgggtaacaccctcggctgggcgtgggcatggccgctgaaccgccgcgtgatttataaccgcgcatctgcggacccggcgggtaaaccgtgggatccgaagcgtcagattctggaatggaacggcagcaagtggatcggtatggatgtgccggactacagcaacgccgcgccggattcggatgtcggtccgtttatcatgcagccggaagggatgggccgcctgtttgctatcgataagatggcggaagggccgttccctgagcactacgaaccgattgaaaccccgctcggcactaacccgctgcatccggatgtggtctccaacccggcagcccgtgtcttcaaagatgactgggcgcagatgggtaaagccgcggaattcccgtatgtcggtacaacttaccgtctgacggagcacttccactactggaccaagcattcacggttaaatgctatcactcagccgcagcagtttatcgaaatcggtgagcgtctcgcgaatgagaaaggtatttcccacggcgatacggtaagagtcagctccaaacgcggttatatcaaggcgaaagcagtggttaccaaacgtatccgcaccctggatgtgaatggtcagaaagtggataccatcggtattccgattcactggggctttgagggtgtggcggtgaaaggctttattaccaacacactgacaccgtttgtcggggatgcgaatacccagacgcctgaatttaaagccttcctggttaatgtggaaaaggtgtaa

SEQ ID NO: 276422 - DNA, 942 bp, Morganella morganii
atgtcaatgcaatcacaggacattattcgtcgctctgccaccaattccctgacccccgcacctcaggtgcgggattttaaggaagaagtggcgaagcttattgacgtgaccacctgtatcggctgtaaagcctgtcaggtggcctgttcggagtggaacgacatccgtgacaaaatcggtaccaacgtgggtgtgtatgataacccgcaggatctgtccgccaagtcatggactgtcatgcgtttctctgaagtggaagagaacggcaaatttgagtggctgatccgtaaagatggttgtatgcactgcgcggacccgggctgtctgaaagcctgtccggcagaaggcgcaatcattcagtatgccaacgggattgtcgacttccagtcagagcactgtataggctgcggttactgtatcgcaggctgtccgtttaatgtgccgcgtatcaacgaagaagataaccgcgcttataaatgcacactgtgtgttgaccgcgtggatgtgggtcaggaaccggcgtgtgtgaaaacctgtccgactggggcgattcatttcggctcgaaagaggatatgaaagcgctggccggtgatcgtgtgactgagctgcaaagccgtggttatgccaaagccggtctgtatgacccgcagggtgtcggcggtacgcacgtgatgtatgtgctgcaccatgccgataagccgcagttatatcacggcctgccggagaatccggaaatcagtgccgcggtgaaattctggaaaggcgcgtggaaaccactggcagcagtcggttttgcggcgacctttgcggcggcaatcttccattacgtgggtatcggcccgaaccgggtatcaaaacgcgaggaagaagaggccctgaaagatattcaggatgttccggcaaagactgagcaatcagcaggtcaggaggagcagaaataa

SEQ ID NO: 276423 - DNA, 651 bp, Morganella morganii
atgcaacaggatgatcgcgaaaaaattatccgccacaaaccaattgagcgtgtgaatcactgggctgtggttatttgttttctgttcacggccatcagcgggctcgggtttttcttcccgtcgcttaactggtttatgaacattctgggtaccccgcagttatcacgtctgctgcatccgtttaccggtgtggtgatgttcttactgtttgtgtttatgtttttccgttattttaaacacaactttatcaaccgtgatgatatcgagtgggcgaagcagatcggcaaaatcatgaaaaatgaggaagccggtgatgtcggtcagtataacctcggtcagaaaggggtgtactgggcggccagtatctgtctgttcctgctgctgctgagcggtatcgttatctggcgtccttactttgcggaatatttctccattccggtgatccgtatcgcgctgctggtacactccatttccgctatcgggctgatcatcactattattgttcacgcgtatgcggcaatctgggtgaaagggtcagtgcgtgcgatgacggaaggctgggtaacgcgcggctgggcgaagaaacatcacccgcgctggtaccgtcagattgtggcaaaagagcgcgaagaggataaaaaaggtcagtga

SEQ ID NO: 276424 - DNA, 927 bp, Morganella morganii
atgagtatccgaattgtatccaaagaagagctgggacaggctcagaaaaatgaaaaagggattggctttatcccggcagtactgtttcctaatctgaagaatctgtatcagcgccgtgccgaacgttttgatgagctggccaaagataacccgtttgcggattacctggaatttgcggctgaaatcacccgcgcccagcagaaagccctgtatgacaatccgcttgaaatggatatggatgccctgatggccgccaatataccgggcaaagccctgctcgactgccgcacctttcagcgcacggaacactggcgcaaactgctgaaaagcattatcgccgaactgctgccggtcgcaccggatcatgcccgtccgaccctggaaaacctggacaaagcctctgaaaatgagctggaagacatggcaactgccttgtttaatcaggaattttctgctgtatcaccggataagtccgtgtttatctgggctgcattatccttgtactgggcgcagatggcgtcgatgatcccgggcaaaggccgcgaagagcacggcgaacaccgtcagttctgcccggtctgtgcggcaatgccggtctccggcgtgattcagattggcaccacacaggggctgcgttatctgcattgcggattatgtgaaactgaatggcatgtggtccgtattaagtgcactaactgcgagcagacccgagatctgaattactggtcactggaaagtgagcaggcggcggtgaaagcagaaagctgtggtgattgcggcagttacctgaaaatcctgtcacaggaaaaagacgcgaaagtggataccgtggcggatgacctggcaacgctgatcctggatgcccggatggaagaagaaggttttgcccgcagcagtatcaacccgtttctgttcccgaacgaataa

SEQ ID NO: 276425 - DNA, 1383 bp, Morganella morganii
atgaacgaacgtgcattatacagtcagatacctgccattgacgggttattacatgaaacaccggttgccgcgctgacagaacagtacggacagacctgtatcgtcggtgtgctgcgggagatgcaggatgatgcgcgtgacgcgatccgtgagcggcagcagttgccggactggcacggttgctgggcggatgaactgtcccggcgcctgaacggcgagcgggaagcactgcggccggtcataaacctgaccggtacagtgctgcacaccaatctcggccgggcattacaggcggaagcggctattgaggcagtgaccaatgccatgcgctggccggtcacactcgaatattcccttgatgatgccgggcgcggtcaccgcgacagcattgtcgcggagcgtctgtgtcagctgaccggcgcggaagcggcctgtatcgtcaataataatgcggcagcggtattactggtgctggcgacgatggccgccgggcgggaagtgattgtttcccgcggtgagctggtggaaatcggcggtgccttccgcgtgccggaagtgatgagccaggcgggctgtcgtctggttgaggtcggcaccacaaaccggacccatctgcatgattataaaaatgccgtcagtgagcagactgcgctgctgatgaaagtccacaccagtaattatcatattgaaggttttacggcagaggtctccgggcaggaactggcggaactcggccgggaatatactatcccgtcagtgattgatctcggcagcggtgctctgattgatatgacacagtggggattgccggaagagccgatgccgcagcgctatctggcgcagggcattgatattgtgactttctccggtgataaactgctcggcgggccgcaggcggggattattctcggcaaaaaagcgtggattgaggcaatacagcgccatccgctcaaacgcgccctgcgggcagataaaatgactctggcggcgctggatgccacgcttcttctgtaccgccgtccggaaaaactggcgcagacactgccgtcactgcgcctgctcacccggtctgctgacgatatttatgatatggcacaacggcttgtgccgaaaattcaggcatattacggtgatgaatgggtgatccgcgcagagccctgctcctcgcagattggcagcggatccctgccggtggaacgcctgcccggctgggcagtgacgtttaccccgcaaaacggaaaaggcagcgccttagccaccctgacgcagtctcaccgtcagctgaccattccggtgatcgggcgggtgagtgacgggcgtctgtggtgggatctgcgttgccttgaagatgaaaaccgacttttacaggcactgttaccatga

SEQ ID NO: 276426 - DNA, 1863 bp, Morganella morganii
atgatttttgctacagccggccatgttgatcacggaaaaacggctcttattcaggcggtaaccggcgtggataccacccatctgccggaagagaaaaaacgcggaatgaccatcgacctcggctatgcctactggccgcaggatgatgatacggttatcggctttgtggatgtgccgggccatgaaaagtttctcggcaatatgctggcgggtatcggcgggatccgccatatcctgctgattattgcctgcgacgacggggtaatggctcagacccgcgagcatctggcgattctgcgcctggcaggccgtccgcaaatctctgtggtgctgaccaaagcagatcgcgtcccggcggagcgggttgaggaagtccggcaggaaatcacagaactgctgttatctgacggctggccggaaagcccggtctttgtcacttcatcccataccggcgaagggctggatgcactgcgggcgcatctgcgtctgcaccatcagcagcaagcctcagacagccggacagaaaaacgtttccggatggcgattgaccgtgttttcagtgtcaaaggggcggggctggtggtgacaggtaccgcgctggccgggcgtgtcagcaccggtgacacattatgggtgaccggcagtgataaatctgtccgtgtgcgcggtattcatgcccagaaccgtcagcaggaacaggctcaggccggtgaccgcgtggcgattaacctgagcggggatgtcagcaaagagacggtttcccgcggcgactggctgctgagtgaaaaaccggtgcagtccgcacaccgcattctggcggaaattgaaacagatgaaggtctgaaaagctggcagccggtgcatattcaccacggcgccagccatatcaccgggcgggtctccctcctgagtgacgataacacccgtccgctgctggcggaaatcacccttgataccccgctctggctgacggaagaagaccggctgatcctgcgcgatatcagtgcgcagcgcacactggcaggcgcccgggtgctgaatttgtcttctccgcgacgcggaaaacgccgtccggaatttctggcgtggttatcagaacgggcagcggcacaggatgatcgtgatgtcctgatgtgcgaactgccgcgcggggaggtttctctgccggtgtttgcctgggcgcggcagctgacagcggaaaaactggcggaatgtactgacgggctgaatctgctgatcaacgacggttatgccctttcggcacaacgggttgaaacggcaaaagccattctgctggctactctggcggattatcatcagtcacacagcgaccagatgggcgtcggtcgtgaccggctgaaacggatggcattaccggtgctttctgattccatcgtatttccggttattacacaattactggatgaaaaacagattgtcagaacccgtggctggctgcatctgccgggattcggtctggctttcgatccggctcagggcgcgctctggcacagtgcggaaccgctgtttcagcaggagccgtggtgggttcgtgatctggccgttaaactcggtattgatgaaatcgctgcccgtcagtttctgaaaaaagccgcacaactgggtcatatcatggcgattgtgcctgaccgctattatcaccggtcacaaatcacggaattcgcgcaggttatccgtgaatataatcagacacatgaagaaggtatcggcgcggcacaattcagggataaatacggcatggggcgtaagctggccgtacagattctggagttttttgacaggaccggttttacccgccgcagaggggacaaacatattttgcgggatgagggactattctga

SEQ ID NO: 276427 - DNA, 852 bp, Morganella morganii
atgaagatcgatttggaaaattttgtcagtgaattcaataaagagaaattcacgagctattacgtcagaaatgcgcaaatgtatggctgggaattagcctgtatcgaaattgaaacgggggcatttaaggttgcgctcgatattgatttcaggggaaatatctggctggtattcagggattatgaatctctggttctttttcagaagagccttaaacgtgattttgattttaaaacactgatttatgacggccggaataaaaaatatgaattcagccggatcccgctggatgaaacagataccgtctcgatagcccgcggaattaccaatgatatcatcggtttttataatgatatcgctgccgatttttatgcccgcaaacagacggaactggcctgtgcgattgaatctcatcagtaccgtgatctgctgaataaaacgctggatgacatgtgtcatttctttaaaggaaagcgtttatccgcgctggaaacggtacagcggataaaagagcagcagtgcggtttttcccgctatgataatgacgaaatcgtgctgatgcaggaaaaaggtgtttattatcagaaagcaaataaaatgctgatgtatgaattacggaatatcagcaccggtaattacaatacactggtgtgttttccgggtatgcagactgagagcgattcatggcttaaattctggtctcagtactggtttctgacaaaatgttatcttgatcaaccggtttacggtgatagccgggccacgactcaggacggtttttatcagtttggcaaaaaactggcggatgcctggatggatatctgggcgggtaaaagacaccgatgcttataa

SEQ ID NO: 276428 - DNA, 234 bp, Morganella morganii
atgcctggatggatatctgggcgggtaaaagacaccgatgcttataatgatattgatctgctgaccgaacagtgtctgatgaaaaaagagattgatctctttctgattgcggcgggcccggcaggtacagtgctatctgcaaggctggcagacaacggtaaaacagcgctggatatcggtaatctggtcagcagttataatacggttttccctgaacagcttcaggcggagtaa

SEQ ID NO: 276429 - DNA, 429 bp, Morganella morganii
atgaaaatttccgcacgtaaccagctcaccggtaaagtctcccgcgttgttgccggcgctgttaataatgaagtggaattaacacttgagcatggtgaaattctgacaaccgtcatcaccaaagagagctgtgacgtattagggatccgcgaaggaaaagaagcggtcgcgattattaaagcgccgtgggtggtactggcaaatccggattgcggcctgcgtttttccgcccgcaaccagttccgcggcaaaatcagcaaaatggtgaacggtgcggtcaacagcacgattcatctgagaaccgaaaaagggctgccgctgacagcggttattaccaatgaaagccgcgacgaaatggaattacatgaaggtaatgaaattgtcgcactgataaaagcttccagcgttattttagccactaaagcctga

SEQ ID NO: 276430 - DNA, 660 bp, Morganella morganii
atgtcaagaactaacctggaaagcaatctcagttccgcacaatctgtcggagaaaaattgcttattctcctgaaaaagcatggcccgatgcaggcatccgaggccggggaacacctgggtaccaccggggaagctgcccgtcagcagtttaccaaactggcccgggacggtatggttgaggcacattccgaatgccggggtgtcggccgtccggtgcagcgctggcacctgaccgcactgggcaataaacgctttccggattgtcacgcggagctgacggtcaaaatcctgaccaccatccgccgcgaactcggcgaggatgctatcggcaaaattattaccgcccgtgagaacgaagcccgccgcgactattttgataaacttcagggcgcggaaactctggaagaacgcattatccgcctcgttgccatccgcacagaggaaggctatatggcgcaatgggaaaaagaaccggaaggaagctggctgattattgaaaatcactgtcctatctgctccgccgcccgcatgtgtcagggattctgccgcgccgagctggaactctttcagacagttttaaatgcaagtgtggaacgggtcgaatatttactcacggattctcgccgctgcgtatatcgtgtgatacaacaggaagattaa

SEQ ID NO: 276431 - DNA, 1404 bp, Morganella morganii
atgttgcccgatgacagccgctggcgtgaccttttctcagggaaaaacgctgcgatttcaatcgctctctcgttcggtgttgttattcacgccgttaatatcttaatggcgaccaccattttgccatccgttgttgctgatatcggcggcctgaatctgtatgcctggaataccacactgtttgtggcggcatccattatcggttctgtactctccgcccggctgcttgccgtatacggtgcccgtatcgcctaccttatctcggtggtggcctttttcgccggcagcctggcctgtgcactggctccccggatggagattatgctgctggggcgcaccattcagggcttcggcggcggtgttatgttcgcactgtcttatgccatgatcaatttagtgtatgttccggcgctgtggccgagagccatggcactgatttccggaatgtggggtgttgccacattggtcggtccggcagtcgggggtatttttgcccagttaaacgcctggcgttttgcttttggtgtgatgttgccgctgatggtcatctatgggctctttttgcttacgattatgccgagaaagcagaaagatgacggcacccggccacgtcttcccctgatccagctgacattactgactgccgctgtactggtggtctctgccgggagtctcagtccggatgtgttcctgaatgtgggcggcgtggtggtctcgctgttgttactgattgtgcttgcattgattgagcagcgcagccgcatccggttactgccggaaaacaccttccggcgcggcagtcatcatgccgcgctgtacatcactatctctctgctggctatcgggatgacctgtgaagtgttcgtgccgtacttcctgcagcgcctgcacggtcagtcgccgctggcatccggttatatgagtgcactgatggcgctgggctggactgtcagtgagatcatcagcgccggatggaaaggggcgaaaatgcgcgccagtattctgctcgggccggtttttgtgctggcgggattggttctgctggcactgacactctctgtaccgtctgccggtacatggggcattatgtcgccgatcctgctggggttatcgctggtcgggttcgggatcgggttcggctggccgcatctgctgacccggattttacaggtggccacacctgcggataaagagatcgccgccgcttccatcactaccgtgcagctttttgccacggcactgggtgcggcgctggccggtatgattgttaacgtcaatggtttcaatgacggtacattgacgggcgtgatgtcttcagcctactggctgatgatgttactggccattgccccgctgattgcgattttcaccgcccgtcgctgtgcggccatttcttacggctga

SEQ ID NO: 276432 - DNA, 960 bp, Morganella morganii
atgtctcagtatcatctcgaatttgaaaaaccaatcattgagctggaagaaaaaatcgccgcattgcagtcatttaaagagcgcagcagcgatttggggtttgatccggatgatgaaattgcctgcctgcggaaaaaatgcgaaaaactgacccaatcgatttatgcggatctcggtgcatgggagattgtccggctggcccgtcatccgctgcggccctataccctggattatatcagtcttatttttacggattttcaggcgcttgccggtgatcgcgcctttgccgatgataaggcgattgtcggcgggctggctcgccttgaaggccgtccggtgatggttatcggtcaccagaaagggcgggataccaaagaaaagttactgcgcaatttcggcatgccgtcaccggagggttaccgcaaggcactgcgtctgatgaaaatggccgaacgttttcatatgccggtgctgatgtttattgattccgccggtgcctatcccggcgtgggtgcggaagagcgcgggcaggcggaggcgattgcccgtaacctgcttgagctgtcgcggctgaaaaccccggttatctgctccatcaccggcgaaggctgttccggcggggcgctggggattggggtcggcgatcgtatcaatatgctgcaatacagtacctatgcggcgatttcgccggaagggtgcgcctctattctgtggaaaagcgcggataaagcgccgcaggctgctgaaaccatggggatgaccgccccgcgcctgaaggcgctcggtattatcgataccattattccagaaccggcgggcggcgctcaccgcaactatcagcaggcggcggataacctgcgtgagcagctgttgcaggatctggcggcgttatccgccttaccggaagacgaattattggcgcagcgctatcagaaattaatgtctttcggctattgctga

SEQ ID NO: 276433 - DNA, 909 bp, Morganella morganii
atggcggtcgatctgaatttactgccggtttttctggcggtggcggagcagggcagttttaccggtgcggccacccggctgggtatgccgtcgtccaatgtcagccgggccatcagacagctggaaacccagaccggctgccgcctgattgaacggacaacccggcgtatgcgcctgacagcacaaggacagcaactgtatcagtgcgccggaaaaacggactccatgctgcgggaaactttttcacagatccgcaatgatgatgtgctgaccggctgtttccggctgacagtgcccggtgaaggctgcggggaaatgctggcaccggtgctggcccgttttgccgcactgcatccggatttgcagatccggtgtgatacaaagctgaccccggcggatattatcagtgatgatatcgatctgctgctgacttatcagcgcggggagatggcagacagcagttatcacagccgtctgattcagtcctggtcgtgtgtggtggtggcagctccgtcattactggcgcggaccggtattccggtttctgccgctgagctgccccggctgccctgtatttccagcctgagtgccctgaatggtcagccgtggattttccgtaaaccggacggcggatggctgactgtgcgcattaacagccgctatcaggttaacggtgctgcactggcagcagcggcggctgttgaagggctgggttttgcgattctgaccacacatttgtgtcagcaggctttccgtgacggtacattacaggctgtccggctgaatgaagaaccggctcccatcgaactgagagccgtctatgtcagccgccgtgaggtgtcaccggttgtcgacaaatttctgcattttcttgaaagttcgctgcgggatcaggataaaaatcagtag

SEQ ID NO: 276434 - DNA, 444 bp, Morganella morganii
atgaaaaaatccgtctgggcgttatctttattattaaccacactctctgccggtgccatggcagcgaaaggaaccgtcactgtgtataaatccccgacctgcggctgctgcggccagtgggcggaaggggtggaaaaagccggttatgatgtggaaaccaatattattccgcaggcacagctggagaaaatgatgcttgattcgggtgccaccgcaaacctgatgagctgtcacctcgccacgctgaacggcaaatatgtgattggtcacgtcccggcggacagcctggatgccattaacacactgccggaaagtgccaaaggaatttcggttccgggaatgccggtcggcagcctcggcatggaatataaggatatgaaagagccgtatgatgtgatcgcctacgatgcggacggaaagcagacggtattccgcagctactga

SEQ ID NO: 276435 - DNA, 462 bp, Morganella morganii
atggtaacgcacctgacattacagataacagcaacagaaacccggattttttctgcggaagctgatgtgcggcttccgctcggcgacagtgtgattgacgggtttgtttttcaacactcgccggtaacagcttatgaagcggaagtggcaattgagcatattgaaaaccggattatcccggcgcgggcggcattaccggcgggagacctgattttgcattgcccggatccgcggctaaactatttacttaccggtgatgaagcgggcttcttatccactgaggaaatagaacgcgcgtttaatgagatcgtgaatgttatcagcggcagcccggtatcatcaacatcactcccgtcagacaaacaattcacggcgtttttactgattatccgtgagatcacccatcactggggactggcagggctggtaccgggaactgccggaaaaaatgatgtgatttaa

SEQ ID NO: 276436 - DNA, 993 bp, Morganella morganii
atgagcattacactgataaataagattaaatccgtttcttcccagttttcggccgggtatttcggcatggtcctggggctgatcggcaccgggatggcatggcgttacgcagcagctgagcagggatatccggcaatcatcggtgaggtgattattggtgccggttgtgcggtctggctggtgctgatctctctgtttattatccgcagtctctgttttccggaaaaaatgaccgacgagttccgtcatccggtagccagcgggttctccagcctgttaccggcaactaccgtgctggtggcgatggggctgacaccatacttcccgctgttttccaccggattatttgccctcggcgcagtagcacaactgtcttacgccgcgtggctggtcggctcccagtggaaaggggaatacccgaaagcggcaaccaccccggtgctctatctgccaactgtcgccaataattttatctgcgccatggcgtgcggcgcactcggttttaccgaccttggtattctctttttcggtgcgggggttttctcctggctgagtctggaaccggcgattctgaaacggatccgcagtgacgggctgatggatgaaaaatcgcgcctttctttcggtattcagctggctccggcgctggtggcatgcagcgcctatctggcggtaaaccagaatcatattgatttctttgccaaaatgctgctcggctacgggctactgcaactggtgtttatgatccggctcatcccctggtttacacagcaggcatttaccctgtcattctggagtttttcattcggtgtgtcggcgctggcaaaatcctctctgaatatcagtatgtcttcagataatgaatttattcacctgctggcattcgttctgtttatcttttccaatgcctttattttgttgctagtggtgaattcactgcgccttctggtcagaaagcaaatcacccgcgcccgtatccgcgaagagaattaa

SEQ ID NO: 276437 - DNA, 1401 bp, Morganella morganii
atgtctgatcaacaaaacacagcatctgatcttatttaccagctcgaagataaacccccgtttttacaggcgattattggtgccgtgacccatctgctggccattttcgttccgatggtcacaccggcgctgattgtcggcacggccttacagctatcgcctgaaaccaatgcgtatcttgtttccatggctatgatcgcctccggtgtcggcacctggctgcaggtaaaccgctacggcatggtcggttcggggttattatcgattcagtccgttaacttttcatttgtgacagtgatgattgccatcggaaccagcatgcgggctgatggtgtcgatgaagagctgttactgtccactatcttcggtatctcgtttgccggtgcattcttagttgtgggatcgtcttttatcctgccctatctgcgccgtgtcatcaccccgacagtcagcggtattgtggttctgatgatcgggctgagcctgataaaagtcgggattatcgatttcggtggcggtttctccgccaagtcctccggcaccttcggtgattatcagaatatcggtgtcgggttactggttctgctggttgtcatcgggtttaactgctgtaaaagcccgctgctgcgtatgggcgggatcgcgatcgggctgattgtcggttatatctgcgccctgttcctggggatggtggatttcagtcagatgagcaaagccgcgtttatcacgatcccggtaccgtttaaatatggtttctcgtttaacttcgctcacttcctggtggtcgccattatttatctgctcagtgtgctggaggcggtcggtgacctgacggcaaccgcgctggtgtccgggcagaaaattcaggggccggaattccagtcccgtctgaaaggcggggtaatggcggatggtctggtgtctgtggcggcttccgcgatgagttctctgccgctgactacctttgcccagaacaacggggttattcagatgaccggggtggcttcccgccatgtcgggaaaatcattgcggttatcctggtgatcctggggctgtttccggggatcggctggttctttacgacgattccggcaccagtgctgggtggtgcgatgacactgatgttctccatgattgccattgccgggatccgcatcattctgtccaacggtctgcgccgccgcgaaactctgattgtggcgacctcgctgggcctggggctgggtgtctcttatgacccggcggttttccacgtcctgccgacatccctttacgcgctggcagaaaacccgatctgtatgggcggagtgaccgctattattctgaatttaattattccgatcagtaaggaaaccgaaccggacgatattgaagaatctgtgagggaagaggaagtttaa

SEQ ID NO: 276438 - DNA, 948 bp, Morganella morganii
atgtctttagatattgcttactctttagaaatagaagattttattgatgctgatagagcttatgatttttattggtccggtttgattacaaataaaaaagcgtttatttgtccgggtgaaaattgtcaggctcaggtaacatgtgccaatattgatgaagacactcaaaaaatgaaggttgttccacattttagagtttacggtgaacatgataaaagctgcgagatttttaataaagttcctttgaagatagttgatataatttcagataaaaataaaactgagaaaaaatcagttgacctttctgtcaccgactcttttttcagggaaagaccactctcatattatgatattaataaaaaaaatgacacagtacccaaagaatttaagaaaaatacacaatataagaataaaaatatctcgtataatcttaaacaaataggccattttagtaacatttactctgtaagaacaatcgttagcagatttctaaggtattcatccgataatactattaaacataggtttataaatatagatggtatgaatgtttcttattcttcatttctaaaattaatttgggagcaaagtctgaaggatttaccagattatggtctggtttattatggctgggcttatgttgacagatataaggaaggatacagaattaagtttaaaaaaggttttaaaagtcaatcaaacaatgtgctgcctgtttctgtctatataggtgataaactgattgaaaaatatcctataaaaaaattaatagtcaaaagattatcatcaatttcagctgaagctaaaccaacagcatttgtttttatttatggaaaaccaagagtatatagatcagataagacattaaaagagtatgttaattttgatttatataatcttgatatgattgatcttaataaagaaacaccgttacctaaaaaaagataa

SEQ ID NO: 276439 - DNA, 864 bp, Morganella morganii
atgatccgtagtatgaccgcgtttgcccgtcaggaagtcaaacgcccgtggggcactgccgcatgggaactccgctctgttaaccagcgctaccttgaaacctacatccgcctgccggaacagctccgcagcctggagccggtgatccgcgagcgtctgcgtcagcgtctgacccgtggtaaagttgagtgtaacctccgctttgacctgagcagcaacgcgcagagcggactgaatatgaatgaagacctggcgaaacagctggttgctgccgcaaactgggttaaaaactacagtcacgaaggggaaatcaatccgctggaaattctgcgctggccgggcgtgatgtccgcacaggaacaggatctggacaccatcagtgaagaactgctggccgctctcgatgataccatcactgcctttatcgatgcccgtgaacgtgaaggggcggcactgaagaccttaatcgagcagcgcctcgacggtgtatccgaagaagtccgcaaagtccgtgcgcagatgccggatatcctgttatggcagcgagagcgtctgcagagcaaactggatgacgcacaaattcaggtcgatccgaaccgtctggagcaggaactgatcctgctggcacagcgcattgacgtggcggaagagttagatcgcctcgatgcccatgtgaaagaaacccataatatcctgaagaaaaaagaggccgtcggccgccgtctggactttatgatgcaggaattcaaccgcgaatcgaacaccctcgcctcaaaatccatcaatgccgatatcaccagttccgcgattgaactgaaagtgctgattgagcagatgcgtgagcagattcagaatattgagtaa

SEQ ID NO: 276440 - DNA, 729 bp, Morganella morganii
atgagtcagtcatcacgtcccgctggccggggaacagaccaggtgcgtcctattactatcacccgtcattataccaaacatgccgaaggctctgtgctggtcgagttcggtgacactaaagtgttatgtaatgcctccgttgaagaaggtgtgccgcgtttcctgaaaggtcagggacagggctggatcacagccgaatacggcatgctgccgcgcgcaaccaattcccgtaatgcccgtgaagccgcccgtggcaaacagaccggccgcacaatggaaatccagcgcctgatcgcgcgttcactgcgtgctgcagttgatctgaccaaactgggcgagttcaccatcaccctcgactgtgatgttatccaggctgatggcggtacccgtaccgctgcgatcagtggtgcctgtgtggcactggctgatgccctgaatcagatggtcgcgaaaggtcagctgaaagccagcccgctgaaatccatggttgccgccgtttctgtcggtatcgtggacggcgaaccgcgctgtgatctggaatatgtcgaggattctgcggcagaaaccgatatgaacgtagtcatgattgatgacggacggatgattgaagtccagggtacggcagaaggtgcgccgttcagtcatgatgagttgttgtcgttactggccctcgcaagaggcgggctggaaaccattttctccgctcagaaggcggcattagaaaattaa

SEQ ID NO: 276441 - DNA, 648 bp, Morganella morganii
atgaaagcttatcagcgcgaatttattgaacttgcgatgaaaaaacaggtactgaaatttggtgagtttacgctgaagtccggccggaaaagcccgtatttcttcaatgccgggttattcaataccgggcgggatttggcgctgctcggacgcttttatgcggcagcattatgcgacagcggcgtgcagtacgatgtcctgttcgggcctgcctacaagggtattccgattgcaacgacgacagccgttgcactggcagagcatcatgaccttgatatgccgtactgttttaaccgtaaggaagccaaagatcacggggaaggcggaacgctggtcggcagcccgctgagcggacggattgtggtggtggatgatgtgatcaccgccggaacggcgatccgtgagtcgatggaaatcatcagacaaaacaatgcttcgcttgccggtgtgatgctgagtcttgatcgtcaggaaaaaggcaaaggtgagttatccgccgtccaggaagtggagcgcgattacggttgtcaggtattttccattatcacactgaatgatttaatcagttatctggcggaagatccacagatggacagccatttacaggctgtacgggcttaccgtgagcagtacgggattgaaatctga

SEQ ID NO: 276442 - DNA, 594 bp, Morganella morganii
atggcagaaagtacaaaaaagaagaacaggcgcgaggagatcctgcaggcgcttgcgctgatgcttgagtccagtgacggcagtcagcgtataacaaccgccaaacttgccgccagtgtgggtgtttcagaagcagcgctctatcgtcatttttccagcaaaacaaaaatgttcgacagcctgatcgtatttattgaggactcactgatttcgcggataaatctcatccttcaggatgaaaaagagactatctcgcggataaaactgattctgatgctgattctgggattctctgaaaagaaccccggcctgacccgtatcatgaccggtcacgcactgatgtttgagcaggataaattacagagcagaattaatcagttgtatgaacgaatcgaagctcagttacgtcaggtcttaaaagaaaagcggatccgtgacggcagcggttttacttatgatgaaagcctgctagcatctcagttactcgccttttgcgaaggcatgctgtcccgttttgtacgctcagaatttaagtaccggccaacacaggaatttgaagtccgctggccgctgatccttgcacaacttcagtaa

SEQ ID NO: 276443 - DNA, 459 bp, Morganella morganii
atgaccaaaaaaatcgacattaagattcttgatccgcgcattggcggggaatttccgttaccggcctacgccacgccgggttctgcgggtctggacttacgtgcctgcctggatgaagccactgaactgaagccgggccagacactgttactgccgaccggccttgccgtccatattgcagacccgtccctggcggcaatggtactgccacgctccggcctcggccataaacatggcgtggttctcggcaacctggtgggcttaatcgactctgactatcagggacaactgatggtatccgtctggaaccgtggcgacaccaccttcatgattgaaccgggcgaacgtatcgcacagatgattatcgttcctgttgttcaggctgaattcaatattgttgaagaatttaccgaaagcgagcgcggagccggcggatttggccattcaggccgtcaataa

SEQ ID NO: 276444 - DNA, 1215 bp, Morganella morganii
atgtccgaactgacaggaaaacagatagttctgggtatcagtggtggtatcgcagcctataaagcccctgagattgtccgccgtctgcgtgaccggggagcgattgtccgtgtcgccatgacacctgcggcaaccgcatttatcaccccgctgacactccaggccgtttccggcttcccggtggccgaaagcgttcttgacccggccgcggaagcagcaatgggtcatattgagctggggaaatgggcagatctcattattctcgctcccgccacggctgacctgattgcccgcctgagtgccggcatggcaaatgacctggtcaccactatctgcctggcatctgatgccaccattgccgtttcaccggccatgaaccagcagatgtaccgcgcacagaccactcaggagaatctcgcacatctggaacagctcggttttgctgtctggggaccggacagcggcagccaggcctgcggtgatgttggtccgggacgcatgctggatccgtcagagatagtctctcgggcagaacagcacttccgtaaaaaacaggatatgtccggcatccgtctggccattaccgcagggccgacacgtgaagcactcgacccggtacgttttatcagcaaccacagctccggcaaaatgggttttgccattgccgcggctgccgcagctcgcggcgcgaatgtcacgctgattgccgggcctgtcacactaccgacaccaccgggtgttaaacgtattgatgtcagcagtgcctgtgaaatgaatgatgccgcacagcaaacagccccgcagcaggatatttttatcggctgtgccgccgtcgcggattaccgcgccaaagcggttgcacctgagaaaattaaaaaacagggcgacgaaatcacctttacgatggtgaaaaatccggatgtgatcgccggtgtcggtgcactggaaaaaaaccggccatttgtgattggatttgcagctgaaacccaaaatgtggaagaatacgcgcgcggcaagttggtgaaaaagcagctcgatatgatttgcgccaatgacgtttctgttgaaaaccaaggatttaacagtgacaacaatgccctgcatctgtactggcataccggcgatatcagcttaccgaacatgagcaaatccgagctcagccaccatttactggacgaaatactgaaacactatgaccaaaaaaatcgacattaa

SEQ ID NO: 276445 - DNA, 675 bp, Morganella morganii
atggataacataaccggaaattcggcactgatgccgagagagaaactgattgcttacggggcatccgttctgagtgattcagaactgctggctatttttttgcgtaccggcacccgtgagcggccggtgcggcagtttgcggagtatctgctggaggtcttcgggtcactgcaccggttgctgacagcaggatatgaggagtttaaacctctgtccgggataggggacagtaagttttgccagatgcaggcgattgtcgagttgtccaggcgctatttcagcagtcagtttcaggaaacacaatttctcagcagtgcctgtactgtaaaggcgtatcttaaccagcagatggccgggcaggagcgggaagtctttgctgtgctttttctcaacaatcagaaccagcttatccgttatgaggagatgttttccgggacggtaaactgtgtggaagtgcatcccagagagattttgcgcctggcgctcaaagtgaatgcagtttctgtgattctggcgcataatcacccctccggtaacgaaaaccccagccgggctgaccgtctgctgacaaaaaaaattgttcaggcatgtgagttggtaggggttaacgtgttggatcacctgattgtcgggaaattcaatatgttttcgtttgcagaacacgacctgatctga

SEQ ID NO: 276446 - DNA, 237 bp, Morganella morganii
atgtcccgagtctgccaagttactggcaagcgtccgatgagcggtaacaaccgttctcacgcattaaatgcgaccaaacgtcgttttctgccgaacctgcactctcaccgtttctgggttgagtctgaaaaacgtttcgtgactctgcgtgtatctgctaaaggtatgcgtatcattgataaaaagggtatcgaagctgttttagctgatttacgtacccgcggtgagaagtactaa

SEQ ID NO: 276447 - DNA, 168 bp, Morganella morganii
atggctaaaggtattcgcgaaaagatcaaactggtttcttctgaaggtacaggtcacttctataccactacgaagaacaaacgtactatgcctgaaaaactggaaatgaaaaaattcgatccggttgttcgtaagcatgtaatgtacaaagaagcaaaaattaagtaa

SEQ ID NO: 276448 - DNA, 936 bp, Morganella morganii
atgagtaatccggttatttcggttatgattgcagtacataatgcggagtcatcaatcctggcagcgttagagagtctggataatgctctgaatgagaatagttctccggagcaggttgaagcgatcattattaatgatggatctacagacaaatctctggatatcattaaccaatatcagccacgtaattttattaaagttgttgaaacagttaacttttctaacatcggaaaaattcgccattatgcttattcattatcgagtggtgaatatattacagcattggatagtgatgatgttctgaaaaaaggagctatggcttgggttttagatattatacacgagcatccgtttgatttacttttaacaaaactggaagaatatgaaagcagtaatccagatttatcttttgtggctgaatcagtccgagtaataacgcagaaaaaattaaaagagttatatttagagcataaaaaagttaaaggtcacttgccagctaaatatatccgaaaagatattttatctgataatatgtttcctgatatattttgctatgaagatattttaatttcggctaatgccttttgtactgctgaaaatatattaataacagataccaaaacatattgttattataagcacgaaaatagtttatcttcagaaaaaagtctcagtaaaacacttgtttttctcaggactattttagctatggaatcttttttcataaaaaataatcatgagaagatcatgtttgaggggctctttgttaaagtttgctctgattatttatcaagaaataataagaataatctacctgattttgctatggaaagatttaataaaataaatattttcggatttttatttaatacaaaggtaagggtaagcagaaaaaaaatgtttttgaaaataaaaatatcagaggttttcaaatga

SEQ ID NO: 276449 - DNA, 1248 bp, Morganella morganii
atgattttaaatagaatattaccactgattattggtatgttaattacattctcgatagttacctcatctttttctgatcctttatcacgtaatacttattttattttgagctacttatcagttattatatctttttttgtcttctttaataaaaaaaatagattaaaatatcagtctgcaatgattataagcattacctttttgctattcgggatatccagagttgcatggtcttttttagttaatgaagatggattgagtatttataaatcatactctgcaacatcatccagaattattctttcatcctttattttctttgttgttattatctttagagataaattgtttgttttttttaaaaacaattatatatcagcaattataaaagtattacctctttatatttttatttacgcactttatgagatttttgtgttgggtaagtatagagtggaaatgagtacacacagagcgacggggatagcttatttaacgagttctattttctttttaagcctttatttttgctctgatataaaaaataaatttgattcatttttttattttactattcttattgtgtcaaatttaacaattttcttgacgcaaacacggtcagcaatggtaatatatttgttgctttctgttttttatacagtttttgttttcagagataagttaagtgtaattagagttatttttatttttttatgtttaattatattgtccggaggatcatataaatttttatataaagagcgtattaatgaggcgattacagaaacgcagcaatatgatgtgacaaaaccaggaggatcattaggtgatcgttacaccatgtggtatgcgggattatcagctcttaagcatgcaccattcgggcaatctgttcattcacgcaatgactttatttcagaaaaaatagcagcaggaaaaatcagtgattcgataactgtttatctgacggttagcttgcataatgagttgattgatgttttgtctctgcaaggcgttatcggggggctactgttgatctttatttatttttctctgatgtatgtcagcatccgaagtaaaaatatacttttgcttatgattacattatgtctggccggttatggtcttacagacgtcctgtttttcagtcgtgaggtgattactgtttatatgttgtgtattgcagtggcgctggtgaccggcggtaaagaagataccgcagaacagccgctgccgattgatcgctga

SEQ ID NO: 276450 - DNA, 810 bp, Morganella morganii
gtgccggaattacccgaggtcgaaaccagccggcgcggcattgagccgcatcttgtcggtaatacagtgcgttatgttgaagtccggaaccggcggctgcgctggccggtgtcagaacagattgagcgcctgagtgaccggccggtgctcagtgtgcagcgccgtgcaaaatatctgctgattgagctgccggaagggtggattatcatccatctgggaatgtccggcagtttgcgtattcttttggaagaaacgccggaagagaaacacgaccacgtcgatatggtgctcggtgacggcaaaattctgcgctataccgacccgcgccgttttggtgcctggttgtgggcagatgatttggcaacctgcccggtactggtgaatctggggccggagccgctgagtgatgattttaacgctgcgtatctgttcgccaaatcccgtaaacgaaacacaccggtcaaaagctggctgatggataataaaattgtggtgggtgtggggaatatttatgccaatgaatccctctttttatcccgtatccatccgctgcgccccgccaaagatctgactgaagatgaggttacccgcctggttgccaccataaagcaggtcttgacggaatccatcaaacagggcggcaccacgctgaaagattttttacagtcggacggaaaacccggttattttgctcaggaactgtttgtgtacggaaaacacggagaatgttgcccgaactgcggacagaagattgaagtggtgaaagtcggtcagcggagcacgtttttctgccccgcctgtcagcactga

SEQ ID NO: 276451 - DNA, 486 bp, Morganella morganii
atgaaaacacgcgcaatctatcccggcacttttgacccgattacctgcggacatatcgatattcttgagcgtgcctcaaaaatgtttgatcacatcctgctggcaatcgccaacagcagccgtaaaaatccgatgtttaccctcgatgagcgggttgcgctggccaaagacgtgtgttctcacatcccgaatgtggaagtgctgggtttttctgagctgatggcgaattttgccaaaaagcaaaatgccaatgtgctgatccggggtgtccggtctgttgctgattttgaatatgaatggcagctggcaaatatgaaccgccatttcgcgcaggatctcgagagtgttttcctcctgccgtctcagaatctctcttttgtttcttcatctctgatcaaagacgtggccctgcacgacggcgatgtctctgcatttctgccggagtccgtcgcgcaggcgatgatgcaaaaactcggtaaggcgtaa

SEQ ID NO: 276452 - DNA, 780 bp, Morganella morganii
atgacagataaaaaacgtctctccgttgtgatgatcagtaaaaacaatgccgatgttatcggtgattgcctgaactccgttcaggggctggcggatgaaatcattgtgctcgattccggtagtcaggacgacacactgaccatcgcccgtaatgccggagctcaggtatatgaaaaccgggagtggccgggcttcggccgccagcggcagattgcccagcagtatgccaccggggattatatcctgatgctcgataccgacgagcgggttacgccggagctgaaacaatccgttgaacaggtacttaccgcgccgcagaaaaatacagtgtatcgttttgcccgccgcaatctgtttctcgggcgttttatgaagcacagcggctggtatccggatcatgtcctgcggttatatccgcgtgagcaatatcagtacaacagtaatgcagttcatgaatctctggagactcagggggccaatgtcatcacactgaaaggggatgtcttgcacctgacctgccgcgatttaccagagtttcagcaaaagcagctgcgctatgccgctgactgggcaaaagcccgtcatctggccggtaaacgctgctctttcctctctgtactgactcacaccgccggtgcgttctgtaaaacctggctgctgagagccggattcctggatggcagacaggggcttatccttgcatttgtgaacgcacaatatacctttaataaatacgccactctgtggtccgtcagtaacaacgatgagtcagcatcatga

SEQ ID NO: 276453 - DNA, 1278 bp, Morganella morganii
atgttactgcgtgtataccaggttctgctttacctgatccaacctcttatctggttacgtctgttatggcgcagccgccgctccccggcctaccgcagacgctggggcgaacgttatggtttctgtaaaggaaaaaccggcaccggcggtatcatcctgcactcggtttctgtgggtgaaacgctcgccgcagtgccgctggtccgtgcattgcgccaccattatccgacgttacccatcactgtcaccaccatgacaccgaccggctcagagcgggttttatcagcattaggtgatgatgtttaccacgtctatctgccttacgacttaccgggatcaatgaaacggtttttcaatactgttcagccgaaactggtgatcgtgatggaaaccgaactgtggccgaacatgataaccgaactgcaccgccggaaaattccgctggtgatcgccaatgcccgtctgtcagcacgctcagccgccggttataagaaagcaggcagtttcgtgaaaaccatcctgaaccggatcaccctggtggccgcacagaatcaggaagacggggaacgctttattgagctcggcctgcgccgccagcaactgcatgtgaccggcagcctgaaattcgatatttctgtcacaccggaactggccgccaaagccgtcacactgcgccgtcagtgggccgcccgccgtccggtctggatcgcaaccagcacccatgaaggcgaggaggaaattatcctcaatgcccataaaaccctgctgaaccgctttccgaacctgctgctgatcctggtgccgcgccatccggagcggtttgccaaagcacgggaactgaccgaaaaagccggtctgacctatgtcatgcgcagcagcaacaccattccgtcaccggaaacacaggtggtggtcggggatactatgggtgaactgatgctgctgtacggactggcggatatcgcgtttgtcggcggcagcctggttgagcgcggcggacataatccgctggaggccgccgcgcacgccctgccggtactgatgggaccgcacaccttcaacttcaaaaatatctgcggcaaattacagcaggccgatgctctgctgacagtcaccgatgaacaaagcctgagtgacgccgtcagtaatctgctcaatgatgaggattaccggctgtattgcggacggcatgccgctgaggtacttcatgaaaatcagggcgcactgcaccgtctgatgcagttgctcgggccgtatctgccacctcggagccactga

SEQ ID NO: 276454 - DNA, 1074 bp, Morganella morganii
atgcaaacagcatcagcgccggtacagcgtattttagtgataaaactccgtcatcacggcgatatgctgctgataacgccggtgattaatactctgaaagcaaattacccggatgctgaggtggatgtcctgctgtatcaggaaaccgcaccgatgctcagccgtcattccggcatcaaccatatttttgccatggacagagcctggcgtaaagagggaacctgcaaacgtatcgggcatgagtggcgtttactgaaatcactgcgccagcggcgttatgacctcgtggtgaatctggctgatcagtggtacagcgcgattgtgacccgtttcaccggtgcccgtatccgtatcgggctggatttatggaaacggcagagtattttctggaaaaagtgttacaccctgctggcggatacctcacaggaatctgtcatgcatacggtggagcagaatcttaacggattaactccgctgaatctgccggtgacagataaccatgtcaccatggcgtattcagaggaagacctgcagaagactgagcagcttttgcagcgcaaacaggtgaccggtgactatattgttgtacagccgacatcccgctggttctataaatgctgggatgacgacaaaatgagtgaagttatccgcacactggcggatgaagggcatcagattgtgctcagcagcgggccggatccgcgcgaaaaagcgatgattgaatctattcttgcgccgtgtcagcaggctgttgccggtggaaaaattgtgtccgttgccggagaactcacgctgccgcagctcgcggcactgattgaccgtgcaaaactgtttatcggtgtggactctgtgccgatgcacatggctgccgccctgcaaacgccggtggtggccctgttcggcccgacgaaactggtgttctggtcgccgtggcaggcgaccggtgaaatcattaaagcatcggattacggggaacagccggacccggatgacgtggacacagggactgacgaacgttacctgagcccgattccggcagacgcagtgattacagcggcacggagatacttatga

SEQ ID NO: 276455 - DNA, 1128 bp, Morganella morganii
atgaaaaatatgcgtctggcgattgtccgtcagaaataccgcccggacggcggcgcggagcgttttgtatcccgggcgctggaagcactggataaccggaatctggagctgaatgttatcacccgttcctggcagggtgctgcggctcccggctggcatattcatgtggtgaatccgccgaaatggggacggatcagccgcgagcggggatttgccaacgctgcccgtgcctgctggcagaatgaaaaatttgatattgttcagagccatgaacgcattgcaggctgtgatattttccgggccggggacggtgtgcaccgccgctggctgttacagcgggcgcgggtactgcccgcctggcgggcaaaactgttgtttgcctcgccgtaccaccgttatgtgatgaaggcggagcaggagatgtaccatgatccgcactttaagcaggtgatttgtaattcggaaatggtaaaaaaagaggtgatggaagactttggtttgtcagagtcgcaaataaccgtcatctataacgggattgattctgaaaagtttcatccgctgccggaatcagagcgtcttgcgctccggcaggcttatcagatcccggtggcggcaaaatgtctggtgtatgtcggttccgggtttgaacgcaaaggactggcggcggcgattatggcggtcagccgtaatgatgcgtatctgctggtggtcggtcaggataaggcagaaaaaaaatatcgtcagctggccgcatccctgggctgtgcggatcgcatccgttttgcgggtatgcagaaacagaccctgccgttttatcagatgagtgacgggctgctgctgccgacgctgtatgatccgtttccgaatgtggtacccgaggcgatggcctgcgcactgccggtgatcaccagtaccacctgcggcggggcggaatttatctcacagggtgaagagggttttgtctgtgatgcgctggatactgacggcctggcagaggcggtctcacaactgccttgtgatcacctgagcagccggatgtctgaatgtgcacggcagcgggttttaccttatacaccggcggcgttatcacagcagcttatcgatctctacgggcggatcctggcataa

SEQ ID NO: 276456 - DNA, 1122 bp, Morganella morganii
atgaaacagcatattttatttattattgacggtttaccgggcggcggtgctgaacgggtggtgctgagcctgagtcacgggctggttctgaccggctatgatgtcactttgttatctctcagcaatacccgcgattatgatatcccggaaggggtggattatcaggtctctgcggatacttaccgtggcttgttccaccgccagactgaaatccggcgtcgcgccggaaagatggatgctttcttatctgatctgtttgcccgcaaaggtaaaccggtactggtggtatccaatctgcataaaactgaccgtattgtcgcggcatcacaggcgctgaccgggctgaatgtctggttttgcctccacgggatgttttcagccagttatctcggcaataaaaccggccttcgccgctgtgtaaaacaggcaaaaatccgcagtgtgtataacggacggaatattattggtgtctccggcgcggtgtgccgggatctgtgtgaaaacgtcggcgtgacgccgcagcagtgcgtgaccatttataacccgtttgacgttgcggatattcagcgccagtcgcagaaagataacccgtatcaggggcaggattacatggttcacctcgggcgttttcatgaggtgaaacggcaggatcggttactgaccgcgtttgcactcgctaatctgccgtgcaaactgctgctggcgggacagggcagccagtctgccacacaaacactgaaaaaccaggtagctgagctcggcctggaagaccgggtggaatttatcggttttcagtcgaaaccgatgccgatcattcgtggtgcaaaagctgtggtattaagctccgacagtgaagggctgcctactgttctggtcgaatcactgatctgcggtactccggtggtcagcactcgttgtccgggcggaataagtgagattatgaccggtgaactggctgattatttatctgatatgacaccggtgagtctggcggaaaaaattcgtctggtttatgagcatccgccggtgatcacccctgagatgtatcaaaaatttgagcagcagacgattgtcagccagtactgcgatttaattcagtcagtcccgtcaacacacgcgtga

SEQ ID NO: 276457 - DNA, 978 bp, Morganella morganii
atggcgaaacccgcttttatcattacccttgatacggaaggggataacctctgggaatccggtccggcgatcaccacgcagaatacccggtttttaccgcgctttcaggcattgtgcgagaaatacagcttcaagccggtctggctgaccaactacgaaatggcaacggatgatgcctatattgaatttgcgcaggatgtgattgcccggcagaccggggagatcggcatgcatctgcacgcctggaacagcccgccgctgaaggcactgacggctgatgatgatcgcttccagccttatctgattgaataccctgatgatgtgatgaaagaaaaaattaacgtcatgacatcgctgctggaagataaattacagaccaaaatggtcagccaccgcgcgggccgctgggcattcaatgaaaaatatgcccgtttgctggcagaatttggttatcagacggattgctctgtgacaccgcgggtgaactgggcatatactccgggagcaccggcacccatcggtaacggcggcaccaattacctgaattttccgtctgaagcctattttatggatctgaatgatatccgtcgtcccggggattcagcgctgttacaggtgccgatgagtgtgcagttccgtcattccccgctgatgaacggactgaaacagttttatgataagttacgcggcaaaaaacgctcgccgtccgtgaactggctgcggccgaaaggcgggaatcttgcgcagatgcagcaggtggtggatgcctgtctggcgcagggaaactctcacattgaatttatgctgcattcatccgaatttatgccgggcggcagcccgacattcagggatgaggcggcgattgacgcactgtatgatgacctggagcagctgtttgcgtatatcgctcagcgggcagaaggaatgacgctggcggaattttatcagcgcaaactcgcacagcgtcacgcatcataa

SEQ ID NO: 276458 - DNA, 978 bp, Morganella morganii
atgcgccgtgtgttaatcgtcaaaacctcgtcgatgggggatgtgctgcataccctgcccgcactgaccgatgccgtgcaggtattcccggatctcatctttgactgggtggttgaagagagttttgcccagatcccgggctggcactctgctgttgatcgcgtcattccggtcgctatccgccgctggcggaaaaactggttccgccgcgatatccgtgatgaacgccgccggttccgcgacgctgttcggtcacagacctatgatgcggtgattgatgcacaggggctgattaaaagtgccctgctggttacccggctggcacgcggccgcaaacacggctacgaccggcacagtatccgcgagccgctggcaagctttttctatgatgaaaaatacgctgtcagcaaaacacagcatgctgttgagcggatccgtcagctttttgccctgagtctcggctatgagaaaccgcagacacagggtgattacgcgattgccgcccattttctgaataaccgtacagtatcgccggatgccgttccgtatctggtctgtctccacgccaccacccgtgatgccaaacactggccggagtcacactggcgggcgctgtttgcacaactggctgacactgatctgcatgtccgcctgccgtggggcgcaccgcatgaacaggagcgggcactgcgtctggcggaaggattcacccatgtgcatgtattaccgaaattatcgctggcggatgtggcggcagaaattgccggtgcggaaggagtgatttcagtcgataccgggctgagccacctgacagccgcgctggataaacccaatatcaccctgtacggcccgacagacccgggacttatcggcggttacggtaaggggcagtttgccctgacatcaaaggacggggatttatcctcggtcagtgcggatgatgtgctcgccgccatggcagagcacatgccgcgttaa

SEQ ID NO: 276459 - DNA, 1062 bp, Morganella morganii
atgaaaattctggtgatcgggccgtcgtgggtcggtgacatgatgatgtcacaaagcctttaccgtaccctgaaaacacgttatccgcaggcaacgattgatgtgatggcacccgcgtggtgccgtccgctgctggcaaaaatgccggaagtggatgaagctgtcgccatgccaatcggccacggtgcgctggcgctcggtgagcgccgccgtctcggtcattccctgcgtgataataagtatgatcgtgcttatgtgctgccaaactcattaaaatcggcactggtgccgttttttgcgaaaatccctgtgcgcaccggctggctgggcgaaatgcgttacggcctgctcaacgatcaccggaagctcgacaaagccgcctttccgctgatggtgcagcgttatgttgccctcgcgtatgataaagcggatgtccctgccgccgccgctctgccgcagcccctgctgtggccgaagctggtggtgcgtgatgaggatattgccgagagcatggctgcgtttaatatcagtgatcaccgcccggtcgtcggtttttgtccgggggccgaatttggcccggccaaacgctggccgcattatcactacggtgaattagcgaagaaactgattgatgagcgtgattttcagatagtcctgttcggctcagaaaaagatcacgctgccggtgaggaaatcctcgccatgctcagtgatgagcagcgcgaaaattgtctgaatctggccggaaaaacctcactggaacaggcggtaaatctgatcgccggttgtcatgccattatcaccaacgattccggtctgatgcatgtggctgccgcactggatcgcccgctggtcgcattatacggcccgagcagcccggatttcacgccgccgctgtcagagaaagcccgcgttatccgcctgatcaccggctatcacaaagtccgcaaaggggatgcgcatgagggctatcatcagagcctgattgatattcagccggagcaggttctgtctgaactggatgatttgctgaagagttccctgccatgcgccgtgtgttaa

SEQ ID NO: 276460 - DNA, 939 bp, Morganella morganii
atgattattgtcaccggcggtgccggatttatcggtagcaatattgtaaaagcactgaatgatgacggttacactgatattttagtcgtggataacctgaaagacggcaccaaatttgtcaatctggtcgatctgaatatcgccgattacatggataaagaagattttatcgccggtattgtggccggggatgatttcggtgatgtcgaagcggtattccatgaaggtgcctgctcatccaccaccgagtgggacggcaagtacatgatggataataactatcagtactccaaagaactgctgcattattgtctggatcgtcagatcccgttcctgtatgcctcttctgccgccacctacggcgggcgcagtgataactttattgaagatcggcagtatgaaaaaccattaaatgtgtatggttattccaaattcctgtttgatcagtatgtccgtgaaattctgccggaagcagagtctcagatctgcggtttccgttatttcaacgtctacggcccgcgtgaaggccataaaggcagcatggcgagtgtcgctttccatctgaataatcagattttaaacggcgaaaacccgaaattattctccggcagtgaaaacttcctgcgcgatttcatctatgtgggtgatgtggcggatgtaaacctgtggttctggaaaaatgccaaatccggtattttcaactgcggtaccggccgcgcggaatcttttcaggctgtcgccgatgctgtgaccggtttccacagcgaacgccagtgcgcgctcgattacatcccgttcccggaaaaactgaaaggccgctatcaggcgtatacccaggctgacctgaccaatctgcgtgcagcgggttacccgggtgagttcaaaacggtcgccgaaggtgtccgtgaatatatggcttggttaaatcaggggaattaa

SEQ ID NO: 276461 - DNA, 1074 bp, Morganella morganii
atgaaaaaattgcggcggcaggaagatccccgtgttaccgggttgttttccgctgatgatctgttataccgtgaacactatttattacgttatcttattatgttatccggccggacagtgtctccggactttaaaggaatatgcatgaacccgaccactgttttccggttaccgctattatttgtactggcctatgcacttattctgagtggttcgctgatcctggtttcttaccctgatgtcagtgtccgctatcctgaattatcattagcggcctatttgtcaaaagtatttgctttccagctgattcagctgaccgggctttttactctgacatcattatttttttatcattaccggataacgcaactgaatcgtaaaactgttctggccgttatcggccttactctctttctgtatacagcaaacatgatcctcggcagcctcaaagcggaatggctcagtcatctgatggcgacaatgattgcggagaaagcggagtttgctgacgttattctgctggtcaaaactgcagatattggcctgtacctgatctcatttgtattacttggtatcgcgacccgtctggtggcgaaatattatcttaaagtcagccatcctgcagttatcccggacggaaaaatcccggatatttacgcactgttgttcagttgcgggatggtgtatctgatgtggatgatcgcgttatttctgacggcggtgataacaccatacctccccggcggcataccggcgccgctgtctgataatgcgtataccaccgcagcaggtttactgatttcgtgcggtgttatttttattgttgtccgtcagcgcttcccggtggcaggcggaatattgcagatcaggccgctggtaatttccgttctgctcagtaccgtgctcagtattctggttatggcggcgatcaccgccggaacggtttatatggtattactcaccaacagtttccggcacttcggggagactgagttatggatgatgacggcagtcagtattgcgctgacattgtggataagccgtcgtgtcaccggtgtgatgttccgccggtga

SEQ ID NO: 276462 - DNA, 1074 bp, Morganella morganii
gtgacttaccggcagaaaaccaaaaatatcgtactgacttcgttactttttatcacttcgtcactgataacgttttctgccgctgcggcgcagctcgccattgtgatcgatgatttcggttaccgcaaacaggatgataaccgcatcctggaactgccgccgcaggtctccattgctatcctgccgaactccccgttcggcaaagaaatggcggagaaagcacaccgccagggccgtgaaattcttatccatatgccgatggcaccgatcagcaaacagccgctggagcgcgatactctgcgcccgtccatgagtgccgcagaaattgataccctgattaaagccgcgattgcccgggtgccgtatgccaccggcatgaataaccatatgggcagcgcgatgacctctgatctgaccgccatgcagcatgtgatggcgtccctctccggctccggtttttatttcctcgacagcgtgaccattggcagcaccaaagcgacacaggccgcacagggaacaccggttcgcgtactgcgccgccaggtttttctggataatgtgcagacagaggaagagacccgcaagcaactgaaccgggctgttgctctggcacgcaaacagggatctgtgatcgctatcgggcacccgcatccgtcgacggtccgcgcactgcataaactcatcccgcagctgccgccggatattcagctggtgtcgccgggatatatgctgacgcatgccggtaaaccatccgccgtgaaaccgcagccggagaaaccggtcgtgccggtcaaaccggtggtgaaggaaaaaccgtggctgacaccaatgacagagcagtgtgagggtaaagcagaggtcggcggggagttctacaccaactatatcaatctgctgacggaagcactcctgagagatcagatgaacggcaaagtggcggaagtcctgttatccatccgcatggctctgccgcagccggataccgcgccgcctgcggcaaaagagtcagtcagcactgacctgaaggccgcagagaaagtaccggctgaaccggcggcagagactcagcgatag

SEQ ID NO: 276463 - DNA, 1284 bp, Morganella morganii
ttggcgcataagcacgttttccgcacgcattcccgccgggtgtcccccggtgtccgcacattactggcagctctgctgttgccggtctcttttgctgtttctgccgccaatacaaccaccgctgatgccagcaagaatgagctgaaaaatctccagctgaatatcgcggagaaagaaaagagcgtcaaagagcagcagggaaaacgcgcaaatctgttaacccaactgaaaaatcaggaaaaggatatcgccgctgccggccgtgaactctattccacgcagaaaaccctgaaacagctcgacagtgaaatcaccactctcagcgcagaaatcaaacagctggatgcgaagcagaaagcccagcgggcgctgctgtcaaaacagctggatgccgcattccgtcaggggcgtcatcagggtattgaactgattttcaagggtgaggaaggccagcgcgatgagcggatcctcgcctattacacctatatcggtgccgcgcgggaaaaaaccattacagagctggaagagaccactcagcagttgcacgcccgccgccagaccgagcagcaaaaacgcgcagagcataaaagcctgctcggcaaacagcagactgaaaagaaaaagctggatcgtgcccagaccgcccggaaatccaccctgactgagctggagcgctcgctgaaagctgatcagaaagatttgctggtgatgcgggagaacgaaagccagctgcgtaacaagatagccaaagcggagcgcgaggccaaagcccgtgcggaacgcgaagcccgtgaagccgcccgtatccgcgagaaacaggcgcaggcgaagaaaaaaggttccacctataccccgactcaggacgagcgctcgctgatgtcccgcaccgggggactgggccgtccggccggtcaggctatctggccggtgcgtggtccgctgctgcaccggttcggtgacagtatctccggcgaactgcgctggaaaggcatggtaatcggcgcgccggaaggcacacaggtaaaagcagtggcagatggccgtgtcctgctggcagactggttacagggttatggtctgatggtggtggtcgagcatggtaaaggggatatgagcctttacggttataaccagagcgcactggtgaatgtgggtgatcaggtgaaagccggtcagccgattgcactggtgggcagcagcggaggccaggaaagaccgggcctctattttgaaatccggcgccagggacggacggttaacccgcagccctggctggggagatag

SEQ ID NO: 276464 - DNA, 438 bp, Morganella morganii
atgctgcaagaaattatgccatttgtcagtaagcaccctattatcagccttgtatgggtcgcgttactgatctcagtcatcgtactgactgtcaaaggactgttttcaaaagtgaaaactattccgcgctctactgctatcgcactgattaataaagaagaagcgattgtcgtggatacccgtacccgggacgatttccgccgtggtcatatcattgacgcggtcaatctgacgccgtcagaaattaaagacaacaacctcggtgaagtggaaaaacacaaaaaccgtcctgttatcctggtttccgccaacggtatggagctggtcaaaccggctgaaagcctgctcaaagccggttttgaacgtgtatttgtgctgaaagacggcctctccggctggaccggtgataacttaccgctttcccgcagcaaaaagtaa

SEQ ID NO: 276465 - DNA, 474 bp, Morganella morganii
atgtcagaacaacaaaacacagaaatgtctttcaacattcagcgcgtttacaccaaagatatttcttttgaagcgccgaatgcacctgccgttttccagcaggagtggcagccggaagtgaagatggatctggataccggttcaaccaaattggctgatgacgtttatgaaatcgttctgcgcgtcactgtgacagcgactatgggcgaagaaaccgcattcctgtgtgaagttcagcaggccggtattttcaccatcggcggtctggaaggtactcagctggcccattgcctgggtgcatattgcccgaatatcctgttcccgtatgcccgtgagtgcatcgcaggtctggtcggccgcggcacattccctcagctgaacctggcaccggttaacttcgatgcactgttcatgaactatctgcagcagcaggaacaacagcaggctgcgcaggaaggtacacaggaagcataa

SEQ ID NO: 276466 - DNA, 1014 bp, Morganella morganii
atgacagacgcttctatgactgtactcggtgccggttcatacggcaccgctttagcgatcacactggcccgtaacgggcaccgtgtggtgctgtgggggcatgacccggaacatatccgtcagcttgaggctgatcgtgccaaccaggcatttttaccggatgtcccgttcccggataccctgatccctgaagcctcccttgaaaaagccctcgcggccagccgtaatattctgctggtggtgccgagccatgtgttcggggacgtgctcaaacgtgtcaaaccgctgctgcggcctgatgcccggattatctgggcgaccaaaggtctggaagcggaaaccgggcgtctgctgggtgaagtggtacgtgaagtcctcggggataaaatcccgctggccatgatctccggtccctcttttgccaaagaactggctgccggcctgccgaccgctattgcagtcgcagcgacagagcctgcctttgcggatgaggttcagcagcttttccactgcggcaaaagtttccgtgtctataaaaacccggattttatcgggatccagcttggcggtgccgtgaaaaacgtcattgcgattggggcggggatctctgacggaatggggtttggtgccaatgcgcgaaccgcgcttatcacccgtggcctggcagaaatgacccgcctgggtgtggcattaggcgcagatccgtctacctttatgggtatggccggtctgggtgacctcgtgctgacctgtactgacaaccagtcccgtaaccgccgtttcggtatgatgatggggcagggcgtgagtgtggatgaagcacaggagcgcatcggtcaggtggtggaaggataccgtaataccaaagaagttcgtgcgctggcagagcgtgctggcgttgaaatgcctatcaccgagcaaatctatcaaatactctactgcaataaagatgtgctcgaagctgcccgtgccctgttggggcgtgccaccaaagaagaaggtgagcacttttaa

SEQ ID NO: 276467 - DNA, 801 bp, Morganella morganii
atgtcctacgaagaactggaagaggtctggagctatataaagcaggaagcgcgggactttgctgattgtgagccgatgctggccagttttttccatgcgacattactcaagcatgaaaatctgggcagcgcgctcagttttatgctggccaacaaactggcaaccccgaccatgccggcgatttctgtccgtgaagtggtggaagaggcgtatcacaacgatccgcagatgattaaatctgccgcaatggatatcaaagccgtccgcctgcgggatccggcggtggataaatactccacgccgctgctctacctgaagggcttccacgctttacaggcttaccgcatcgctaactggctgtggaatcagaaccgccgcgcgctggcaacctaccttcagaaccaggtttccgtgacatttggtgtggatatccacccggccgccaaaatcggccacggcattatgtttgatcacgcaaccggcattgtcatcggcgaaacggcggtagtggaaaatgatgtctccatcctgcagtccgtcaccctcggcggtaccggcaaaactggcggtgaccgccacccgaaagtccgcgaaggcgtgatgattggcgcaggtgcaaaaatcctcggtaatatcgaaatcggacgcggtgccaaaatcggtgcaggctccgtggttctgcacccggttccggcacacaccaccgttgctggcgtaccggcaaagattgtcggcaaaccgggctgcgataaaccctccctagatatggatcagcactttaacgggtgtgaaggaatttag

SEQ ID NO: 276468 - DNA, 504 bp, Morganella morganii
atgcctaacatcatcttattcgaaccagaaataccaccaaacaccggcaatataatccggctatgtgccaataccggctttcggctgcatctgattcatccactggggtttacctgggatgataaacgtctgcgccgggccgggctggattacagtgagtttgctgatatcaaacatcaccatgattattacgcctttctcgaaagcgaggggctgagttctgataatgctcagtcgccgactggtaaccgggtgtttgcactgaccactaagggcacaccacgacacagtaatgtcagctatcaggccggggattatctgttgttcggcccggaaactcgcggattaccgccttatgtgctggataatatgcctgttgatcagaaaattcgcgtgccgatgctgccggacagccgcagtatgaatttatccaataccgttgcggtgattgtgtttgaagcctggcggcaactggattatgcaggggcattattgcgggattaa

SEQ ID NO: 276469 - DNA, 969 bp, Morganella morganii
atgattaagaacaatccacctgttttgtctattattgttcctgtttataatgtagaggattatgtttcagactgtttaaatagtttaatttcccaaaccctaaaagaaatagaaataataattgttaatgatggctctacagattctagtatgaatattgtcaactctttttctgataatagaattaagataataaacaaaaataatggtggccttagctcggccagaaacattggtataaaagtggcccgtgctgaatatattgcatttttagattctgatgattgggtagaaaaaaatgcttatgaattactctataatactgcaataaaaaataaatctgatattgtttcatgtggcttctatattgcccacccagataaaacaataaaaatcagcttacctgaagaaacaaatactaatattaagaaaaataaaaaattattgcacaatattaaagtggccgcatgggataaaatatacaaaaaaagtttatttacagataatggcataatatatccggaaggattatattacgaagatacaccaacaacgattcctttaatatttatggctaattcgataactacaataaataactgcctaatctattaccgccaaagaccaggctcaataacaaaagaataccattttagcaagaaaaatttcgacatattcataggagctgaaattatttataattttatttatgataaaaaaataaattctcctgagataaaggaacttgctgactatatatttattaaaaaatgtattatagacacatgcctacgattaaaaaaatatgacctattgatatgctatcgtgactttgttatgactaaatttcttgaaaagagaatatccccttataaccgtctactctctgtgaaggaaaaaatatttatgttttttattttaaatcttcctgccaagattgttaataaagcactatctttttttatataa

SEQ ID NO: 276470 - DNA, 1149 bp, Morganella morganii
gtgaatatacttctatgtacacttgaatactcacatagttcacaaagctatactggcggaatcggtgcattttatcaagaatatgcaaaaaaactatctgaaaataacaatgtaactgtactttctctctctgtagacccttttaacgggaaggatgactctgtaacatatgaatcctatcggcctataggatattccaatcttacaaaacgtttatgcaacacttctaatatttttcttttttttatttcatttattgttaactttatttaccgatttatttactcatggagagtaaaaaaaacaataaaaaaatacaatatagatataatagaaactcacgattataagggaatagcatcattattcaaactagttggtataaaaataccggttattattagagtacatggtacaaataaagttctttatcaaaataatatacaaaataaaaacaagcttgctatttttcatgaaaacattgtcaatacattatactcttcatttatttttatttctgaagcatctaagtttcattattttaaagcattttcaaaaaaaaatgatagtattatttgctataatttagcaccagattcaagagaatttgaaaataaatcttttgataataaaaaagaacttaaggtatgtaattttggcgcaatgtcatactcaaaaggtatagatatatttctggatattgctacacactgtgcaacagataatttctcatttcacttatatggaaaagagactaaagattacacagctgagaaaatatctcactacaaaaacattacttaccatggtttagcatccagagatgaattactaaataacctttcaacctttgatatatttatatttccatcacgatttgaaaactgccctatgtcttggatagaagctattagatccggtggaattatactagtttcagatattgatgtttcacgagagatggtaatagataatgaaacaggatttatctgcaaaactacagatgaatatatcaatattctaatgaaattaaaaaacaatatactccgtgaaaatataaattctaatgcaaataattttattgatactacgttctcaccaaaaacaatgatagaaaaatcattattattttataagagtaaattatga

SEQ ID NO: 276471 - DNA, 456 bp, Morganella morganii
atgtgtataagagacagcaataaaataatcttcaatgaaaaactaagctatggtgaggaccaattatttgtattttcatgtttagaaaaactaaagtattattattataatactccaatactggcttatataaaagacacccgtttttctgccatggggaaatattcaattaaaaggtttgatgttatttatttatacaatacatttaaactctattcacataatatgaaaacaattgctactatagaagataggatagacttcgagttgctcataatatcaaagcttttttttatttcccattctactttagagtcaatatcattttataaaaataaagtaaaaccattattacatctaggcagaacagataaaaaaagcagagaacttaagttattaataaaatatccatacttctatattatgttgtataaaatatacaggaaagtaaagtga

SEQ ID NO: 276472 - DNA, 357 bp, Morganella morganii
atgggcagtaaagatatcaccctgaataatggtatggatgcggcaatcaggagccagacctcatttaccagcgaactgggtgtcaatgccggtaaagacttcagctttgataacggcctggtgttctccccgtatgtgaaagcagcgtggaatcatcagtatgaagacggtaacgaagttgaatttaaccgttacaacaccattaacctggatttatccggcagtaccggtaaattcggtgccggtttcaatgcccgctataacaacgtgaatatgttcatggaattacagcacattgccggtgatgcggtttattcaccaatcaacggacagattggtgtccgttataacttctga

SEQ ID NO: 276473 - DNA, 594 bp, Morganella morganii
atgaaatttaaactttcacaaattaccgtattggtagttagtgcactttccgtatctgcgggaatggcggctactattaatgataccgttaatataaacaacaacaacgcaggtccgattatcacagagaagtatcgttctgacgatactgttaaatattccggttcaatcagtaacagtccgaataccatcacatttgtcggtcgtgagtctgatcgggaaggaaatatgtattattcccacagaacggaaaatgatggctctcttacccggatcggtgttaactatgactatgaatacttttattctgctgtagaagtcgacaccctggcgattacagattccagtgtccgcatcaacggtaaagctgataatttaaccgttgacggtaaatcagttgtcactattaccggcagtgatgcctatgataagtatctcggtgcagactatgagaacccatcaaaccctcagtctacactgccgctatatcgtaacggttatgacaataaccgctgggatgaaatcactgtcagcaccggaaacggcacttacaatgatgaatccagatctttatcactccttacggacagttag

SEQ ID NO: 276474 - DNA, 342 bp, Morganella morganii
atgtccgtaacattaggtacccgtctgacagtctttttctgcctgctgctgagttccggctgttcgatgcaccttgccaatgacagctggaccggacgggataaagcccagcattttgccttttcagccgcaactgcgattgccgctagtgcttatggcgatcaccagaactggcagcaccggcatagtgcacaattcggcatcggtttttccgttgcactgggagccgcgaaagagttttatgacagccgcccgggcggtaccggctggagtgtgaaagatttcgtctgggatatcgccggcgccgttgccggttacagtgtgtaccaatcgctgaaataa

SEQ ID NO: 276475 - DNA, 1359 bp, Morganella morganii
atgttgtcaaaattcaaatccgcgaaacaccaacagcaccttgcacaactgccgaagttagcacagtctgcggatgatgttgaaacgctgtttcatacccgcgactttaaaggccgtctgctggcagaaatcgccggtgcaaagaaaaccgtttatatttctgcgttatatattgagcacgatgatgcgggccgggatttccttgacgcgctgtatgccgccaaaaaagccaatccggaactggatatcaaagtctttgttgactggcaccgcgcacagcgcgggcgtatcggtgcagaagcgaatgccaccaatgccgactggtatcactccgtcgcggcatctcatcctgatctgctgatcccgatcttcggcataccggtaaacacccgcgaagcgctgggtgttctgcatctgaaaggttttattattgacgataccgttatttacagcggtgccagcgtcaataatgtctatctgtatcagcatgataaataccgttatgaccgctaccacttcctgcgtaacccggaactggcagcggcaatgaaactgtttattgatgaaatgctgctgccggaaccggcagtacagaaactcgataccgaaacccgtgtgaaaacgccggagatcaaaaacctgatccgcgatttccgcctgaaactgcgccatgccgcataccacttcaccccgcaggcactgcctgatgatcagctggccgtgacgccgctgattggtctagggaaaaagaatatgctcaataacaccattgagcacctgatgtgttccgcgcaggaaaaagtggttatctgcacgccgtatttcaacctgccctcaacactggtgcgcattatcagccgcctgctgcgggacgggaaacaggtggaaatcattatcggcgataaaactgccaatgatttctatattccgccggaagagccgttcaaaattatcggtggtctgccttatctgtatgaaatcaacctgcgccgctttatgcagcgcctgcagcggttctccgacagtgagcaactgaccatccgcctgtggaaggatgacgacaacacctatcacctgaaagggatgtgggtggataatcagtggcaactgatcaccggtaataacctgaacccgcgcgcctgggggctggatctggaaaatgcgatccttatccgtgacccgaaacaggaactgcacgcacagcgtcaggaagagctgaccaatatccgcaccaacacaaccattatccgcagctacactgagctggataatatccgtgactatccggtcaagatcaaaaaactgctgcgccgtctgcgccgtgtccgtcttgatcgcctgataagccggatcctctga

SEQ ID NO: 276476 - DNA, 2658 bp, Morganella morganii
atgagtcagcgcggccttgaagcattactccggcctcaatccattgcggttatcggtgcatccgaaaagcctaaccgggcgggttcccggatgatgagcaatctgctcagcggcggttttgccgggccggttctgccggtcacgccgtcacgccgctcagtgcagggggtgctggcgtatccgtctgttgctgatctgccgctggtgccggatctggccattatctgcacccatcccaaacgtaatattgccctgctgaatgaactcggtgaactcggctgccgcgcggtgattattctctccgccccggcgtcacagactgctgagctgaaacagacctgtcagcactataatatccgcctgctcggcccgaacagtctggggttgcttgcgccctggcaggggctgaatgccagcttttccccggtaccggtgctcaaaggcaaactggcgtttatttcccagtccgccgccgtttccaacaccattctggactgggcacaacagcgggaaaccggtttttcctactttatcgcactcggcagcagcgcggatattgatatcgacgatatgctcgatttcctggcccgcgacagcaaaaccagcgccattctgctctatctcgaacatattcatgatgcgcggcgctttatgtccgccgcccgcagtgcctcccgcaataaaccgatcctggtggtcaaaagcggccgcacgcagcgcacacaattactggtcggtgaaacgccgagcctggatatcgcctatgatgcggcaatccagcgcgccggtctgctgcgggtgcaggatacccacgagatgttttccgccgtggaaaccctgacctttatgaagccgctgcgcggtgaacgtctcgccattatgagcaacggcgcggcaccggcagcaatggcgctggacgaactgttccgccgccgggggaaaattgccggtctcagtgatgagagcagcgccgcactcgcggcggtattgccggatgattttgtgatcaataatccgctggatctgcgcgatgacgccacggtggatcgctatatcgccaccctgaatattctgctcggcagccacgatcatgatgccctgctgatcctccactccccgagtgccattgcaccgggcaaagaaaccgccgcccggattattgccgcgatcgcacagcacccgcgcagccgctggctgacaattttcaccaactggagcggggaatattcctcacaggaagcccgccgcctgttcggcgaggcggggatccccacttaccgcacaccggaaggtgctgtgaccgcttttatgcatatggtggaattccgccgcaaccagaaacaactggcggaaactcccgctctatccgaaggactgaccgccaaccggcagcaggctcatcactgcatagacagcgctctgcgccgtcagcacactgttctggatacctatgaaatcgagccggtgctggatgcttacgggctgaacattctgccgacctggattgcccattctgcggatgatgccgttaccattgccgaaacactgggttacccggtggcgctgaaactgcgctcaccggatatcgcacataaatccgatgtgcagggcgtgatgctttatctgcgggataaacaggaagtcgccacctcagcagcagcgattattgaccgcgtgacacaaaactttcctgatgcgcagatagacgggctgattgtgcagtcaatggcgaaccgcgccggggcacaggaactgcggattgccgtgacccaggatgcggttttcggcccggtgattatgctgggggatgccagccgcccgtgggatgatgaatccccggccgccgttgccctgccgccgctcaatatggcgcttgcccgttatctggtgattcacgccattaaaaataacaaactggcggccggcagcgccctgaatccgctggatattgcgggtctgagcagagtgctggtacaggtgtccaacctgataattgactgcccgcaggtggtgacactcgatttgcacccgctgctcgcctccggtacggaatttactgtcctggatgccacgatgactctggcagcggcggccggtgacggccgtcagcgtctggctatccgcccgtatccggcagaactggaggagaattttcagttaaaagacggcgcggttgtgcatgtccgccctatcctgccggaagacgaacccctgctgaaagcctttattgaccgcgtgaccaaagaagacctttattaccgttatttcagtgagatcagtgaatttacccacgacgacctggcaaaaatgacccagattgattatgaccgcgaaatggcctttgtggcggtggacagcggtggtcagattatcggggttgcccgtgcgatgtctgatccggataaccgggaagcggaatttgcggtgctggtgcggtcagatatgaaaggcaataccctgggttatcagctgatgtacaaactgctcgcctacacaaaatcacgcggtatcctcctgctgaccgccatcaccatgccggagaaccgcaatatgatccagctggcgaaaaagctcgggtttaccgtcgaaactcagtttgaggatggcatcgtcaacctgacacttcacctgaattctgaaattaccgcagtgcaatag

SEQ ID NO: 276477 - DNA, 705 bp, Morganella morganii
atgaagaccaattctgtttaccagttacgccagcggcgtctggcacaatccacccgtgttttccgtgcccggggatgtcgtgtagtccgttgtaattactgcttattacccgaaaaaaactgtctgtgtgacaccatacagacccgggatgcgcgcagtcagttctgcctgctgatgtatgataccgaaccgctcaaacccagcaataccgggaagcttatcgccgatatcctgccggacacacaggcttttctgtggtcgcgtaccgaaccggatgaggccctgctcgcgcttctgaaagatgacacccgccagccgtacctgattttcccgcaggcgtatgccactccgccgcgtcaggtgttcagtgatgtgccggaaaagacaaagccgccgctgtttattctgctcgacggcacctggccggaagcacgcaaaatgttccgtaaaagcccgtatctcgataacattccgctgctctccatcaacgatctggcacagaaagattatctgctgcgggttgcggcgcgggaagatcagcactgtaccgccgaagtagccgctgcggcactgatgatggcgggtgataccgcggccggaaaacagcttctggatcacttcacctgcttccgccgtcagtatttgaagggtaagtcacatcttccggtggcacaaatcagagcagaggagctgcttttaggctaa

SEQ ID NO: 276478 - DNA, 1089 bp, Morganella morganii
atgaacgactctttaaatggtaaaaacggcaaagtgaaagtcatgtatgtccgcagtgaggacaaacaggacgatcagaaaaaatcagacagacgcggcggccggggatcagatcgcggagagcgcaacagccgcggcccgcgcggggatcgcaatgaacgcagcaatcgcggagaacgcagtgaccgtggtgatcgcggcgaacgcagaggccagggaagttattccgatgacggtcgttcaccgtggaaaaccgtgtcccgtcagccgtcagaagacggagaggggctgatcccggatcacggcggtatcagcggcaaaagccagatcgacccggcacagctgcgccgtcagcgtcaggaggaaacccgtatttacggggaaaacgcctgtcaggccatgttccgcagccgtccggagcgtattgtgcgcgcctggtttgttcagtcagtgacaccgcgtttccgcgatgccctgaaatggctggcggcaaaccgcaaagcctatcatgtggtggatgaggaagagctggccaaagcatccggtaccgagcaccacggcggtgtctgcttcctgattaaaaaacgcggcggtgtgagtgcggaaacctatctggaaaccgccggtgagcaggattgcgtgctggcgctggaaaacgtcggtaacccgcataacctcggcggtattatgcgcagctgtgctcacttcggtgtcaacggtgtgatccttcaggatgcctctgtgctggaatccggtgcagctgtccgcacagcggaaggcggtgccgagcatctggtcgggattgatgccgatggcctgactgatacgctggatttattccgcaaaagagggtacgccatcgtcaccacctccagccacaaaggcagcaccgatctggcgaaagccacactgcctgcaaaaatggtactggttctgggtgaagagagtgacggcctgagtgacgcggtctgggaaggcggggatatgcgcctgtcagttggcggtaccggtaatgtggaaagcctgaacgtgtccgttgcgaccgggattatcctggcacgctggtggcagcagaataaagtcagctga

SEQ ID NO: 276479 - DNA, 471 bp, Morganella morganii
atgagcgcattgttagataaatttataaatctctgtaatattccgaagtgggatattcacaactaccttcccggcaatcagaataaaaacactgatacaatactgacggattatcatctgacaaaaattgctgaacattattattttcgtcataatataacgagagatatttatttatgcctgcggggtgatgtttatttttatattctttctgaatatcttgatcaggtgaaatgtgtattacccttatcaccaacaaataatcttaatcatcatatttcggaaaaaaaattcatgaatatcattaatcataaaggtgatattctgatggccggaaaactgtccgtggatgacgggcggattaaatgctggcggccttttgacagttttactggcgatcccggtcgctatcagcgggcactggactcagacgcgataaaaaacctgctgacactccaccttatcaattaa

SEQ ID NO: 276480 - DNA, 1533 bp, Morganella morganii
atgcaggcgccactgaccggagcaagactggcctggatgactatcgccctgtcactggcgactttcatgcaggtgctcgactccactatcgccaacgtggcgatcccgacgatcgccggtaacctgggttcttctaactctcagggaacttgggtgattacctcattcggggtggcgaatgccatctccatcccgatcaccggctggctggccaagcggatcggcgaagtgcgtctgtttatgtggtcaacagcgctgtttgccatctcctcctggttatgcggtatttccaacagcctgggcatgctgattttcttccgcgtgatccagggtctggtggccgggccgctgatcccgctgtcgcagagtctgctgctcaataactatcctcccgcaaaacgcactatggcactggcgctctggtcagtcaccattgttatcgcgccgatctgcgggcctatcctcggcggctatatcagtgacaactatcactggggctggattttcttcatcaacgtgccgttcgggattgtgatcatgatgctgaccgcaaaaaccctggaaggccgggaaaccaaaacggaaatccgtccgattgatactgtcgggctgatcctgctggtggtgggggttggctgtctgcagattatgctcgaccagggcaaagagctggactggtttaactcgacggagattattgtcctgaccgtgatagcggtggtggccatcgccttcctgatcgtctgggagctgacggatgaccaccccgtggtggacttgtctctgtttaagagccgcaacttcacgataggctgtctcagcctcagtctggcctatatgctctatttcggcaccattgttctgctgccgcagctgttacagggggtattcggctacacagccacctgggcagggctggcttccgcgccggtcggtattctgccgctgctgatcacaccgcttatcggtaaatacgcccataaagtggattaccggatcattgtgacattcagtttcattatgtataccgtctgtttctactggcgggcctatacatttgagccgggaatggactttgccgccgcagcctggccgcagtttgtacaggggctggcaatcgcctgtttctttatgccgctgaccaccattacactttccggcctgccgccggagaaaatggcgtcggcatccagcctgtcaaactttacgcggacactggccggggctatcggaacatcgatcaccaccacgatgtggacacagcgggagtccatgcatcacgccaattttgctgagcatatcaacccgttcagcccggatacacagcagatgtatcacacgctgggtgaaatggggatgtcgcagcagcaatcatcagcctatatcgcaaaagtgatcaccgaccaggggctgattatctctgcaaacgagattttctggctctctgccggtgtcttcctggtgctgatgctgctggtctggtttgccaagccaccgtttactgccggtggcggcggcggtggtgcacattaa

SEQ ID NO: 276481 - DNA, 1179 bp, Morganella morganii
atgagtgtcagtgaggaaactcaggctgtccagccccctgtccgtaacaaaaaacgacaacgccgtaatgcgctgatgttactgacattactgtttgtattactgggtgcggcttacaccgtttactggtttatggtgctccgccatcatgaatcgaccgataacgcctatgtcaccggcaaccaggtgattgtgatgtcacaggtttccggcagtgttacgactgtcagtgtggataataccgattatgtgaccgccggaacactgctggtgcagctcgataaacgcgatgccggactggcgctggaaaaagcacaggttgcgctggcaaacagtgtccgccagacacatcagcagatgatcaacagccgtcagttactggccggaattgaagtccgccgttcagaactgacccgcctgcagaatgacctgcgccgacgtgaagtactgggcgcacagaatgtgatcggcaaagaagaacttcagcacgcccgcgaagccgtggtgagcgccaaagcgcagctggatgttgccaccgagcagtttaatgccaacaaagccgtgatcctcgataccccgctgagcgaacagccggtagtgaaacaggcggccactgaagtacgtaacgcctggctggcactggagcggaccgatatccgcagtccggtggacggttatgtctcccggcgcagtgtgcaggtcggtgcacaaatcacccctgccaccccgctgatggccgtggttccggccaccggtatgtggattgacgccaactttaaagaaacccagctcagcgccatgcgtatcgggcagccggccaaagtgatcactgatttctacggtgacaaagtggtcttcaccggtaccgttaccgggctggatatgggcaccggcagcgccttctccttgctgcctgcgcagaatgccagtggtaactggatcaaagtagtacagcgtctgccggtgcgtatcgcgctggatccggcacagctggagaaatacccgctgcgtatcggtctttccggtgatgtcaccgtggacacgcagaatactgacggcccggtgctgtcgaaaagcgtgcgcaccgatccggcctatcataccagtgccctgagcattgatatgcaaccggcggatcagatgatcgctgagattatcagccgcaatgccggtcagtaa

SEQ ID NO: 276482 - DNA, 516 bp, Morganella morganii
atggaaagttcatttacaccgacagaagaattgcttaacagccggatctcacaacagaagaatctgggtgccgatctgccgtatcaggaaattttactgacccggctttcaatgcacgttcagagtaaattattagaaaaacgcaacaatatgctgaaatctcagggcatcaatgagacattgttcatggctctgatgattctggatactaaagaatcccacagcattcagccttcagaactcagcgccgcactcggttcttcccgcaccaatgcgacccgcatcgcggatgagctcgagaaaaacggctggattgagcgcaaagagagccacaatgaccgccgctgtctgcatctgcacctgacagaaaaaggctcagattttctgcacagtctgctgccgcctcagcatgatgcattgcgtcatatctggtcagcactggccgaagatgaacagaaaaacctggaaaagctgatgcgcaaactacttattcagctcgataagagcgacaactaa

SEQ ID NO: 276483 - DNA, 1227 bp, Morganella morganii
atgaaaaagaaaaccattgatgcggttctgacacctcagcttatctgcctgatggcaatggcgaccgggttgttagtcgcaagtaactattatgcacagcctttactggagacaattgccgcacaattcggcgttaccgccggtatggccggatttatcgtcaccaccgcccagctcagttatgctgccggcctgatgtttctggtgccgctcggggacaaattcgagcgccgtaacctgattgtcaccatgacactgctgtcggctatcgggctggtgatttctgctctgtcacagaccctctggcaattgctgctgggcaccgcactggccgggatgttttccgtggtggcgcagattcttattccgctggcggcgactatcgccaaaccgcagcaccgcggcaaggcagtcgggattattatgagcggcctgctgctcggtatcctgctggcacggaccgtcgccggtgtgctggcggaattcggcggctggcggacagtctactgggctgcatccgggctgctggttctgctggcgctgatcctgtatctgcgtctgccgcagtataaacaggtgtcggaactgaaatacggtcagttgctggcctccattgtggtgctgtttgtccgcaccccggttctgcgtgtccgggcggcgctcggtgccattgtgtttgccgcgttcggcctgctctggacttcaatggccttcctgctggcatcggatccgtttaattattccgagagcactatcgggctgttcggcctcgccggtgccgcaggtgccctgatggcaggcccggccggacgttttgccgataaaggcaaaggtcgtctgaccaccagcgccggtctgctgctcctgctgctctcgtggatcccgctggcactgagcggttattctgtcgcggcctttgtggccggggtggtggtactggatctggcggtacaggcggtgcatgtcaccaatcagagtaccctctaccggatgatgccggaggcacgcagccgtctgaccgccggttatatgacctgctatttctgcggcggcgcattcggttcactgctgtccggctatgcctacagccattatggctgggatggcgtctgttacagcggcgcggcagtcagtgccctggggctggtgatctggcttgccgggaagaagtatgatgtaccgcagtctgatgaaacgtctacccgtcagcagccatcacacacctga

SEQ ID NO: 276484 - DNA, 999 bp, Morganella morganii
atgcgtaagacagcaatcgcagcaatcgccttatcggcactcattggtactcaggctttcgcggacaccgcgcagccgggcaaaggggtcaaagtgctgcctgtacaaagcaccattactgaagaaacctttcagacccttatcgtcaacaaagcactggaagaactcggctacgacgtgcagccgatccaggaagtggattacaacgtggcctatgcgtcaatcgccaacggtgatgccacctttatggctgtgagctgggtaccgctgcacaactcccagtacaaagcggccggaggtgacgataaattctaccgtaaaggggattatgttgtgaacgccgctcaggggtatctgattgacaagaaaaccgctgagaaataccacatcaccaatattgaacagctgaaagacccggaaatcgccaaactgtttgacagcaacggcaacggtaaagcggatctgaccggctgtaacccgggctggggctgtgaggccgccatcaacaaccatctgaacgcctataagctgacagacaccgttgagcacaaccaggggaactatgccgcgatgatggcagataccatcacccgttacaaagaaggcaaaccggtgctttactatacctggacaccgtactggatcagtgatgtcctgaaaccgggacgtgatgtggtctggctggaagtgccgttctcctccatgccggacggcgagaaaattgacaccaaactgccgaacggtaaaaactacggcttcccgccaagcaccatgcatatcgcagccaacaaagcctgggctgaacaaaacccggctgccgcagagctgttcgctgtcatgaaactgccggtctcggccatcaacgcccagaacctgcgcatgcataacggcgaaaactcacaggctgatattgaacgtcacgccaacgcctggattaaagccaatcaggcaaaattcgacggctggattgaacaggcgcgcaaagccgctgataaataa

SEQ ID NO: 276485 - DNA, 1140 bp, Morganella morganii
atgagccggaataatcaacaggatacagaactggatccgtgggcggcgacatcagaaccggatccttcatcagcacaaacagcccctgacgccgcagacagcagtgatccgtggggaagtgccgccgataccggcggtgcggatgccgacccttggggtggtgcggcagacagcggcagtgactggctggatgccgcaccggcagataccggccccgcgtttgactgggcaaacccgtttgaccactcgctgatcccgtttgacagctgggtgaccgatgccatcaactggattgtgctgcacttccgcccggtctttcagggcatccgtgtgccgatcgattttgtgctcacgacctttgaacaggggctgaccgccattccggcgccgatcgccattcttatctttgctctgctcgcctggcagatgagcggcaaagggctggggcttgccaccgtggtatcactgacctttatcggtgccatcggggcatggaatgaagcaatggtgactctgtcactggttctgaccgccctgatgttctgtattatcatcgggttaccgaccggtattgccctggcgcgccatgaacgcgccgcgaaatttatccgtccgctgcttgatgccatgcagacaacaccggctttcgtctatctggtgccgattgtcatgctgttcggtatcggtaacgtgccgggtgtggtggtgaccattatcttcgccctgccgccggtgatccgcctgactatcctcgggatccgtcaggtgcccgccgacctggtcgaagccgcagaatcctttggtgccaacccgcgtcagatgctgtttaaagtacagctgccgctggcaatgccgaccatcatggccgggatcaaccagacgctgatgctggcactgtccatggtggttatcgcctccatgatcgctgtcggcggtctggggcagatggtactgcgcggtatcggccgtctggatatggggctggcatctgtcggtggtgcagggattgtcattctcgccattattcttgaccgcctgacacaatcactcgggaaagattcccgcagcaaagccggccgccgctggtatcacaccggccctgccgggcttatcacccgtccgttccgccgcgcgccgtaa

SEQ ID NO: 276486 - DNA, 1206 bp, Morganella morganii
atggcaataaaactcgaagttaaaaatctttataaaatattcggtgagcacccgaaacaggcatttgaattattagaacagggcctcgacaaagaacatatctttgaaaagaccggtgctaccgtcggcgtacaggacgccaatctggccattgaagaaggcgaaatattcgtcatcatgggactgagcggttcagggaaatccaccttagttcgtcttctcaatcgcctgatagaaccgacccgcggccaggtgctgattgacggcgaagatatcgctgtgatttccgatcaggcactgcgcgaggtacggcgcaaaaaaatcagcatggtgtttcagtcctttgcgctgatgccgcatatgtcggtgatcgacaataccgcattcggcctggaactggccgggatgagcaaagcggaacgtcatgagcgtgcactggatgcgctgaaacaggtcaacctggagcagtgggcaaattcctatccggatgaactgtccggcgggatgcgtcagcggatcgggcttgcccgcgcgctggcgaatgacccggatatcctgctgatggatgaggcgttctccgcccttgacccgctgatccgcaccgagatgcaggatgagctgctgagcctccagggcgataaacaacgcaccatcgtctttatttcccatgacctcgacgaggccatgcgtatcggcgaccgtattgccattatgcagggcggtgttgtggtacaggtcggcaccccggatgagatcctcaataatccggctaatgattatgtccgtaccttcttccgtggtgtggatatcagtcatgtgttcagcgccaaagatattgcccgccgccgggcggatgcgctgctgcatgtcgcaccgggcttcggtccgcgttcggcactgaaagttctcaatgatgatgaccgtgaatacggctatctaattgaacgcggacaaaaatttgccggtattgtttctgttgcctcgctggaggcggcactgaaagcgaaaaaacctatcacagacgccattctgagcgagccgcaggcagtcagcgccgacacgccgctcaatgagctgctgaccgttgtcgcgcagtcaccgtgtgctgttccggtggtcggcaacaacaaccgctatgccggggttatctcaaaagggatgctgctgcaggctttagataaggagacgccgaatgagccggaataa

SEQ ID NO: 276487 - DNA, 963 bp, Morganella morganii
atgaccacattaagccgcatttccgcgattaactggaaccggattgaggatgacaaagaccttgaggtctggaaccgtctgaccagcaacttctggctgccggaaaaagtaccgctctccaatgacattccgtcgtggcagacactgaccccggcagagaaacagctgacaatccgcgtgttcaccgggctgactctgctggataccattcagaacacggtcggcgcaccggcgcttatcccggatgccctgacgccgcatgaagaagccgtgctctccaatatcagctttatggaagcggtacatgcccgctcttacagctcggttttctccacactctgctccacacaggagattgatgacgcctaccgctggagtgaagaggaaccgaccctgcaaaataaagcagcgattatcctcggctattaccgtgacccgcacccgctgaaaaagaaagtcgccagtgtgtttctggaatccttcttattctattccggattttatttaccgatgtactggtcaagccgcgccaaactgacaaatactgccgatcttatccgcctgattatccgggatgaagcagttcacggctattatatcggttataaattccagcggtcattacagaattatgacgaacaaacccgcaaagaaataaaggaatttacgttcagtctgttatttgatttatacgagaatgaagtcagttatacgcggaaattatatgacggtgccggatggtctgaggatgtgattaaattcctgcattataatgccaataaagcactgatgaacttgggctatgaagcgctgtttccggagagtgtgacagatgtcagcccggcaatattatcggcgctgtcaccggatgccaacgagaatcacgatttcttttccggatccggctcttcttatgtgataggtaaagcggtgaacacagaagatgaagactgggatttttaa

SEQ ID NO: 276488 - DNA, 2121 bp, Morganella morganii
atgaccactgaatacacggattaccacgccctgaatgccatgctcaacctgtatgatgcagagggccggatccagtttgataaagatgtgacggcagcgcaccactacttccgccagcatgtgaatcagaacaccgtgtttttccacaatctgcgggaaaagctcgattttctgattaatgaaaactattacgaagctgacgttatcgatcaatatgattttgaatttattaaaaatctgttccgtctggcgtacagcaaaaaattccgctttgcgactttcctcggtgccctgaaatattacaccggttataccctgaaaacctttgacggccagcgctatctggagcggtttgaagatcgcgtctgtatggtggcgctgacactggcgcggggagataccacactggcagaacatctgctggaggaaattatcagcggacgtttccagcccgccaccccgaccttcctcaactgcggcaaaaagcagcgcggggagtttgtctcctgcttcctgctgcgtatcgaggacaatatggagtccatcgggcgcagtgtgaactcggcgctgcaactctcgaaacgcggcggcggcgtggcgtttctgctgactaacctgcgtgagtccggtgcaccgatcaaactgattgaaaaccagtccagcggcgtggtgccggtgatgaagatgctggaagatgccttttcctacgctaatcagctgggggcacgccagggagccggggcggtatatctgcatgcgcaccatccggatatcctcacgtttctcgataccaaacgggaaaatgcggatgaaaaaatccgtatcaaaaccttgtctctcggcgtggtgatcccggatatcacctttgagctggccaaaaataacgagccgatgtacctcttctccccgtacgatgtggcacggatttacggcaaaccgatgtcagagctgagcatctcagaacactatgcggacatggtgaataacaaggctatccgcaaacgcaaaatcaatgcccgtgagtttttccgcatcctggcggagatccagtttgaatccggttatccctacattatgtttgaggataatgtgaaccgcgcaaacccggtcgccggttacattaatatgagtaacctctgttcggaaattctgcaggtcaacagcgccagcgagtacaacgacgatctcagttaccgccacaccgggcgcgatatcagctgtaacctcggctcactgaatattgcgaaaatgatggattccccggatttcgcccgctctgttgaaattgccgtacgcgggctgacctcggtgtctgatatgagtcagatccgcagtgtgccgtccatcgatcacggcaaccggggctctcatgctatcgggctcgggcagatgaatctgcacggttatctggcgcgggaacatatccattatggttcagaagaaggtattgatttcaccaatatctatttcttaaccatcgcctattatgccctgaaagcctccaaccagctggcaattgagcggcagcagacattccgtaattttgagcagtccgcctatgccagcggggaatatttcagcaaatacatcacacagaaatgggaaccggcgacagaaaaggtccgcgccctgtttgctgatgccggaattgccgttccgtcacaggcggactggcagcagttgaaagagagtgtgatggcacacgggctgtacaaccagaacttacaggcagtcgcgccgaccggatcgatttcctatatcaatcacgcgacctcctccattcacccgattgtggcccgtattgagatccgcaaagaaggcaagctcggccgtgtctattacccggcggcctttatgactaacgataaccttgagtattaccgggatgcctacgaaatcgggccggaaaagattatcgatacttacgccgccgccacgcagcatgttgatcagggcttgtctctcaccctctttttcagtgatgaggcatccacccgcgatatcaaccgcgcacagatttatgcctggcgcaaagggataaaaaccctctattacgtgcgtctgcgccagtctgcgctggaaggcaccgaagtggcgggctgtgtttcctgcgccgtataa

SEQ ID NO: 276489 - DNA, 417 bp, Morganella morganii
atgaccacacaggcactgatttatttctccacccgttcagaaacctgccaccgtttcacggaaaaactggggatcccggccacacgactgccggaagacggtgaccttaccgccactcagccctttgtgctgctggtgccaacctacggcggcggccatcacagcggcgcggtgccgcgtccggtgatccgctttctcaaccggcctgagaaccgggcactgctgcgtggtgttattgccgccggaaataccaactttggccgcgcttatgccatcgccggtgacattatcgctgccaaatgtcaggtgccgtttttataccgttttgaactgctcggcacacaggcggatgtcgataacgtccgccgcggcttacaccaattctggcagcagcaggccgctgagaccgcctgctga

SEQ ID NO: 276490 - DNA, 219 bp, Morganella morganii
atgacagtgactatctacagcaaacccgattgtgtgcagtgcaatgccacttaccagatgctgacacggaaaaatattccgttcagtgtcattgatatcactcaggatgagcaggcgtatcagcatgtccgcacactgggatatcagcaggtgccggtggtgatcgccggtcaggatcactgggccgggttccgtcccgacaagcttgccgccctctga

SEQ ID NO: 276491 - DNA, 1083 bp, Morganella morganii
atggaattagctccgtcttcccgaactatccgcacactccttgcttctgataccccgctgattgatgtccgcgcgccggttgaattcagccagggagccatgcctgcctcacacaatctgccgctgatgaatgatgaggagcgggccgctgtcggcacctgttataagcagcagggcgctgaaaaggcactggcgctggggtatcagctggtaaacggtgagcgccgtgaacagcggatagcagcctggctgacggcctgtgcggactatccgcagggttatctctgttgtgcccgggggggccagcgttcgcatatcgtgcagcagtggctgcgggatgcgggaacggaatatccgctgatcaccggcggttacaaagcactgcgtcaggcggtgattcaggtaaccgaagagctggtggcgcgcccggtgatcctgatcggcggctgtaccggcagcggtaaaaccacgctggtgggcgaactggctgatggtatcgatctggaaggactggcgcatcaccgcggatcgtctttcgggcgtaccctggaggcgcagtttgcccaggcaacatttgaaaactatctcgctgctgccatgataaaaaaagaaaatgccggaacccgctgggtgctggaggatgaaggtcgcgccatcggtgccaacggcctgccggagccgctgcgggcacaaatggcacaggcttcgctggtggtggtggaagatccgtttgagcgccgtctggaacggttgaaagaagagtattttgaccgcatgacccgtgatttcaccgccgcatacggtgaagaaaaggggcgtgaggcgtacagtgagtatctgcatcacgggctgtcagctatccggcggcggcttggcatgcagcgtgcggcggaactgaccgcgctgctcgacagcgcactcgcggagcagtggcacagcggtaataccgaagcccatttctcgtggctgtgtccgctgctggaagaatattacgacccgatgtaccgctatcaactgagcaaaaaagctgaccgcatcctctttcgcggcacctatgaagccgtcgctgactggctgaaataa

SEQ ID NO: 276492 - DNA, 468 bp, Morganella morganii
atggcaacgacttatataaaggctccggccggatttccccgccgttatatcattatcagcgcggatgagcaggggatcactgaactgggatttgatgatactgcgccggagcagacagacagtgataacccgcatatcagacagtgtattcatgaactggatgaatatttcgccgggaaacggcaggatttcagtgtaaaactcaatccgcacggtacggaattccagacccgggtgtgggcgcagttatcaaccattccgtttgcgatcacctggtcgtataaagatctggcgctgaagctgggctctgccaattactgccgcgcggtcggtatggcaaacgggcgtaaccctatttgtctgattattccgtgccaccgggtgattgcacacgacggttcaatgggcggatacagcagcggcctggatatcaagcagtggctgttgcgccatgagggcattatctga

SEQ ID NO: 276493 - DNA, 210 bp, Morganella morganii
atgtcaaagcgcaaaggtaacgtgaagtggtttaacgaagcaaaaggtttcggttttatcactccggaagacggcagcaaagatgtgtttgttcacttctctgcaattctgaacgacggtttcaaaacactggcagaaggccagaaagtggaatttgaaatcgttgatggcgctaaaggcccgtctgctgcaaacgttgtctcgatttaa

SEQ ID NO: 276494 - DNA, 849 bp, Morganella morganii
atgaaacgtagtggcgttttatgtctgacagcactcgctcccgccgtctggggcagtacctatctggtgaccaccgagatgctgcccgctggctacccgatgactgttgctatgctgcgcgccttacccgccggtctgctgctgatgctgtttatccggcagttaccgaaagggatctggtgggggcggattttcgtgctcggggcactgaacttcgcggtgttctggtggttgctgtttgtctcggcctatcgtctgccaggcggcgtggccgcgactgtcggcgctattcagccactgattgtgctgctgctctcccggatggtgctgggcaatgtactgaagccgctggcagtgctcggtgcactgtgcgggataggcggggtggcgctgctgttactgacaccgcaggcaaaactcgacaccatcggtattattgccggattagccggtgcgttctccatggccgccggtacagtgctgagccgccgctggcagccggatgtctcaccgctgacctttaccacctggcagctcaccgcaggcggattactgctgctgccggtctctctgctgcttgaaccggcactgccgccgctgacgctgctcaatatcagcggattattgtatctggggctgattggcgcggcgctgacctatctgttctggtttcgcggactggcaatcctcgggccgaattcagtcgcatcgctcggttttctcagcccgctgacggcggtactgctgggctggtttgtgctggatcagcaactgagcctgttacagtgtgcgggggttatcgtggtgatcggcagtgtctggctcagccaggtcgctaaccggcgctga

SEQ ID NO: 276495 - DNA, 966 bp, Morganella morganii
atgagtaaaccaattcagatggaacgcggtatcaaataccgtgatgccgataaaatggcgcttatcccggtcaaaaacctggtatcagagacgaccgaacgattacgcaaaccaagctggatgaaaatcaaacttccggctgattcccataaaatcaaagggatcaaagatgcaatgcgccgtaacggcctgcattctgtctgtgaggaagcctcctgcccgaacctgagcgaatgctttaaccacggtaccgccacgtttatgatcctcggggctatctgcacccgccgctgcccgttctgtgacgttgcccacggccgtccgaatgcaccggatgccaacgaaccgcagaaactcggtcagaccatcaaagatatgggactgcgttatgtggtgatcacctctgttgaccgtgatgacctgcgtgacggcggcgcacagcactttgctgactgtatcaccgctatccgcgaccacagcccggcgattaaaattgaaaccctggtgccggacttccgcggccgtatggataaagcgctggagatcctgaccgctaccccgccggatgttttcaaccacaacctggaaaacgtaccgcgtatttaccgccaggtgcgcccgggcgctaactatgagtggtcactgaaactgctggagcgctttaaagaagcccatccggagatcccgaccaaatccggcctgatggtcggcttaggcgaaaccaatgaagagatcctcgatgtgatgcgcgacctgcgccgtcacggcgttaccatgctgaccctggggcagtatctccagccgagccgtcaccatctgccggttcagcgttatgtcagcccggaagagtttgaggaaatgaaagccgaagcaatggcgatgggcttcactcacgccgcctgcggcccgtttgtccgctcttcttaccatgctgatttgcaggctaaaggcgaagaagttaagtaa

SEQ ID NO: 276496 - DNA, 633 bp, Morganella morganii
ttgcaaaataacaccatcattttacgtcagctgggcctgcggccttatcatcctgtctctgaagccatgcaccaatttaccgaacagcgtacggcggaaaccggcaacgagctctggctggtcgagcatgagcgcgtttttacccagggtcaggcaggaaaagccgaacatgtcctcgcccccggtgatatcccggttatccagtccgatcgcggcggccaggtgacgtaccacggcccgggacagcaggtcatgtatgtgatgattgatctcaaacgcgacaaaatcggtgtgcgcgaactggtatccgcgctggaaaattctgtggttgagaccctgaaacagtggaatattgacgcttacccgcgcccggatgcccccggtgtttatgtggcgggtaaaaaaatctgttcactcggtctgcggatccgcaacggccgctcattccacggcctggcactcaatatcaatatggatctcgagccttttcaccgcattaatccgtgtggctatgccggtctcgccatgacacaaatggctgattttgttaccggtattacccttgcggatgttcagcccgtgctgaccgcacaattctgccggcaattaggattccaacttgccgcagaatag

SEQ ID NO: 276497 - DNA, 264 bp, Morganella morganii
atgaaaaccaaactcaatgaactgttagagttcccctgctcatttacctacaaagtgatgggtgccgctgaaccggaattagtgaatgatgttctggaagtgattcagcgccacgcgccgggtgactacagtccgtcaatcaaaccaagcagcaaaggaacctatcattccgtttctgtcaccattgacgcgacacacattgagcagatcgagaatctgtacgaagaattaggcgcgttagagcgcgtgagaatggtgctgtaa

SEQ ID NO: 276498 - DNA, 1215 bp, Morganella morganii
atgaaatacgcaacgacttatcaacaccgcgccgggcgcctggccgctttcggtctgaccctggcactgagcgccgcagcttctgccgctgatgttccgaatcttaataccaccatcccgcctgttccggatattgaagcggaatcctatattctgatggattaccactccggcaaagtgctggcggaaaaaaatgccgatgtccgccgtgacccggccagtctgaccaaaatgatgaccagctatgtcatcggccaggcaatgaacaccggtaaattcacgccggacaccatggtcaccatcggggaaaacgcctgggcgaccggtaacccggtattccgcggctcctcactgatgttcctcaaaccgggcgagcgcgtcagcgtggcggatctcacacgcggtatcaacctgcagtccggtaatgatgcctgtgtggcgatggccgagtttgttgccggtgatcaggacacgtttgtcggccagatgaaccagtatgtggcacagcttggtctgaaaaatacccactttaaaactgttcacggcctggatgccgacggccagtacagcagtgcgcgggatatggcgctgattggtcaggcgatgatccgcgacgtgccgaatgaatatgctatctataaagagcgctcattcacctataataatattacccagcaaaaccgtaacgacctgctgggtgataaaagcctgaatgcggacgggattaaaaccggccacaccaacggcgcgggttataacctggtcgcttccgccaccgaaggagatatgcgtctgatctccgtggtgatgggtaccaaatctgccaaagcccgtaatgcggaaagcaagaaactgctcacctggggcttccgtttctttgaaacggtcagaccgatgcagaaagacaacccgctggtgtctgaaatcgtctggttcggggataaagacaaagtgcagttaggggtggaaaatgatgtttatatcaccattccgcgcggccgcctgaaagatctgaaagccggttttgtcctgaccgagcccgagctgcatgcaccgctggcgaaaaaccaggtggtcggcaccattaatttccagctcgacaaccagatcattgaaacacggccgctggtcgtgacggaagcggtaccggaagggaacttcttcagccgtctgatcgactatatccgcctgctgtttcaccgctggttcggctga

SEQ ID NO: 276499 - DNA, 990 bp, Morganella morganii
atgcgtttacaatggattgcggtcacagcgatggccgcgttgctggcaggttgcccgtcagtgcagccgccggtcaaacagacaccgccgccgggcccggcaaaagagattctcggcgccgtaccgtcctatgagccgctgcatccgggcgcgaataatgattacgtccgtaatggtcagcagtatcagattgtccgtgatccggaaaacttcagtcagcagggctatgcctggatttatggccaggctcagaacggcaaccggactgctaccggcgaaatcgtcaacagcgccgaactgaccgcatcccacccgacgctgccaatccccggctatgcgcggatcaccaatatggcgaataaccgcatgatggtggtgcggattaacgatcgcggcccgtatatgccgggcaaacagatcgggctttcccgcgctgtcgcagatcgtctgaacctgctgccgaataccaaaattaaaattgacccgattgtggttgcggaagacggctcgctgagcggctccgggactgtcggtaccgtggtcgccaaacagagctatgccctgccgggccgccctgaactgggcaaaaccagtgctctcggtacgccggtgaccaacaccacgccggtggtgccgatcaacagtcgtcctgtcatggcacagccgcagccggaatccgcactgatcccaaccgtcaaacagcccgcagcaccggcagaaacccaaactgaaaacaccgccgcacctgcgccgcaacaggccgctgtcagcggttaccgtgtccaggtgggtgccgtggcaagtgcggaacgcgcaacacagtggcagaaagaactcagcgataaactgggtgtgcccggtatgacagaatcctccggtgatatgttccgtgtccagctggggccgtttaccagccgtgaacgggccgccgaagtacagggacgccttcagcagcaactgaatatgaattcatttatccttgcaccttaa

SEQ ID NO: 276500 - DNA, 1113 bp, Morganella morganii
atgactgataatccgcgcaaagtatccctgatgacccgcatgcacatcgacttcccgttgctggtgctgctgctgatcctgctggtttacagtgcatttgtgctgtggagtgccagcgggctggatccggaaatgatggagcgccgcctcgggcagattttctccggtatcatcattatgctggttctggcgcagatcccgccccgcgtgtatgagacctgggcaccgcacctctatattgtctgtgtcatcctgctggtctttgtggatgtcttcgggcagatcagtaaaggcgcgcagcgctggctggatctggggattgtccgttttcagccgtccgagattgccaaaattgccgttccgctgatggtggcgcggtttatgaaccgcgaccagtgtccgccgaccctgaaaaataccgccatcgccctgctgctggtggtggtgccgaccctgctggtcgccgcacagcctgatctcgggacatccatcctggtggccgcctccggtatttttgtgctgttcctggccgggatgagctggcgccttatcgggatagccctgctgctgcttgccgcctttattccgctgctctggtttttcctgatgcacgattaccagcgcggccgcgtgatgatgctgctcgatccggaaaccgacccgctcggtgccggttatcatattattcagtcaaaaattgccatcggctccggcggactggccggaaaaggctggatgctgggcacacaatcccagctggaattcctgccggaacgtcatactgactttatctttgctgtccttgcggaagagctggggctggtcggggtgatcttcctgctggtactctatctgctgatcattatgcgcgggctgatgattgccgcccgagcccagaataccttcggacgggtgatggtgggcggtctgatgctcatcttctttgtctatgtgtttgtgaatatcggcatggtcagcgggatcctgccggtggtcggtgtgccgctgccgatgatgagttacggcggctccgccctgattgtattaatggcagggtttggtattgtcatgtcaattcatacacaccgtaagatgctgtcaaaaagcttataa

SEQ ID NO: 276501 - DNA, 1932 bp, Morganella morganii
gtgcccggtctgaacgcgcctgacggcgataagaaaaaacacaagcaacggatggacttccgcgattacagcgcggaatccgccctgtttatccgccgtgcggtggttgcatttatcggtattgttattttatctgccgtactggtggtgaatctctatcatctccagattaaccgccatgaagattatcagacccgttccaatgataaccggatcaaactggtccctattccgccgagccgtggtctgatttatgaccgcaaaggtaccctgctggcggaaaacagaaccatttatcagctcgaaatcgtgccggagaaagtcactgacctgccggacgtactgaatgagctgcgcgagattgtcgatctgaccgatgaagacatcgcgaattatgaaaaagagcgccgccgttcgcgccgctttacctctattccgctgaaaaccccgctcaaccagattcaggtggcgcggttttcggtaaatcagtaccgcttcccgggactggaaatcaaaggctatcagcgccgtttctatccttacggctccgccctgacccatgttattggttatgtggcaaaaattaacgataaagatgtcgagcgcctggataaagacggtctgttgccgaactatgccgccactcatgatatcggtaagctgggtattgagcgctattatgaatccgtcctgcacggcaaaaccggctatgaggaagtggaagtcaacagccgcggccgcgtgatccgccagttacacgagcaggcaccacaggccgggaaagatatctatctgacaattgatctcgaattgcagatgtatatcgaaaaactgctgaccaccagccgtgcagctgttgtggtgagtgatccgcgcaacggcgagattctggcactggtgtccaacccgagttatgacccgaacctgtttgtgaacggcatttccggcccggattaccggggcctgctcaataacccggatcgcccgctgatcaaccgcaccacccaggggctctatccgcctgcatccacagtgaaaccgtttatttctgtggcggcactcagcgaaaaagtgatcacccgtaacaccacgatttttgaccccggctggtggcagctgcccggctcagaaaaacgttatcgtgactggaaacgctatggtcacggtaatctgaacgtggtgaaatcgattattgaatcggcagataccttcttctatcaggtggcgtatgacatggggatcgaccgcctgtccgcctggatgacccgcttcggttacggcgagtattccggtatcgacctgatggaagagtacaacggtgtgatgccgacccgtgaatggaaactgcggcgctataagaaacagtggtatcagggcgataccatcccggtcgggatcggccagggatactggacatcaacgccgatccagatgtcaaaagcccttaataccctgattaatgacggtgtggtgaaaacaccgcacctgctgctcggtaccaaagaaggcggcggtatgctgccgtatgaacagaaagaatatattgctatcggtgatattcattccggttactgggaactggccaagtccgggatgttcggcgtggctaacgcaccgaacggcaccggccgcaaattctttgccggtacgccgtacaaagcagccgccaaatccggtacagcacaggtgttcagctacgaaacctataacgccagcaaactggcggaacgcctgcgcgaccataaattaatgattgcctacgcaccgtacgataacccgaaagtggcggtgaccattattctggaaaacggcggtgcaggcccggcagtcggtactctggtccgccagatccttgaccacgtcctgctgggtgataacaacacggtactgccggatgctccgccatcaccgcccggcagtgaaacagagtga

SEQ ID NO: 276502 - DNA, 471 bp, Morganella morganii
ttgaagttacagctcattgccgtcggcaccaaaatgcctgactgggtcgaaaccggatttcaggattatctccatcgttttccgaaagatatgccgtttgaactgaccgaaatcccggccggaaagcggggaaaaaacgcggacatcaaacggatcctggaaaaagaaggcgagttaatgctggcggcggcgggtaaaggcaaccggattgtcacactggatattcccggcgcacgctgggataccccgcagctggccgggcaactggaacgctggaagcaggacggacgcaacatcagcctgcttatcggcgggccggaaggtctttcgcctgcctgtaaagcagccgcagagcagagctggtctctctccccgctgaccctgccgcacccgctggtgcgtgtgctggtggcggagagtctgtaccgcgcctggagtattactgccaatcatccgtatcacagggaataa

SEQ ID NO: 276503 - DNA, 327 bp, Morganella morganii
gtgaaccttttgcaaggcacagaattacttgagtttattattgataagctcgaagactccaaagcacaggacattattactattgatgtacgcggtaaatccagcattaccgaccacatgattatctgtaccggcacatccagccgccatctggcgtctgtggccgataaccttgtcactgactgccgtcaggccggtatgatgccgctcggcgtggaaggtcagggcatttccgactggattgttgtcgatctcggtgaagctatcgtgcatgtgatgcaggatgaaagccgccgtatgtatgaattagaaaaactctggagctga

SEQ ID NO: 276504 - DNA, 528 bp, Morganella morganii
atgacatatcagcgacaaccggaaagtagcgatgaggatgcactgtggcggcagagggcgcggcaggaactgattcaggcactgaatccgccgctcagtgcgggcgggctgatccgtctgcacagtcgttacaaatacgcgctgatggcatattcaccacagttatataaaagcagcggtcggctgttgtcacaggcgggaacactctccccggcggaactggcggaaatggcggcggtctggcagcaggcgctgcttactgcattttcacagcccgcgacccgcgccaatatgaccaacgcactgatgcatatgcaggggtacttcaaacgtcagctgagcccggcagaaaagcagcagatgagtgcggcgattgaggcataccgtaccggaaccggctctgcggaggcggcgaagcatctgttactcaccactgcccgccactatcagacagattatctgtgtgatcaggcaatattgcagccggtagtaccggctcagtcacactccgggcgcagcagtgtgtag

SEQ ID NO: 276505 - DNA, 360 bp, Morganella morganii
atggacgataaaataaagaaaattgtagtggtcagtgaaatagaagttacgctgtcggttatcggcgggaaatataaaccgttaatattaaatttattatctgaaaaaaccgttcagcgtttcggggaaatacgggcttatattgtcaatatttcacaaaaaacattaaccaatcaattacgcgagatggaagcggacggcctgctgacccggacggtctttgccgaagtgccgccccgcgtggaatacaccattacagacaaaggccgttccctgatcccgattctgctgctgatgtgtgactggggctatgaaaatatgggcgatcgctacacactgctgcgcccggagtgtgactga

SEQ ID NO: 276506 - DNA, 720 bp, Morganella morganii
atgaaaaaattagtggttattaccggcgccagttccggtatcggtgaatctgtggcaaaacggatgagtaaggccggacatccggtcttattactggcccgccgcagtcagattaccgaagggtttcatctgccggacagcttgtgccgcagtgtggatgtgacggatcttgcggcaatgaaagccgccatagcagaagcggaaagcctgtacggtaaaacagatttattaattaactgtgcgggcgttatgctgctggataatccgtatgatcaggattatgcagaatggcagcaaatggtggatgtgaatatcaatggtgttctgaccgggattaatattgtattgcacgatatggttgcgcgtcaggaaggcaccattattaatatcagttcaattgccggacgaaaaacatttccgagccattcagtctattgcggaaccaaatttgccgttcatgcgataacggaaaatatccgtgaagaagtggcaccgtcaaatgtccgtttaattaccatagcaccgggtgtggtggaaacaccgttattaagtcataccaccaatgaggaaattaagcagaattaccagatctggaaaaaagagattcagtcaggtctggatccggaaaaaatcgcggattgtattcagtttgcttatcagcaaccgcaggatgtgtgtatccgtgagattgtaattgccaaaacccggcaggcagggtga

SEQ ID NO: 276507 - DNA, 657 bp, Morganella morganii
atgacgaacaacgcggataaccggattctggcgctgtacggcggcacatttgacccgatccaccaggcgcacatcaataccgtgaaagccatggcatcggaagccggtctggaacaggtgattttactgccgaacaatgtcccgccacaccgtccgcagccaaaagcggatgcaaaacagcggctgatgatggtacaactggctgttaacggtgatccgctgttcctggtggacgaccgcgaactgcgccgcgatgccctctcctatacggtggaaacactgcgtcagtaccgggctgagattggttcacgacgaccgctggcttttatcatcggtcaggattccctgctcacgattgatacctggcatgaatgggacaaaattctgaccctgtgccatattctggtctgcaaacgaccgggatattcactcgattttccgtccgaacggctggctgactggtttgtgcagcatctggtcactacgccggaaagcctgcacaaacgaccgtgcggttatattttcctggctgataccccactgtttccgatttctgccaccaatatccgcgaacggctgaaaaacggcgaggactgcagcgatcagctggcccccgccgttcaggactacattctggcacagggactgtaccgctga

SEQ ID NO: 276508 - DNA, 1044 bp, Morganella morganii
atgataaaagtttcacctgagcaactcatcacgcagctccgttcggggctgcgtgaacgctacctcctctgggggaacgaaccgttactgcttcaggaatcccgggatgctatccgccatgcggcgcaggaacagggatttgacgagcacttcactttttcacttgaacaacatactgactgggatgcgattttttctgtctgccggtcactcagtctgtttgccggacggcagacactcaccctgtatctgccggaaaacggccccaatgccgcaatgggcgaacagcttctccggctggccgggcagttacatccggatctgctgctgatactgcgcggccataaactgaccaaagcccaggaaaacagtgcctggtttaaagcactggcacaggatggtgtgtatatcgcctgcatgaccccggaactgaaccggctgccgcagtgggtcgccgcgcgggccgcgctgttacagctgcaaccggatgaacaggcagtccgcctgctctgctattgctacgaaggcaatctgctggcgctgtcacagacactctcccggctggcgctgatctatcccgatggcaagctcaccctgccccgtgtggaagcagcggtaaatgatgcggcacactttaccccgtatcactgggtggatgccctgctggccggaaaaagtaaacgcgcctgccatatcctgactcagctgctggcggaagataacgagccggtgatcctgctgcgcaccgtccagcgggaagtgatgcagttactgacattacagcgcgaaagccgaaaccagccgctgcgcaccctgtttgacaagcaccgtatctggcagaaccgccgcggtatgataaccgacgcactggatcgccttgatgcgcattccctgcaggtggcgatatccctgatcacccgtattgaaatccgactcaagcaggattacggacaatccgtaagtgatgacttactgacactgacactgctcctgagcggtaaagcacagacaggacagatcctctatgacgaacaacgcggataa

SEQ ID NO: 276509 - DNA, 555 bp, Morganella morganii
gtgcgacatcgcattatcacgctgttgctcgggcttgcggtgctggtcaccgcaggctgcggcttccatctgcgcggcaccacgcaaatcccgcctgaactgcagaaactgcaaatcagcaccggtgatccgtatggcgaacagacccgtgctatccgtcagcaactgctgctgaataacgttcagattattgaaggtggtgatgccaccatcccggttctgaagatcaccagttcttccgaaggttcggaagagacagtatcgattttccaggacggtaaagccgctgagaaagaactggtttattacctgaatgcccaggtcattatgccgaacgggtcggtgtatccgatcaacgtccgcgttgaccgttcattcttcgataacccgctggaagcactcgcaaaagatgcggaaaaagatatgatccgccaggaaatgcgtgagcaggcagccgcccgtctggttcgtaaactgctgattatccagccgtccgaacaacagaaacaggctgaaaatgctgaagcggctgagattgtcgcaccgaaggcatga

SEQ ID NO: 276510 - DNA, 2583 bp, Morganella morganii
atgcaagaacaatatcgtcccgaagacatagagcaacaagtccagagtcactggcaggaaaaacaaacatttaaagtgactgaagataacagtaaagagaaatactactgcctgtctatgctgccatacccttcaggacgactacacatgggtcacgtgcgtaactacaccctgggtgatgtgatgtcacgttaccagcgcatgctgggtaaaaacgttttacagccgattggctgggatgcgttcggtctgcctgcggaaggcgcggcggtaaaaaacaataccgcaccggcaccgtggacctatgccaatatcgaatacatgaaacagcagcttaaaaagctgggtttcgcgtacgactgggatcgcgaagtcaccacctgtacgccggaatattaccgctgggaacagtggttcttcaccaaactgtatgaaaaaggtctggcgtataagaaaacttccgccgtgaactggtgtccgcatgacctgacggttcttgccaacgaacaggttatcgacggctgctgctggcgttgtgataccccggttgagcgcaaagagatcccgcagtggtttatcaaaatcaccgcttatgccgaagaactcctcaatgatctggatacgctggaagactggccggagcaggtcaaaaccatgcagcgcaactggatcggccgttccgaaggggtggaaatcacctttgatgtcgcggacagcaccgaaaaactgagtgtctacaccacccgcccggatacctttatgggtgtcacgtatctggcggtagcggcgggtcatccgctggcacagcaggctgcgcagaacaatcctgagctgaaaacctttatcgacgagtgccgtaataccaaagtggccgaagctgaaatggccacgatggagaaaaaaggcgtggcaaccggtatgtttgccattcacccgctgaccggcgaaaaagtcgcggtctgggtcgccaactttgtcctgatggaatacggtaccggcgccgttatggccgttccggcgcacgatcagcgcgactgggaattcgccaccaaatacggtttaccaatcaaaccggtcattctgggcgaagacggcaatgcaccggacatcagtgaagccgcaatgaccggcaaaaacaccctgttcaactccggtgagttcgatggtctggattacaccgccggtttcaatgcaattgcggacaaactggtggcactcggcgtcggcgagcgcaaagtcaactaccgcctgcgtgactggggagtttcccgtcagcgttactggggcgcaccaatcccgatggcaaccctggaagacggcaccgtggttccggttccggaagatcagttaccggttatcctgccggaagatgtggtcatggacggcatcaccagcccgattaaagccgatcctgagtgggcaaaaaccaccatcaacggccagcctgcgctgcgtgaaaccgacaccttcgatacctttatggaatcctcctggtattatgcccgttactgctgcccggactatgacaaaggcatgctggacccggctgcggctaactactggctgccggtcgatcagtatatcggtggtatcgaacacgcgattatgcacctgatgtatttccgcttcttccacaaactgatgcgtgatgccggtctggtgaactcaaatgagccggcgaaaaacctgctgtgtcagggcatggtgctggccgattccttctattacaccgacactgacggccaccgcgtatgggtatctccggaagaagccattcttgagcgtgatgataaaaaccgtatcatcaaggcaacagataaagaaggccgcgagctggttcacaccggcatgagcaaaatgtcaaaatcgaagaacaacggcgttgatccgcagattatggtggaaaaatacggcgcggataccgttcgtctgtttatgatgtttgcggcaccaccggaactgaccctggagtggcaggaatccggcgtggaaggcgcgaaccgctttatccgccgtgtatggcgtctggtgtatgagcatgttcagaaaggcaaaaccgcgccgctggatatcagcagcctgacaccggaacagaaagatctgcgccgctcactgcacaaaaccattgccaaagtcagcgatgacgccggccgccgtaagcagttcaacaccgccatcgcggcgattatggaactgctcaatgaactgcagcgcgcacctcaggaaacagagcaggatcgcgcactgatgcaggaagcgctggatgcggttatccgtatgctgtctccgattattccgcacgccggtttcaccctgtggaaagcgctgggtcatgaaacggatgtggatgatgcacagtggccggtcgccagcgaagaagcgatgattgacgataccaaactgatagttatccaggtcaacggtaaagtccgcggccgtatcaccgttgccgccgatgcggagcaggatgcggtcatggcgctggcctcgcaggaagcgaatgtggcgaaatacctcgaaggtgtgagtgttcgcaaagtcatttatgtgccgggtaaattactgaacctggtcgtaggttaa

SEQ ID NO: 276511 - DNA, 726 bp, Morganella morganii
atgatctccctgaaaaatatctccaaatggtacggtcagttccgtgtcttaaccgactgctcgaccgaagtcaaaaaaggggaagtggttgtggtgtgcggcccgtccggctccggtaaatccacgctgataaaaaccgttaacggccttgagccggtgcagcagggcgagattttcgtcaatgatattcaggtgaatgacaaacgcaccaacctggcgaaactgcgttccaaagtcggcatggtcttccagcactttgagctgttcccgcacctctccattgtggaaaacctgaccctggcacaggtaaaagtgctggggcgcgataaagcggcggcaaaagaaaaagggctgaaactgctggagcgtgtcgggctgtctgcccatgcggataaattcccgtcccagttgtccggcgggcagcagcagcgtgtggctatcgcccgcgccctgtgtatggatcctgtcgccatgctgtttgatgagccgacatccgccctcgacccggaaatgatcaacgaagtactggatgtgatggttgaactggcacacgaaggtatgacaatgatggtggtcacccatgaaatgggctttgcccgtaaagtggcggaccgcgtgatttttatggatgaaggcaaaatcgtcgaagacagcagaaaagacgatttctttgctaacccgaaatccgatcgcgccaaagattttcttgccaagattctgcactga

SEQ ID NO: 276512 - DNA, 678 bp, Morganella morganii
atgtacgaatttgactggagttcggtgatgccgggcatgccgttcctgttacaggggctggttattacggcgaaaatcacggttacagcgattgttataggcattctgtggggcacgatactggccatgatgcgcctgtcatccataaagattgtgagctggctggctgccttctatgtgaacgccttccgctccgttccgctggtgatggtgctgttgtggttctatctgattgtgcctaacttagtccaaaatgttcttggcatatcaccaaaaacagatatccgtctgatctcagctatggtagcgttttccctgtttgaagctgcgtattatgctgaaattatccgcgccgggattcagagtgtgtcacggggacaaacatccgcctcactcgccctcggtatgaccaaaatgcagaccatgcgtctggtggttctgccgcaggcattccgcgcgatgatcccgctgctgctgacccaggggattgtcctgttccaggatacctcgctggtgtatgtgctcagcctgaccgatttcttccgcaccgccagcaatatcggtgagcgtgacggaacacaaatcgaaatggtgctgtttgcgggtgcggtttattttgttatcagctttggtgcgtcaatgctggttaattatctcaagagaaggactgtgtcatga

SEQ ID NO: 276513 - DNA, 738 bp, Morganella morganii
atgtcagctaactgggactggggcatcttttttcagcccgcccccttcggcaacaccacttacctcggctggatcctgtccggcctgaaggtcactgtgctgctgtcaatctgtgcctggattatcgcctttctggtgggatccctgttcggtattctccgtacggtgccgaataagtttctctcctcgctcggcaccatttatgtggaaattttccgtaatgtgccgctgatcgtccagttcttcacctggtatctggtgatcccggagttcctgccgtcgtccctgcgcgactggtttaaaatggatctcgacccgaatatccagttctttatctcctccaccctctgtctggggctgtttactgccgcccgtatgaccgaacaggtacgtgccgccattcagtcattgccgcgcggccagaaagccgccgggctggcgatgggactgacactgccgcagacttaccgctatgtgctgctgccgaatgcctaccgcgtgattattccgccgatgacatcggaaatgctcaatctggtgaaaaactccgccatcgcctccactatcgggctggtcgatatggccgcgcaggccgggaagttactggattattccgccagagcctatgagtcctttaccgcgatcacactcgcctatgtcggcatcaacgttattattatgctggccatgcatttactggaaaaacgggtgcgtctgcccgggacaggaggccactga

SEQ ID NO: 276514 - DNA, 897 bp, Morganella morganii
atgcgcaagttagttttgtctgtactggtcaccggagccgcgcttgccagtgcggcggtttctgctgaagagctggccggtacactgaaaaaaatcaatgacagcggcgtgattgttgtcggtcaccgcgaatcctccgtacccttctcttattatgataaccagcaaaacgtggtcggctattcccaggattactccaaccatattgttgatgcagtgaaaaagaccctgaataagccggatttacaggtcaaactaattccggtgacctctcagaaccgtatcccgctgttacagaacggcacattcgatttcgagtgcggctccaccaccaacaacctggcccgccagcagcaggccgctttctccaatactatttttgtggtcggtacccgtctgctgaccggtaaagactccggtatcaaagactttgccgatctcgccgggaaaaacgtggtggtcacatccggtaccacgtctgaaatgctgctcaacaaactcaatgatgagaagcagatgaagatgcgcattatcagcgccaaagatcacggggatgccttccgcaccctggaatccggtcgtgctgtcgcctttatgatggatgatgccctgctggccggtgagcgcgccaaagcgaaaaaaccggataactgggtgattgtcggcacaccgcagtccgaagaagcctacggctgtatgctgcgcaaagatgatccgcagttcaaagccctgatcgataaaacggtttctgatgcacaaacctccggtgaggctgagaaatcctacacccgctggttcaaacagccgattccgcctaagaacctcaacctgaactttgaattatccgatgaaatgaaagggctgttcaaagcgccgaatgacaaggcctttgaataa

SEQ ID NO: 276515 - DNA, 369 bp, Morganella morganii
atgctgaagcaacgcaggcagggttatctgctgctgtttttcacattattctttatcctgttgtgtctgacacaacggatgtctggtgcgccgcgcatcagtctgagcccgtctgcggatttcactaccccggtgctgctcagtgatacggaaaccggcagcgccaatcccggtggtacctgtgatatcagcgccaagtcgctgagtaccgtgccgcagttcccggcagaacctctcttttttgcccttcttttcttcgtcatgacctcggtgatagttcctgtccgttaccgttcgcgctcgtggcgtcagcatatcccgccgatgcggctgcgcaggcatctccatttctgtgtgatgagggattag

SEQ ID NO: 276516 - DNA, 2037 bp, Morganella morganii
atgcgttctgtattaacagcgtttgtgctgtttttgttcacgctgaccactgtgcatgcggctgataccggctggaccgaaatgccgcacaatgatcacgcccgtgtcagagtcacatcagatcagtggaaagacggaaaactgcgtctgctgctggcggttgaattacaaccaggctggaaaacctactggcagtcgccgggagaggggggcgttgctcctgaactgacatggcaggaggcctccgccggaacacagtggttctggcccgcacctcagcgttttgacgtcgccgggctctccacccagggctacggcggcagtgtggtgttcccgctggaagtcacggcggctcaggcgctgccggcactcagcggaacactgaccttatccacatgcagtaatgtctgtatcctgaccgattatccggtctcactggatacctcagaacccgcgccggacgattttgaccgtcagtatgtgatggcgatgcagcaggtgccgcagaccggcggtgatatcaccaccggcggcagccgggtaaacggcgggacgctgacgatggttctgcaccgcccgggcggctggcaggatccgcagctgttttttaatgcggataaagaaaccatttttgccgccccgtcatttacgatttccggggataatctcactgccaccgttaaagtaacggatgactggggggaaatgccgtcagatctgaacggaaaaccgctgtcggtcgttgtgacagacggcccggcagcgcaggcgctcaccacggtgatcggcagcggaccggatattgcggccgcatccggcagtgatacctcctttatcatgttgctgctgtttgcattgctgggcgggctgatcctcaacgttatgccgtgtgttctgccggtgctggcgatgaaactcggctctgtgctgtatgtggaaaaccgcgaacggcggatgatccgcacccagttcctggtttcctcctccggtattatggtctccttctggatcctcgcggcgctggtgtcgctgttacgtctgacacaaagtgcggtcggctggggaattcagttccagaacccgtggttcctcggctttatggtggtggtaactttactgttcagtgccaatctgttcggtgttttttctatccgcctgagcagtaatgcaaccacaaaactggcgacagcgggcggcaaagggatgcgcggccactttatggaaggtatgtttgccacgctgctggcgaccccctgtaccgcgccgttcctcggtaccgccgttgcgtttgcgctggtggctccgtattcacagctgtggatgatttttaccgcgctggggctggggatgagcctgccgtggctgctgatcgccgcgtttccgggaattgcccgggcgctgccgaaaccgggccgctggatgaacggtctgcgtctggtactgggtggcatgatgtttattacggcactgtggctgatcagtctgctgatcccgcacaccgggccggaaaccgctgtggtgatggtggcagttgtgctgctggtacttgcgctgctggctttccgccgtaccggtattaagcgcggatctgcggcactggtggcactgctggtggctggtggtatctgggccgctatcaatatgacggatgaccggcagcagagcctggtcagtgatcaggtggactggcagccgctgacggaagaggcggtgaacaccgcgctttctcagggtaaacgggtttttgtggatgtgaccgccgaatggtgcgtgacctgcaaagcaaacaaatacaatgtattattacgcgatgatgttcaggacgcactccgtgaaccggatgttgtcgcactgcgcggggactggacaaaaccgtcaccggatattaatgcatttttacaaaagcgcgggcatctggcagtaccgtttaatcagatttacggccccgctttacctgatggtgaaatcttgtcaccattgctggataaagaaacactcttacatctgttaaatcagtcacaaggaattgaaccatga

SEQ ID NO: 276517 - DNA, 729 bp, Morganella morganii
atgaaaaaaacactcgcggctttaatgattgctccgcttatctttaccgccacagctcatgcggccgcttttaccgctgaccaggaagcgcaggtgcgtgaattggttcgtgacacgctggtcaaaaacccggaaattctggaagaagcgattatggcgcttcagcagaaacagaccgaaaaacagaccgcacagatgaaagatgccgttaaagccaatgctgacgcgctgtttaatgataagtacacaccgcgtatcggttcaaaatcaccgaaactgaccatcgtgtctttcaccgattacaactgcccgtactgcaaacgttttgatccgcagctggaagcgatggtgaaaaaataccctgacgtggcggttgtcttcaaactgctgccgttcaaaggggaaagctccctgaatgccagccgtgccgcactttctgtctgggaaagcaagccggaagcatttgcaccgctgcataaccgcctgatgcagaagaaaaccgcactgactcaggatgatatcaacagtgcactgaaaaccgccaaagcgggtgatgtgaaagtcactgataacagtatgaataccatgcgtatgaatatgatgctggcggaacaattaggtgttcagggaacccctgcaacgctgattggtgacgtgatgctgccgggtgccgtggatgaagcacaactggatgccatcattaaggaacagctggctaaggttaaataa

SEQ ID NO: 276518 - DNA, 498 bp, Morganella morganii
atgcggttactgcgcagatgggggaaggaatttctcctgctgctggtgattttatttattgcgtcacaggcgatggactactggcgcaaaccgcaggcaccggatctaaatacggtgccttcgctgacactgacagacggcacaccggtgtccattgcgcagatgagtgcggaaaaaccgttactggtctacttctgggcatcctggtgcgggatctgcaaactgacctcgccgtcagtcagcgagctgtctgagtctggctacaatgtggtgacggttgctatccgctccggtgaagatgaccggctggcgaaaggaatggcagcgaaaggttactattttccggtgattaatgatccggatggccgtatctctcagctctggggtgtgaatgtcacgccgacttttgtgatttatcacaaaggggagatagtcagttacaccagcggctggaccagtcagttggggatgatggcacggttgtggctggcgaaataa

SEQ ID NO: 276519 - DNA, 1554 bp, Morganella morganii
atgataaaatcacctcatggtttacgccagtggccgcgtctgctgctggcactgattttcggggccggcggaacgctggccttttcgccttttgatctctggtatttctcactgcccgcactggtcgccctgctgctgctgactctcaaccggacaggtaaacaggcctgtgctatcggtttcgcctgggggctgggtttattcggcagcggcgtaaactgggtgtatgtcagtatcgcggatttcggcggtatgccggaaattgccaacctgttccttgttgtcctgctggccgcctatctggcactctatccgatgctgtttgccggcctgctggccaaatgcttcccgcacgccactgtctggcgtctggtgattgccgccccggcactctggcagcttactgaatttttacgcggctgggtgctgaccggcttcccgtggctggaattcggttatacccagattgacggcccgatgcgtgcactggcgccaatcctgggcgtgaatgccatcaccttcctgctgatggtgataagcgggctgattgccctttcactctcgcagcgccgtatccgtccgctgatcccggcgctggtactgctgttcgcgccgtggctcacccgcaactaccagtggtatcagatgaacaacgacccgactcaggtcgcactggttcagggaaatatcgcccagtccctgaaatgggaacagggcatgctggataaaacactgggtatctatctcaaagaaagccgcccgtacttccgccctgatactctgattatctggccggaatccgctattccggattttgccgccagtcagtctgcgttcctggatcagctcaacggcctgctgacactcagcggcgcacagctgatcaccggtgtggtggatgcagttccgaaagcggacggcaaagaatatgatgtttacaacaccctgattgtgctgggtaataagagtgaatacgacagccgggataaaaaccgctattacaaacatcacttagtgccgttcggggagtttgtgccgctggaagatttactgcgtccgctggcgccgttctttaacctgccgatgtccgctttcagccgcgggggttatatccagccaccgctgaccgccgggaaaatgacactgactgccgagatttgctatgaagtgatcctcggagagcaggtgcgccgcaatatgaccgacaaaaccggtgtgctgctgaccgcctccaatgatgcctggttcggccgctccatcggcccgtggcagcatttccagatggcacggatgcgtgcgctggaactggggcgtccgctgctgcgcgccaccaataacggtattaccgctattattgcgccggacggctctgtcaccgctcaattaccgcagttcacacaggctaccctgagtgccactgtaacctcagcgtccggtttcacgccatattaccgtatgggcacctggccggtctggggtgccaccgttctcttcctcggtctggcgctgataaaacgcagaaagagtacagaacgcggtctgcattttcgctga

SEQ ID NO: 276520 - DNA, 891 bp, Morganella morganii
atgagcgacgaccatccatcgggtagtgatacaccgaaccagaaaaagggtttcttttctctgctgcgccagcaactgttccacggcgagccaaaaagccgtgaagacctcgttgaggtcatccgtgattccgaacaaaatgcactgatcgatcctgacacccgcgacatgctcgaaggggtaatggatatttctgatcagcgtgtccgcgatatcatgatcccgcgttcacaaattgtgactctcaagcgcaatcagacactcgacgagtgcctggatgtcattattgactctgcccactcccgctttccggtgatcagcgaagacaaagatcacattgaaggcctgctgatggcaaaagatttgctgccgtttatgcgcagtgattccgaggagttcagtattgataaagtactgcgccaggcggttgttgtgccggaaagtaagcgtgttgaccgtctgcttaaggaattccgctcccagcgctatcatatggcgattgtgatcgatgaattcggcggagtctccggactcgtcactatcgaggacattctggagttaattgtcggcgaaattgaggatgagtacgatgatgaggatgacgtggatatccgtcagctcagtctgcactcctattctgtccgcgccctcacccagatagaagattttaacgacgcattcggcacccgcttcagtgatgaagaggtcgataccgtcggcgggctggtgatgcaggccttcggccatctgccgacccgtggtgaaaccattgagattgacaactaccagttcaaagttgcgatggcagacagtcgtaaaattatccagttacatgttaagattccggacgatgctccaatcccgtctttagatgaagataatctgacatga

SEQ ID NO: 276521 - DNA, 468 bp, Morganella morganii
atgagtaatccggttcttgatttacaaatcgcctgtgaaaacacagacaacctgccctctgaagctcaatttcagcgctggattgacggcgtgctgccgatgtttcaggaagagagtgaagttaccatccgcctggtggatgaagcggaaagccacgagctgaacctgacttaccgcggcatggataaaccgaccaacgtgctctccttcccgtttgaagtgccgccggaaattgaactgccgctgctcggggatttgattatctgccgtcaggtggtggagcgcgaagccgccgaacaggaaaaaaccgaagaagaacactgggcgcatatggttatccacggctgcctgcatctgctgggttatgaccacatcgaagacgatgaagcagaagagatggaaggcctggaaacggaaatcttaaaaaaattaggctattctgatccgtatatcacagaaaaagcgtag

SEQ ID NO: 276522 - DNA, 1083 bp, Morganella morganii
gtgacagagacctatatatcaccttcacaggtagcaacacaggaaattttcctcgaaccagccgaaaatcagcgtctgcaaagcctctgcggtcccttcgatgataacatcaaactgcttgagcgccgtctcggcaccgaaatcagccgccgcgacaaccgcttccggctgaccggcaaaccgcactgcgtcaaagccgctgcggctatcctgcgccagctctatgtggaaactgccccggtgcgcggtgtgatccgcgatatcgacccggagcaggttcacctggccgtggcagaaagccgtgtactggaacagagtgacgaacatgtgccggactacggcaaatccgtcaatatcaaaaccaaacgcggtgtggttaaaccacgtacgccgaaccaggcacagtatatcgcccacattctcgaccacgatatcaccttcggtatcggccctgccgggaccgggaaaacctatctggcggtcgccgcagctgtggatgccctggagcgtcaggaaatccgccgcatcctgctgacccgccctgccgttgaggccggtgagaaactcggcttcctgcccggagatctcagccagaaagtcgatccgtatctgcgcccgctgtacgatgcgctgtttgaaatgctcggctttgagaaagtggaaaagctgattgagcgcaacgtgattgaagtcgcgccgctggcctatatgcgcggccggaccctgaacgatgcctttattattctcgatgaaagccagaacaccaccatcgaacagatgaaaatgttcctgacccgtatcggctttaactccaaagcggttatcaccggggatatcacccagattgacctgccgaacggcaataaatccggtctgcgccacgccattgaagtgctggcggatgtaccggaactgagctttaacttcttccacagtgaagacgtggtgcgtcatcctatcgtggcaaaagtggttattgcctatgaagcgtgggaagccgcagaacagaaacgcaaacagatgctgaaacagcagcgtgatgccgaacgcgcgcaggcgcagcaggaacaatctcatgagtaa

SEQ ID NO: 276523 - DNA, 1440 bp, Morganella morganii
atgtcgacgagtaaaaaactgtacataaaaacctggggctgtcagatgaatgagtacgattcatccaaaatggctgacctgctggaaagcacccacggctatactttaacagacaatgccgatgaagccgatattctcctgcttaatacctgttctatccgtgagaaagcgcaggaaaaagtgttccaccagctcggccgctggaaaaacctcaaggatgtgaatccggacattattatcggtgtcggaggctgtgtggcctcccaggaaggagattttatccgccgccgcgccccggctgtggacattgtcttcggcccgcagacactgcaccgcctgccggagatgatcaacaaactcagaggcgaccgcagcccgattgtggacatcagcttcccggaaatcgaaaaatttgaccgcctgccggaaccgcgcgccgaaggcccgtccgcctttgtttctatcatggaaggctgtaataaatactgtaccttctgcgtggtgccttacacccgcggtgaggaagtcagccgtccgtgtgatgatgtgctgtttgaaatcgcacagttagccgctcagggtgtgcgtgaagtgaacctcctgggtcagaatgtgaatgcttaccgcggcccggcgtttgacggcagtatctgcagttttgccgaactgatccgcctggtagccgcgattgacggtatcgaccgcatccgctttaccaccagccatccgattgaattcaccgatgatattatcgccgtatatgaagataccccggagctggtcagcttcctgcatctgccggtacagagcggctcagaccgtattctgacccagatgaaacgcgcccataccgcgctggaatacaaatccatcatccgcaaactgcgcaaagcacgtccggatatcctgataagctctgactttatcgtcggcttccctggagaaactaatgacgacttcgaaaaaaccatgcagcttattgcagacgtgaatttcgatatgagcttcagtttcatctactccccgcgtccgggtaccccggcggctgatctgccggatgacgtgactgaagaagagaaaaaacagcgtctgtacctgttacagcagcggattaaccagcaggcgatgagctacagccgccagatgctcggcaccacacagcgtatcctggtggaaggcccgtcccgtaaagacgtcatggaattatccggacgcaccgaaaacaaccgcgtggtgaactttgaaggcaccccggacatgatcggcaaatttgtggatgttgagattaccgatgtttacaccaactcactgcgcggccgcgtgatccggacagaagatcagatgaatctgcgtattcacgaaaccccggaatccgtgattgcccgcacccgtaaagaagacgaactgggtgtcggcatctatcagccatccgtacactaa

SEQ ID NO: 276524 - DNA, 1182 bp, Morganella morganii
atggataacccgttaacacattctgaagtcaccgttatcggcgggggaatgattggtgccgccacagccctgggactggctcaggccggttttggtgtcactgtggctgagttacaggcaccggcaccgttcgatgctcagagccgccctgacgtgcggatttccgccatcagccgcgcgtcagctgagttactggagagtctcggggtatgggagcgtgtccgtgccatgcgttgtgtgccgtaccgcaccctggaaacgtatgaggaaccggggtcggaagtgacctttaccgcagagagcctggggttacctgagctggggtatatggtggaaaacccggtactgcagcgggcattgtgggagatgatcaccgctcatgagctgatcacctgtctgtgcccggcacggttgcagagtatgacaaagcaatccggtgaatggttgctgacatttgataacggcgacgtaatcagttcccgtctggttatcggcgcggacggtgcgaaatcacaggtcagaacgctggccggtatcggcagccgcggctggcagtatcgtcagtcctgtatgttgatcaccgttgataccggacgtgagcagcaggatatcacctggcagcagtttttcccgtccggcccgcgtgcgtttctgccgctgtttgattcttatgcctcgctggtctggtatgactcaccagcgcggatccgccagctcagtaaactgccgctgccgcaactgcaggcggaaatccgcgcatcattccctgaacgcctcggagacgtgactccgctggcctgcggttctttcccgctggtgcgacatcatgccgctcactatgtacaggacggtctggcgctgatcggcgatgcggcgcataccattaatccgctggccgggcagggagtaaacctgggttaccgtgatgcggatactttgctgaataccctgattgcggcgcgtgagtgctgtgaggactggggcagtgagtctgttctcagacgttatgagcgccgccgccgtccggataacctgctgatgcaggccgggatggatgcgttttatctcactttcagtaataccctgccggggttacagccgttgcgtaacctggcactgacggtggcacaacgtgcaataccgctgaaaaagctggcgctgaaatatgcgctgggagtctga

SEQ ID NO: 276525 - DNA, 1236 bp, Morganella morganii
atgggtaacggaattccgcagataggtaatattgatttagtcaaacagctgaacggggcggtggtttaccgcctgatagaccgttccggcccgatttcacgcattcagattgccgaacaaagtcagctggcacccgccagtgtgaccaaaattacccgtcagcttcttgagcgcggcctgataaaagaggtggatcagcaggcatccaccggcggacgccgcgctatctccattatttccgaacaccgcgcctttcagactatcggcgtgcgtctcggccgccatgatgccactatcgcactgtttgatctcagcggacgggcgctcgaagaagagacctgtcccctggaagccacttctcaggcagatgcggaagctaaactcattgcgctgatcgacaacttcagacagacacaccagcgccgcatccgcgagcttatcgctattgcggtgatactgcccggactggtcgatccggatcgcggtattgtgcgttatatgccgcacattgctgtcagtgactggccgctgactgaaaatcttcatcaccattttaagctgccgtgctatgccgggcatgatatccgcagcctcgcgctggccgaacactatttcggagccacgcgcgattgtgcggattctctgctggtgcgtattcaccggggagccggggcggggatcattatcaataatcagatcctgctcaaccggcgcggtaacctcggcgaaatcggccatattcagatagatccgctcggtgaacgctgccactgcggaaacttcggctgtctggaaacagtcgcatcagatgccgccattgaaacccgggtaaaacaccagctggctcaggggtttgagagtgaactgacgccggataactgttccatccgcgccatctgccgtgctgctaaccggggggatgcccttgcggcagaagtgataaaacaggtcggtaattccctcggaaaagccattgccattacgataaatctgtttaacccgcaaaaagtggtgattgccggtgagataactgccgctgaaaatgtgctgctccctgccctgcaaagctgcataaatacgcagtcgctgaaaaatttccgcgaggatctgccggtggtgatttcacagttgccgccgaactccgctatcggggcatttgccctgataaaacgggcgatgctgtacggtgaactgctgctgcatgttctggaaaataaaccggatacggcggaataa

SEQ ID NO: 276526 - DNA, 1164 bp, Morganella morganii
atgtacgcattaaccaatgccattatttataccggtcacgatcgtctggaaaaccacgcggtcattattgacggcgaattaatccacagcgtgtgtccggtcagtgagttaccggacggaattgacacccgtgatctgggcggtgccatcctctccccgggatttattgatttgcaggtcaacggctgcggcggcgtacagtttaatgacaatgaggacgatatcacggtccgcaccctggacattatgcagaaggccaacgaacgtaccggctgcaccagcttcctgccgacactgatcaccagccccgattcgctgatgaaacggagtgtcagcaccatgcgtgattatctgaaaaaccataaaaatcaggcgctgggactgcatctggaagggccttacatcaacccggtgaaaaaaggcacacacaatccggactatatccgcaaaccggatgccgcgatgattgatttcctgtgtgataacgcagatgtgataaccaaactcacactggcaccggaaatggtggaaccctctgttatccgcaaactgacggatgccggaattgtggtctcctccgggcactccaacgcgagttatgaagagtcccgtgccgggtttgaaaacggtatcaccctctccacacacctgtttaatgccatgccgtacatttccggccgccagccgggactgattggcgcgatttatgatacctctgaaatatatgccggaattattgctgacggcctgcatgtttcctggccgaacatccgcaacagtaaagccctcaagcgcgacaagctgatcctggtcaccgatgccaccgcaccggcggggcttgatccgaaaaccagcgggctggatcattttatctttgccggcaaaacgatatattatcgtgatggtttatgtgtggacgaaaacggcacactgagtggttcctcactcaccatgatccgcgcagtggcaaactgtgttcagcatgtcggtattccgctggatgaaaccctgcgcatggccacactctatccggcacgggcaattggtgttcaggacagactgggaagtattaaatccggcagtattgccaacctgaccgccttcaccgctgatttttctgtctgtatgacaatcgttaacgggaatgtggtccatacatcatga

SEQ ID NO: 276527 - DNA, 810 bp, Morganella morganii
atgcgtttaatccctcttgcgaaagcgcaggatgtcggtcagtggtccgcacagtacatcgctgacaaaatcaatgcgttccgcccgacggctgagcgaccgtttgttctgggactgccgaccggcggcaccccgctggccacctacaaggcgctgatcgccctgcatcaggccggaaaggtcagtttccgtcatgtggtgacctttaatatggatgagtatatcggcctgccggaatcccatccgcagagttatcactcatttatgcatgagaatttctttaatcacattgatatcccggcggaaaacatcaatctgctcaatggtaatgccccggataccgatgcagaatgtgaacgctatgaagcgaagatgaaagcttacggcggtgtacagctgttcatgggcggcgtcggtaatgacggtcacattgcctttaacgagccgggttcatccctgacttcgcgcacccgtgtcaaaacgctgacaccggaaacccgtatcgccaactcccgtttctttgataatgacatcaataaagtgccgaaatatgcgctcactgtgggtgtcggcactctgatggatgccaaagaactgctgatcctcgccaccggccataacaaggcaatggcggtacagcaggcggttgaaggctcggtgaatcatatgtggacgattacctgtgtgcagatccacccgaaagccattgtggtatgtgatgaaccggccacacttgagctgaaagtgaaaaccctgaagtatttctgtcaccttgaatctgacattaccgaacagtttgctgctgaataa

SEQ ID NO: 276528 - DNA, 2034 bp, Morganella morganii
gtgggtatactgaactatctgcagcggattggccgggcactgatggtgcctgtcgccacattgccggctgcggcaattctgatgggggtcggttactggatcgacccgacgggctggggtgcggacaacgtggttgccgcgttcctgatcaaatccggtgcggctatcattgataacatgtcaatgctgtttgctatcggtatcgcttacgggatgtcaaaagacaaagacggtgcggcagcactgaccggttttgtcagctttatggtggtgaccaccctgtgttccaccgcgacagtcggtatgattcaggggatccctccggaagcggttccggcggcgttcggtaagatcaacaaccagtttatcggtattctggtcggcgttatttccgccgaactgtataaccgttacagcggtgttgagctgccgatggcattgtcattcttcagcggccgccgtctggtgcctatcctggcgtcatttgtgatgatcctggtggctgcggtgctgatgtatgtctggccggtcatttatgatgcactggtttccttcggtaagagcattaaagacctgggcgcgtggggcgcggggatttacggcttctttaaccgtctgttaattcctgtcggtctgcaccacgcgctgaactcagtgttctggttcaacgtggcggatatcaacgatattcctaacttcctggccggtcagcaatccattgatgccggtacggcgattccgggtatcacaggccgttatcaggccggtttcttcccgatcatgatgtttggtatcccgggggccgcgctggcgatttatcactgtgccaaaccggaaaacaaagcaaaagtggccggtattatgatcgccggtgcatttgccgcgttcttcaccggtatcaccgagccgattgagttctccttcatgttcgtggcaccggtactgtatgtcatccacgccttcctgaccggtatctccctgtttatcgctgcaaccatgcagtggatttccggtttcggcttcagtgcggggctggtggatatggcgttgtcctcacgcaacccgctggcaacccactggtatatgctgatcctgcagggtctggtcttcttcgcgctgtactatgtggtgttccgttttgttatcaccaaattcaacctgttaaccccgggccgtgaagcggcgatggcaaccaacgataccgttgatggttacagcgagaatgtcagcactgataacaaaaaagatgagaaaaaatccatcagcagcgaagcgcgtcagtatatcgcggctatcggtggttcagataacctgaccggtattgatgcgtgtatcacccgcctgcgtctgactgtaaaagactccgcgcaggttaatgatgcttatgcgaaacaaataggtgcatccggcgttatccgtctgaataaagagagtgtgcaggtgattgtcggcacccgtgccgagctgattgccaatgccatgcgtgacgtactgaaagaaggcccggttgcggcagctcaggctgctgctgcggctccggaagcagtgaaagccaaagcacagggcaatggtaacgtggtactgacgctggtggcaccattcgacggtgaagtggttgatttatccgctgtaccggatgaggcatttgccggccgtgttgtcggtgacggtattgccatcaaaccggaaagtgacaccgtatatgccccggcggcaggtactgtggtgaaaattttcgataccaaccatgcattctgcctggaaaccgataatggtgcggaaattattgttcacatgggtattgatactgtgaatctgaacggcaacggctttacccgcctgattgaagaaggcgcacaggttgctgccggtgatgcggtgctgaaactggatctgacgtatctgaatgagcatgccaaatctatgataagcccggtaatcatcagtaatatcgatgattatgatcgcgtggagattgttgccaaaggtctggttaaggcaaacgaatctgagctgtatcatgtcattaaataa

SEQ ID NO: 276529 - DNA, 1668 bp, Morganella morganii
atgaacgaggctgatgcccgcccgacaaactttattcgtcagattattgacgaagacctggcttccggaaaacataccacggttcacacgcgcttcccgcctgagccgaacggttacctgcatattggtcatgcgaaatcaatctgcctgaatttcggcattgcacaagactatcaggggcaatgcaatctgcgttttgatgacaccaacccggttaaagaagacgtggaatacgttaattccattgaaaacgatgtcaaatggctcggttttcagtggagcggtaaagtatgctactcctccgactatttcgacacgctgtacaactacgccgttgagctgatcaacaaaggtctggcgtatgtctgcgaattaagtccggaagagatccgcgaataccgcggtaccttaaaagagccgggcagaaacagcccgtaccgcgaccgcaccccggaagagaacctcgcgctgtttgaaaaaatgcgtgacggcggctttgaggaaggtaaagcgtgtctgcgtgccaaaatcgatatggcatcctcctttatggtgatgcgtgatccggtgatttaccgcattaagtttgcaacccaccatcagtccggtgacaaatggtgcatctacccgatgtatgatttcacccactgtatttctgatgcgctggaagggatcacccattcactctgtacgctggaattccaggacaaccgccgcctgtatgactgggtgctggataacatcaccattgactgccatccgcgtcagtatgagttctcccgcctgaatcttgaatacaccgtgatgtccaagcggaaactgaatcagctggtaacagagaaatttgttgaaggctgggatgacccgcgcatgctgaccatttccggtctgcgccgtcgtggttataccgctgcctctatccgcgagttctgccgccgtatcggcgtcaccaaacaggataacaacgtcgaaatggcggcactggaatcctgtatccgtgatgacctgaacgaaagcgcaccacgcgccatggcggttatcgatcctgtgaaagtcgtgattgaaaacatgccggaaggcgatgtgatggtcaccatgccgaatcatccgaacaaaccggagatgggcagccgtgaagtgccgttcagccgtgaaatctggattgatcgtgcagacttccgtgaagaagcgaacaaacagtacaagcgtctggtgctgaataaagaagtgcgcctgcgtaatgcgtttgtgattaaagcagaacgtgcggaaaaagacagcgaaggcaatatcaccactatctactgcacctatgatccggagaccctgaataaagatccggctgacggacgtaaagtgaagggcgttatccactgggtcagcgtgaaacacgcggtaccggcggaaatccgtctgtatgaccgcctgttcagtgtaccgaacccgggcgctgaggatgatttcctgtcaacgctaaatccggattctctggtgatccgtcagggttttgtggagccgtcactggtcgctgcagacagcagcaaaccgtatcagtttgagcgtgaagggtatttctgtgctgatgccaaattatcctcagcggataaattagtctttaaccggactgtcggcctgcgtgatacctgggcaaaaattgaaagtaagtaa

SEQ ID NO: 276530 - DNA, 450 bp, Morganella morganii
atgaccgataacaataaagcattgaaaaatgcaggactgaaagtcacacttccccgcctgaagattctggaagtgttgcaggatccggagtgccatcacgtcagtgcggaagatctctacaaaaaactgatcgatatcggtgaagagattggactcgcaactgtctaccgcgttctgaaccagtttgatgacgccggtattgtcacccgtcataactttgagggcggcaaatccgttttcgaactgacccagcaacaccaccacgatcatctgatctgcctggattgcggtaaagtgattgagttcagtgatgaatccattgaatcacgtcagaaaaatatcgcggaacgccacggtattaaactcaccaaccacagcctgtacctgtacggccactgtgcggatggtgactgccgttctgatgaaggtatccacgacgagaaaaaataa

SEQ ID NO: 276531 - DNA, 531 bp, Morganella morganii
atggcaatcgcaggtatattttttggtagtgacaccggtaacacagaaaatatcgctaaaatgattcagaaattactcggcgatgatgttgctgaagtccgggatgttgccaagtgcagcaaagaggacatcgaagggtttgatttcttactgctgggtatcccgacctggtattacggcgaagcacagtgtgactgggatgatttcttcccgacactggaagaaattgattttaacggtaaaattgtggctatcttcggttgtggtgaccaggaggattacgcagagtatttctgtgacgccatgggcaccatccgtgacatcattgaaccgcgcggcgcgaccattgtgggtcactggccgacagaaggctaccactttgaagagtcaaaaggcctggcggacgacagtcactttatcggcctggctattgatgaagatcgccagcctgagctgactaacgaacgcgtggcaaaatgggttgagcagatccgcgaagaaatgagtctcgacgagattctggcaatttaa

SEQ ID NO: 276532 - DNA, 294 bp, Morganella morganii
atggccaaagaacaaacggatcgtaccacgctggatttgttcgctgacgaacgccggcccggacgaccgaaaacaaacccgctctcccgtgatgagcagttgcggattaacaaacgcaatcagctgcggcgtgacaaagttaacggattacgccgcgttgagctcaaactgaatgcggatattgtcgatgccctgaaccagctggcatacgaagaaaacgtgaaccggggcgagcttatcgagcaaattctgcttgattaccttcagcgttctgatttatgcaccaaattgtga

SEQ ID NO: 276533 - DNA, 255 bp, Morganella morganii
atggatcgtatctcagaatctgcggaattatcgcggatgtcgcacaaaaagtatcactacggctgcaaagtaaagcagatgctgacggtgtttatccgtccgcttcagtatttgtgtctgattttatccggctgctgcctgctggatatctgttttgatctgccggggcaggatgtcagacatcaggtgcgttctgttgtagcctggtggcaggagagtgacgatgacagtctgatactgagtttccgtcagtga

SEQ ID NO: 276534 - DNA, 780 bp, Morganella morganii
atgaaattacctgcattacttcatcatgaaatattcacgcctgaaatatcacatcacaccacacccattgttctgatccacggtctgttcggggatctgcataacctcggggtgcttggccgtgaactgcggaaaacgcataccgtggtacagattgatgtccgtaaccacggcgattcaccgcgcgcacaaaccatgacttaccgggaaatggcgcaggatgtacttgatcttatccgctccctgaacattgaaaaagtaatagtgattggccattccatgggcggaaaaatcgccatggcgctggctgcactggctcaggatgttactgaaaaactgattgttattgatatggctcccgtcgcttacggtgtacgtcgtcatgatgagattatcgcggcactggaagatgttactgccgccggtgtcaccacacgcactgaggccaccgcaattatggcgcgccgcatccgtgaggatggcgttattccgttcctgctgaaatcctttaagcagggagaatggaaattcaatctgccggttatcaaagcacagtatgaatccatcatcggctgggaaaccctgccgccgcaacaggttccgctgctgcttatcccgggcggtaattcatcgtatgtgaaaccggaataccgcgacgccattatggcgcagttcccgcaggcaaccgcccatgtgattgccggatgcggccactgggtacacgcggaaaaaccggacgcggttctgcgcaccatcagccgtttcctggataaagcctga

SEQ ID NO: 276535 - DNA, 555 bp, Morganella morganii
atgaaaacaatcgatgtagatgaagaactttacagttatattgccagccacacacagcacattggtgaaagtgcatcggaaattttgcgccgtatgctcaatttagggccgcaggctccgggtaccacctgcgcacctgttgcaactgacagcgcggataacaaaactccgccggttaccccgcgtccggtaaaagccacttctcaggatccggtccgcgtcatgcgcgaactgctgctgtccgacagctatgcagagaaaaagaaaacgatcgaccgttttatgctggtgttatccgcactgtataatattgatccgcaagggttcagcaaaagtactgatgaactccacggccgcacccgtgtctattttgccggtgatgagcacacgctgctggccagcggtaaaaccagcaagccgcgccacattccgggcacgccgttctgggttatcaccaacaccaatactcagcgcaagcagagcatggtagaacagattatgcagggaatgggcttcccggcaaatactgtcgagaaagtctgcaataccctgtaa

SEQ ID NO: 276536 - DNA, 1641 bp, Morganella morganii
gtggctcatacgcacccgcgggctggtcagcctgcgcaacaatccgatttaatcaatgtggcgcagctaacctctcagtattatacccttgcacctgatgcggcggatccggcacagcaggtcaaattcgggacttccggtcatcgcggcagtgcggtgcgcggcagtttcaacgaagcacatattctggcggttactcaggcaatcgccgaaatccgtcagcagcagggtattaccggcccgtgctatgtgggcaaagatacccacgccctctctgaagcggcatttcagacggtgttatccgtactggccgcaaatggtgtccgcgttattattcaggaaaataatggtttcaccccgacaccggcggtgtctcatgccatcctgacttacaaccgcgaccatgctgataaagcggacggcattgtgatcacgccgtctcacaacccgccggaagatggcggtatcaaatacaacccgccgaccggcggcccggcagatactgacctcacctctgttatcgaaaagcgcgccaatgagctgctggccggtaatatggcgcaggtgaaacagataccggtgtgtgatgccctgcgcagcccgctggtcagcgcggtgaacctgattgagccgtatgtcagctcgctcagtgacgtgatcaacatggatgctatccgtaacgcgaaactcaaaatcggcgtggatccgctgggcggtgccgggattgagtactggaaacgcatccgtgatttctatgagctggatattgagctggtcaatgagcaggtggatcagacattccgctttatgccgctggatcacgacggggttatccgtatggattgctcctcaaaatgggcgatggcggggctgctcagcatgcgtgaccgcttctcgctggccttcgccaatgacccggattacgaccgccacgggattgtgacaccgaaagggctgatgaatccgaaccattatctggcggtggcgattaactatttatttcagcaccgtcctgactggccggcctctgtcggtgtcggcaaaacgctggtatccagtgcgatgattgatcgcgtggttgctgatttacagcgtgatctggtggaagtcccggtcgggttcaagtggtttgtggacgggctgtataacggcacactgggcttcggcggcgaagagagcgcgggggcttcgtttctgcgctttgacggcacaccgtggtcaaccgataaagacggtattatcctctgcctgctggctgcggaactgaccgccgtgaccggcaaaaacccgcagcagcattatgatgagctggcggaaaaattcggttccccatgctacagccggatccaggcagcggccagtcatgcggagaaatcccggctgtcaaaactgtctccggaaatggttatcgcggataccctggccggtgatccgatcaccgcccgtctgacagctgctccgggtaacggtgcgtcgatcggcggcctgaaaatcatgagtgagcagggatggtttgccgcacgtccttccggtacggaagatgcctataaaatctactgtgaaagtttccggggtccggaacatctggcacagatagaaaaagaagccattgaaatagtcaaccaggtgattgcggactga

SEQ ID NO: 276537 - DNA, 429 bp, Morganella morganii
atgagtacctggctgatctatgccctgctgtctgccatcagtgccgcaatggttgctgtcttcgggaaaatggggctgcagcatctggatgccaataccgcaaccgcgatccgtgcagtgattatggcgctgtttctggtcggcgtggtggtggttcagggaaaacttaatcttatcagtgaaataatcgaaaaccgtaaagccctgttttttatcgctctgagcgggattgccggggcgctttcctggctgttctattttatggcaataaaaaacggtcaggtttctcaggttgccccaattgataaactgagtgtggtttttgctgtgatttttgccgtgatcctgttcggtgaaaaaatttccctgattgcggcaggcggcgttgcgctgatcaccgttggtgcactgatggtcgcgctgggctga

SEQ ID NO: 276538 - DNA, 213 bp, Morganella morganii
atgtcaacatttcaggcatatccgttgcataaggttctcttgcgccgtaccggtgcagtatctttaggtatcctggcgttcccgtttatgctgttctaccgggatcgcgcccgcttctggagctatctgtaccgcgtgtggtccaagacaagtgataaaccggtctggctggcacgttcagaaaatgcggtaagcagcactcagcagcactga

SEQ ID NO: 276539 - DNA, 744 bp, Morganella morganii
atgaatcatattgaattagaacagattattaatgaaaaactggcagtacaggattttcaggattatgccccgaatggcctgcaggttgaaggtcgtgaacaggttcagcgcgtggtgaccggcgtgaccgcctgtcaggccctgctggatgaagcggtgagactgaatgcggacgcggtgctggtgcatcacggctatttctggaaaaacgagccggtcagtatccggggcatgaagcagcgccggatcaaaacattgttgtgtaacgatatgaatttatatggttatcatctgccgctggatgcgcatccggagctgggtaataacgcgaaactggcgcaactgatgggggtcacagtcaccggacaggttgagccgctgcttccgtgcggtgagttcgcgcaaccggtcagcggtgaggaactggcgcagcgtttacagcaggggctggatcgggagattctgcattgcggggataatgcgcctgctcagattaaaaaactgggctggtgtaccggcggtggtcagggttttattcaggcagccgcatatgcggggcttgacggctttgtgaccggtgaggtgtcagagcagacaatccatatcgcccgtgaatgcgggatgcacttctttgccgccggtcaccatgccaccgagcgcggcgggatccgtgctctgggtgaatggttgcagaaaacgcacgggctggatgtgatttttgtggatattccgaaccctgcataa

SEQ ID NO: 276540 - DNA, 1146 bp, Morganella morganii
atgacaatacaaaaacccgcattaacacttgccgttgccctgatgatgttcccgcagatagcggaaaccatctacagcccggcgctgacggatatcgcacagggattcggcgtcagtgcggctcaggcaggacagaccctgtccctgtactttttcgccttcgcactcggcgtggtcacctggggacgtttatgtgatatcgccgggcgcagacgcaccatgctgagcggtctgatactttacgctgccgcctcctgcggcgcggttatcacacaggatttcagtgtgttgctgatcctgcggatgctgtctgccttcggggcggcggtcggctcagtcggcacacaaaccatcatgcgtgactgttaccgtggtgatgagctggcgaaagtgttctctgtcatggggatagcactggctgtcagcccggcactgggcatgttcagcggcgcggcgctgaccggtttcgccggatatcagggggtctttaccgggcttgcggtactggcggttgttctgctggcatggacagcactccggttaccggaaacacggccggcacatatcacgtcagtttcgctgccggaaacagccggtcgtatgctgtgtgaccgctttattctgcgcaatgtgctgctgattgcctttctgaatatcagcctgttcagctactaccagttagcaccgttttatttcagcgggctgggctttacacaacaggaattcggttacagcggattactgctcgcgcttggtgtggccgcaggctctgtgatcaaccgtgccctgcttaaacgcggatggcacagccattcactgatccgccttgctgccgtaatcggtatggtcagcgctgctgcggtctggctgttgtcaggatcgattttatttgtgctgccggtaacaggtatcgtgatttgttacgggctcgccattccgaatattctggccggtgtgctacaggattaccgtgaccgcctcggcactgccggtgcgctgctcggtctgatgtattacctgctgattggcggcgggctggcactggccgggctgagccagaatcttggcctgacgctgtgtgtctgtgctgcggggacactgctatgtgcaccgcgcaaggctgtacaaagcacacaaaccgcataa

SEQ ID NO: 276541 - DNA, 786 bp, Morganella morganii
atgtttatcaaaagggacaacatggcgtggctgaagcaaagtgatgcatttgatgcggacagttacactgcgccgctggtcgggatcgctgcagagatggcggcgcagcatgattccggttttcactgccatcagcgcggacaattgctgtttaccgaacggggggcgattcagatcaccctgacggacacgctctctgttctgccaccgacgcgggtggcgtggatcccgccgcagatgctgcaccgtgcacagatgtttgaggctgtcggctaccgctcactgtatccggatgcacaactcagcacctgtctgccgccaacctgtgaaattttcggcgtatcgccgctgctgcgtgagatcctgtttctctttgccggactgccgtttgacagtgactggacacaaccccgcttacagcatctgctgccggtatttctggatgagctggcgctggccgggcgggaagatatgcaattaccgctgccgtcagaccggcggctgaaaaccctggatacccggatactgccgccgccgcttaatgaactggcatcccgctgcggtgccggggaaaagacgataacgcggattttccggcgggaaaccggtatgagctatcagcaatggcggcagcagtggcgattaataaaatctgttgaacttttggcgaaaaaatatcgcagtagcgatattgcacaggcgctcggatttgccagtgacagcgcgtttgtctctttcttccgtaagatgaccgggaaaacacctggtgaatatatgggtaaatga

SEQ ID NO: 276542 - DNA, 1296 bp, Morganella morganii
atgtctaatacaaaggcggagctgacactaaacggcgtcagggttactgatctggatatcctgagcccgactctcggccagcccgtagttgatgtccggacgctcggcggaaaaggctactacacctttgatcccggcttcacctccactgcgtcctgtgaatcaaaaatcacgtatatcgacggtgatcaaggtatcctgttacatcgcggcttcccgattgaagaactggcgatgaaatctgattatctggaagtgtgctatatcctgctgtacggcgaagcgcctgatcagaaagagtatgacgaatttaaagaaaccgtaaaacgccacaccatgatccacgagcagatcacccgcttattcaacgggttccgccgtgactctcacccgatggccgtgctctgcggcgtgaccggcgcactggcggcgttctaccatgattcgctggatgtgaataatccgcgccaccgcgaaattgcggcctaccgtctgctctccaaaatgccgaccgtcgcggcaatgtgttataaatattctgtcgggcagccgtttgtctatccgaagaacaatctttcctacgccggtaacttcctgcgtatgatgtttgccaccccgtgtgaagagtatgtggttaatccggtgctggaacgtgccatggacagaatcctgatcctgcacgcagaccacgaacaaaacgcctccacttccactgtccggaccgccggttcttccggtgccaacccgttcgcctgtatcgcagccggtattgcctccctgtggggacctgctcacggcggcgcgaacgaagcctgcctgcgtatgctggaagagatccagaccgtcgatcacatcccggcctttattgagcgcgcgaaagataaaaatgactctttccgtctgatgggcttcggccaccgcgtgtacaaaaaccatgacccgcgtgccaaagtaatgcgtgaaacctgtcacgaagtactgaacgaactgggcctgaatgacagcctgctcgaagtggcgatggagctggaacgtatcgcgctgaacgacccgtactttatcgagaagaaactctacccgaacgtggatttttactccggtatcatcctgaaagcgctgggtatcccgtcaaatatgttcacggtgatctttgctatcggccgcaccatcggctggatcgcccactggagcgaaatgcacgacgacggcctcaaaattgcccgtccgcgtcagctttataccggttacactgagcgtccgtttgaaaccaaagtcaccaaacgctgttcatcgtga

SEQ ID NO: 276543 - DNA, 390 bp, Morganella morganii
gtgggcaaaattgtgaaaaaacaacgacctgtcaatttagacttgcagacgatccactttccgatccctgcaatcgcttcaattttacaccgtgtctcaggcgtcattaccttcattgctgtagcgattctgctgtggttattagggttgtcgctgtcctcgccggaagggtttgcgcaggctgctgatatcatgagcggtttcttcgcgaagtttatcctctggggcatcctcactgcattggcttaccacatctgtggtggcattcgtcacatgttaatggatttcggatttgttgatgaaacgctggctgccggtatttcatccgcgaagatttccatggttctgactgtgattttagccgtgttggcgggggttctggtatggtga

SEQ ID NO: 276544 - DNA, 360 bp, Morganella morganii
atggtgaaaaattcaaaaatcagtgcgaccacgctcggccgtaacgggattcaggattggttaattctgcgtgccagcgccattgtgattacactttatgtactctacctcgtcggttttgtggcttttacctctgacatcacttatgacgtctggtacagcttctttaccgcttcattcactcaggtgttcaccaccctgacactgatcgccattctcgcccatgcctgggtcgggttatggcaggtactgacggattacgtcaagtgcctgagcctgcgcctgctgctgcaatttattatcattattgtgctggcagcctatgtcatttacggttcaatcattgtgtggggtgtctaa

SEQ ID NO: 276545 - DNA, 1710 bp, Morganella morganii
atgcgcgcggcacttcagatttctcagtccggcctgtcctgtgccctgttatccaaagtgttcccgacccgctctcatacagtatccgcccagggcggtatcactgtggcgctggggaatacccatccggataactgggaatggcacatgtacgacaccgtaaaagggtcggattatatcggtgaccaggacgctatcgagtacatgtgtaaaaccggcccggaagcggtgctggaactggagcacatggggttaccgttctcccgtctggacgacggcagtatttatcagcgtccgttcggcggacaatccaaagatttcgggggcgagcaggctgcacgtactgccgctgcggctgaccgtaccggtcacgcactgctgcatacgctgtatcagcagaacctgaaaaatcacaccacaattttctccgaatggtatgccctggatctggtgaaaaaccaggacggcgccattatgggcaccaccgctatctgtatcgaaaccggtgaagtggtctatttcaaagccaaagccaccattctggcgaccggtggtgcagggcgtatctatcagtccaccaccaacgcccatatcaacaccggtgatggtgtcggtatggcggtacgtgccggtattccgctgcaggatatggaaatgtggcagttccacccgaccgggattgccggtgccggggtgctggtcactgaaggctgccgtggtgagggcggttatctgctcaataaagacggcgaacgctttatggagcgctacgcaccgaacgccaaagatcttgccggacgtgacgtggttgcccgttccattatgatcgagatccgcgaaggccgtggttgtgacggtccgtggggtccgcatgccaaactgaaactcgaccatctgggcaaagaagtgctggaatcccgtctgccgggtattctggaactgtcacggacattcgcccatgttgacccggtcaaagagccgattccggttatcccgacctgccactatatgatgggcggcatcccgaccaaagtcaccggtcaggttgtgaccatgaatgcgcagggtgaggatgtgctggttccgggtctgtttgcggtcggtgaaattgcctgtgtttctgttcacggtgcaaaccgcctcgggggtaactcactgcttgacctggtggtcttcggccgttcagccggtctgcatctgaaagaatctattctggagcagggcgcaatgcgtgatgccggtgaatcggatatcgatgcggcactggcgcgtctgaaccgctggaataacacccgcagcggtgaggatccggttgctatccgcaaggctctgcaatcctgtatgcagcacaacttctcggtattccgcgaaggggatgcgatggccaagggactggaagagctgaaagccattaaagagcgtctgcagtatgcgcgtctggatgatacctcatcagaattcaacacccagcgcatcgagtgtctggagctggataacctgatggaaacggcgtattccactgcaatggccgccaacttccgtactgaaagccgtggtgcgcacagccgctttgactatccggatcgcgatgatgcgaactggctgtgtcattccctgtacctgccgcaatctgaaaccatgacacgccgtgcggtgaacatgcagcctaagctgcgtgacccattcccgccgaagattcgtacttactga

SEQ ID NO: 276546 - DNA, 717 bp, Morganella morganii
atgaaagttgaattttcagtttatcgctataacccggatgtggataacgcaccacacatgcagaactatcagttggatgtggaagaaggccgggacatgatggtgctggatgcactgattctgctgaaagagcaggatccgagcctgtcattccgccgctcctgtcgtgaaggggtgtgtggttctgacggtatcaatatgaacggcaaaaacggtctggcctgtatcactccgttgtcggcactgatgaaaggcggtaaaaaagtggtgatccgtccgctgccgggcttaccggtggtgcgggatctggtagtggatatggggcagttctacgcgcagtatgaaaagatccgcccgtatctgatcaacgacaacaaaaacccgccggcgcgtgagcatttacagtcaccggcgcagcgtgaaaagctcgatggtctgtacgaatgtatcctgtgtgcctgctgctcgacatcctgcccgtccttctggtggaacccggacaaatttatcggcccggccggtttattagccgcgtaccgcttcctgacggacagccgcgataccgagacagaatcccgtcttgacgacatcagtgatgctttcagcgtattccgctgtcacggcatcatgaactgcgtcagtgtatgtccgaaagggctgaatccgacaaaagcaattggtcatattaaatcaatgttactgaaacgcagtgcataa

SEQ ID NO: 276547 - DNA, 2805 bp, Morganella morganii
atgcagaacggcgcactgaaggactggctggattccagctttctggctggagaaaaccaggcctacatagaagatatctatgaagactatctgaacgatccgtcctccgtcgatggaagttggcgggagattttcgactcactgccaaaagcggacatcacagaacaacctcattcacagacgcgcgactacttccgtcgtctggccaaagattcaacccgctaccacacttccgtcagcgatccggcgatggattccaagcaggtcaaagtcctgcagcttatcaacgcattccgcttccgcggtcatcagaatgccaaccttgacccgctcggcctgtggaaacaggaaccggttccggatctggacccggcgttccacaatctgaccaaagccgattttgatgaaacctttaacgtcggttcttttgccatcggcagcgaaaccatgcagctgagcgagttgtttgatgcattaaaacgcatttactgcggctccatcggtgccgagtatatgcacatcaccaataccgaagagaaacgctggctccagcaacgtctggaatccgttgacgtcagtaagctgttcagtgctgatgaaaaacggcgtttcctggcggatctgaccgcagccgaagggctggagcgttatctcggggcgaaattcccgggcgcaaaacgcttctcactggaagggggcgattccctcattccgatgctgaaagatctgatccgtcatgccggtaagcaggacacccgcgaagtggtgctgggtatggcacaccgcggccgtctgaacgttctggttaacctgttcggtaaaaaaccggcggatctgtttgatgagtttgccggtaaacacaaagatcatctgggtaccggtgacgtgaaataccatcagggtttctcgtccgatttcgtgacggaaggggctcaggtgcatctggcactcgccttcaacccgtctcaccttgagattgtcagcccggtggtcatcggttctgtccgcgcccgccgcgaccgtctgccggaaagcctgagcaaaatggttctgccaatcaccattcacggtgactcagcagtaaccggccaggggattgttcaggaaaccctgaacatgtcacaggcacggggctatgaagtgggcgggactgtccgcattgttatcaataaccagattggtttcaccacctccaacccgaaagatacccggtcaacggaatactgtactgacatcatgaagatggtacaggcgcctattttccacgtgaatgccgatgatccggaagcggtggcctttgtgacccgcctggcactggatttccgtaacacctttaaccgcgatgtgatgatcgacctggtctgctaccgccgtcacggccataacgaggcggatgagccgagtgcaacccagccgatgatgtaccagaaaatcaaacagcacccgacaccgcgcaaaatctacggcgataaactgattgccgaaggtgtggtcgctgccggtgatgtgactgaaatggtcaatatgtaccgtgatgcgatggatcgcggtgactgtgtggtggaagagtggcgtgaaatcggtaaagccgcgctcacctgggaaccgtacctgaatcacaactggaatgacagctacgccaataaagtggaactgaaacgcctcggtgatctggcgcgccgtatcagtaccgttccggaagaagtgcatatgcacccgcgtgtcgaaaaaatctataccgaccgtgcggaaatggcggaaggtaacaaactgctcgactggggtgcggctgagaatctggcttacgcaacactggtggatgaaggtgttccggtgcgtctgtccggtgaggatgcgggacgcggtacgttcttccatcgtcacgcggttatccataaccagagcaacggctcctgctatgtgccgctgatgaatgtccataacgcccagggacgcttcaatgtgtgggactccgtcctgtctgaggaagcggtactggcctttgaatacggttatgcaaccactgacccgcgcggcctgactatctgggaagcccagttcggtgacttcgccaacgtggctcaggtggtgattgatcagttcatcagctccggcgaacagaagtggggccggatgtgcggactggtgatgttactgccgcacggctacgaaggtcaggggccggagcactccagtgcccgtctggaacgctacctccagctttgcgcggaacagaacatgcaggtctgtgtcccgtcaacgccggcacaggtttaccatatgctgcgccgtcaggcactgcgcggtatgcgccgtccgctgattgtcatgtcaccgaaatcactgctgcgtcacccgctggcggtctcttctctggaagaactggccgaaggccgctttgaagcagttatcggtgaagctgatgatctgaatccggcagatgtgaagcgagttgtgctgtgttccggtaaggtttactacgatttactggagcagcgccgcaagaataatcagacggatgtggcgattatccgtattgaacagctctatccgttcccgcatgaagatatccatgcgattctcgcaccattcagccatgtgaaagattttgtctggtgccaggaagagccgctcaaccagggcgcgtggtactgctgccagcataatttccgtgatgcggttccggcaggtgcggcactgcgttatgcgggccgtccggcatccgcctctccggccgtgggttatacgtctgttcaccagcagcaacaacaagagctggttaatgatgcactgaacgttgaataa

SEQ ID NO: 276548 - DNA, 1212 bp, Morganella morganii
atgagtagcatagaaattctggttcctgatctccccgagtctgttgccgatgccaccgtggcaacctggcacaaaaaaccgggtgacagcgtcgaacgtgatgaagtgctggtggaaattgaaacagacaaagttgtgctggaagttcctgccagtgattccggtgttctggaagcggtgctggaagaagaaggggcaaccgtcctctctaaacaactgctcgggcgcatccgtctgggcgacagcaccggtctgcctgcagaaataaaagaaaaagtacagtccacaccggcacagcgtcagaacgccggtctggatgaagaaaccaatgatgcggtaagccctgctgtgcgccgcctgctcgcagagcacggcctgaaagcggcagatattaccggcagtggtgtcggtggtcgtctgacccgtgaagatgttgagaaatatctgtctcagcagccgaaagcacctgcaaaagccgccgctgagccggtttctcaggccggtttaccgcaccgcagtgaaaaacgcgtgccgatgacccgtctgcgcaagcgtgtggcagagcgtctgctggaagcgaaaaataacaccgcaatgctgaccacctttaacgaggtgagcatgaagccggtgatggatatgcgcaaacagtatggcgaatcctttgaaaaacgccacggtgtgcgcctcggtttcatgtcgttctatgtgaaagcggtggttgaggcactgaaacgttatccggaagtgaacgcttctatagacggtactgatgtggtgtatcacaactatttcgatatcagtattgcggtctccacaccgcgcggtctggtgaccccggtcctgcgtgatgcggatgcgctgagcatggctgaaatcgaaaaacgcattaaagagctggctgtcaaaggtcaggaaggcaaactgacagtggaagatctgaccggcggtaactttaccattaccaatggcggggtattcggctcactgatgtccacacctatcattaacccgccgcagagtgcgattctggggatgcatgctatcaaagatcgtccgatggcggtaaatggtcaggtggtgatcctgccgatgatgtacctggcgctctcttatgaccaccgtctgattgatggccgtgaatctgtcggattcctcgtgaccattaaagagatgttagaagatccggcacgtttactgctcgacgtgtaa

SEQ ID NO: 276549 - DNA, 1167 bp, Morganella morganii
atgaatttacacgagtatcaggcaaaacaactcttcacccggtatggtttacctgcaccggcaggctatgcctgctccacaccccgtgaagcggaagaagcagcatccaaaatcggcagcggcccgtgggtcgtgaaatgccaggttcatgccgggggccgcgggaaagcgggcggtgtgaaactggttaagagcaaagacgaaattcgcgcgtttgccgaacaatggttaggcaagcgtctggtaacctatcagacagatgcactgggtcagcctgtgcatcaggtgctggtggaaggcgcaacagatatcgccaaagagctttatctgggtgccgtggtggatcgcggttcacgccgcgtggtctttatggcttccactgaaggtggtgtcgaaattgagaaagtggcacacgaaacaccggaactgatccacaaagccgtgattgacccgctgaccggcccgatgccgtatcaggggcgcgagctggcgtttaaactgggtttaaccggtaaattagtcagccagttcaccaaaatctttatgggactggcaaccatgttcctggagcgtgatctggccatggcagaaatcaatccgctggttatcaccactcaggacgagcttatctgccttgacggcaaattaggtattgacggtaacgctctgtaccgccagccggaactgcgtgaaatgcatgatccgtcacaggaagatgcccgcgaagcacaggctgcacagtgggaactgaactatgtggcactggacggcaatatcggctgtatggtgaacggtgccggcctggcaatgggcaccatggatatcgtcaaactgcacggcggtgagccggcgaacttcctggatgtcggcggcggcgcaaccaaagagcgcgtaacggaagcctttaaaatcattctgtctgacgaaaacgtcaaagcggtcttcgttaatatcttcggcgggattgtccgttgtgacctgattgcggacgggattatcggcgcggttgaggaagttggtgtcagtgtgccggtggttgtgcgcctggaagggaataacgcggaactgggtgcggaaaaactggcgaaaagtggtctgaatattattgcggcaaccagcctgacggatgctgcgaaacgtgttgttgcagcagtgggagcgaaataa

SEQ ID NO: 276550 - DNA, 873 bp, Morganella morganii
atgtctattttaatcgataagaacaccaaagttatctgtcagggattcacaggtagccaggggactttccactctgaacaggcgattgcgtacggcaccaaaatggtcggcggtgtaacgccgggcaaaggcggtacaacacatttaggtttaccggtctttaacaccgtgcgtgacgcggtggaagccaccggtgcgaccgcttctgttatttatgtaccggcaccgttttgtaaagactcgattctggaagcgattgatgcaggtatcaagctgattatcaccatcacggaaggtatcccgaccctggatatgctgaccgtcaaagtgaagctggatgaagcaggtgtacggatgatcggcccgaactgtccgggtgttatcacgccgggtgagtgcaaaatcgggatcatgccgggacatatccatctgccgggcaaagtggggatcgtttcccgttcaggtacgctgacttatgaagcggtgaaacagacgactgatgccggtctggggcaatccacttgtgtgggtatcggcggtgacccgattccgggttctaactttattgatatcctgcagatgttccagaacgacccgcagacagaagcgattgttatgatcggtgaaatcggcggcagtgcggaagaagaagcggctgcctttatcaaagaccatgtcaccaaacctgtcgtggcgtatatcgcgggtgtgactgcgccgaaaggcaaacgtatgggtcatgcgggggcgattatcgcaggcgggaaggggacagcagatgagaaatttgccgcccttgaagccgccggtgtgaagacggtccgcagtctggccgatatcggtgatgcggtaaaagcgattctgaataaataa

SEQ ID NO: 276551 - DNA, 1563 bp, Morganella morganii
atgtttgatattgtcgaactgtcgcgattacagtttgccttaacagcgatgtaccacttcttatttgtaccgctaacattagggatgtccttcatgttagcgatcatggaaacggtatacgtcctgtccggtaaacaaatctataaagatatgacgaagttctggggcaagttatttggtattaacttcgctctgggtgttgctaccggtctgaccatggagttccagttcgggacaaactggtcatactactctcactatgtcggtgatatcttcggtgcgcctctggcaatcgaaggtctgatggcattcttcctcgaatccaccttcgtgggtctgttcttcttcggctgggatcgtctcagtaagaaacagcacctgatggtgacctggttcgttgcgctcggttccaacttctctgcactgtggatcctggtggcaaacggctggatgcagaacccgattgctgctgatttcaactttgaaaccatgcgtatggagatgctgagcttctccgaactggttctcaacccggttgcacaggttaaatttgtgcacacagtggctgccggctactgtaccggtgcgatcttcgtactgtctatcagtgcgtggtatctgatgaagggccgtgatctcgcatttgcaaaacgctcttttgcgattgcagcaagctttggtatcgccgctgtgttatccgttatcgtgctgggtgatgaatccggttatgaaatgggtgacgtacagaaaaccaaactcgccgcgattgaaggtgagtggcatacccagcctgcgcctgcatcatttaacgtgattgcgttccctaatcaggaaaaaatggaaaacagttttgcgattgagattccgtacctgatgggtcttatcaccacccgttcaattgatactccggttctcggcctgcgtgacctgatggtgcagcacgaagcccgtatccgtaacggtatggtggcgtatgatctgttacagcagctgcgtggcggtaataccgacccggcagtccgtgatgcctttaatcagagcaaaaaagaccttggttacggcttactgctgaaacgctataccgataacgtcggtcaggcaactgaagagcagattcaggcagcaaccaaagactccattccgcgtgtcgcaccgctgttctgggcattccgcctgatggtggctgccggtggtctgatgctgatcgttctgggtctgtcattcctgagtgtactgcgcaatcgtatcggcaagtccaaatggctgctgcgtgctgcattcctcagcctgccgttaccgtggattggtgttgaagcaggctggttcgttgctgaatatggccgtcagccatgggcagtcggtgaagtgttaccgacagcatatgcaacgtcacatctggcagccggagacattctgttctctatggcgctgatttgcggcctgtataccttattcctgattgctgaaatgttcctgatgttcaaatttgcacgtcttggtccaagcagcttaaaaaccggccgttatcatttcgaaacgtccccggcacaagacgctaagtaa

SEQ ID NO: 276552 - DNA, 1143 bp, Morganella morganii
atgtttgattatgaaatattacggtttgtatggtggatcctgattggcgtactgctgattggcttcactgtaactgatggctttgatatgggcgtgggtgttctgctgcgtgttatcggcagaaatgatactgaacgccgtatcatgattaacgcgattgcaccgcactgggacggtaaccaggtatggcttatcactgcgggtggtgcactgttcgcagcatggccgatggtctatgcggcagcattctccggtttctatatcgcaatgattctggtcctggcggcattattcttccgtccggtcggttttgactatcgttcaaaactggaatcaccaaaatggcgcggtatgtgggactggggtatctttatcggcagtttcgtaccgtcattagtgatcggtgtggcattcggtaacctgttacagggtgtaccggttgaagttaactcccagctgcaggtgtcttatgcagggagcttcttcggtctgctgaacccgtacggtctgttagccggtttaatcagcctgatgatgatcgtggcgcacggtgcaacttacctgcagatgcgtaccaccggtgatctgcatgtgcgtgtgcgtaaagccaccactatcactgctctgctgacatttgttctgttcgcagcggccggtgcatggctgatgtggggtggtatcgatggtttccgtgttgtctctgacatcgaccatttcggtgcgtctaacccggttaataaagaagtggtacaggaagcaggcgcatggatggcaaacttcaatgcctatccaatcctgtggatcctgcctgctattggtctggcatcacctctgctggtcgtgatgttcactgcaatggataaaggcgcgtgggcattcctgttcacctcgctgactattgccggtgtgatcctgacctgtggtacagcaatgttcccgttcattatgccttcaagcatcgacccgaacgtcagtctgaccatgtgggatgcaacctccagcctgtttactctccaggtgatgacggttgttgcgattatctttgtaccacttgttctcctgtacaccatctggtgttacgtgaagatggcagggcgtattgataagtccttcatcgaagagaacaaacatacattgtactaa

SEQ ID NO: 276553 - DNA, 285 bp, Morganella morganii
atgctggataagtcttaccaactactggataagggtcccttacgggcccttgtcctgataatggcgttggggctggcattgagtgtgatctgggatccgtcgcgttttgcggcaaacaccagttcattacagatctggcagggactgctgatgatctgggcggtatgcagcggcgcaattttcggtctggcattccggccgaagcgcgcaatctggaagattttgttccatccgcttccggcggtggtgattctgggttacggcctttatcattttttcagctga

SEQ ID NO: 276554 - DNA, 894 bp, Morganella morganii
atgctgacatctgttgagaagatcaatacctttatttatgttgtggataccggttcatttacccaggccgccgcacgcctgaatctgagcaaatcggtggtcagtctgcatatcaaagccctggaatctgagctcagcaccacattgctgcaccggaccacacggcagtttacgctgacagaatccggccaggcactgtatcagcaattcaaaccgctgttgcaacagttcgacagcgcgatggatgccgtcagaacggggacagcacaaccacaggggccgctgagtttcagtgccgccgcagaattcggcggccaatttctgctgccgcagctgcctgctttcaccgggcgttatccgctgatcagagcagattaccgcgtcgatcacagtctgagtgacttgattgccctgaaactggatgtggtgttccggctgggaacgctgagtgacagcggtctgcggttccgcaaactcgccgattttccggtctgttatgtggcaacgccggcgtttatccggcaacaccgcgtgacagaaagcagtgatcccgtcgctctgccctttatcgccaacagcaacctgaccgcccgtatcaaccggcgtcagtatctgcccgcgccggacaaccgggtgtttatctctaattcgattcaggcgatccgtaccatgacactggcacatcagggttacagtctgctgccggtctggtatatccgcgaacaactgacagaggagaaactggttccggtattcacccgtcagccggtgccggatcagagcatcaatatggtatttccgcccgctgcgcatctgccgcagaaggtccgggtgtttattgattattttgcccgcttttttgcagataatgccgcattgctgcgctatccgtga

SEQ ID NO: 276555 - DNA, 1374 bp, Morganella morganii
atgacttatcgttaccgtatcgccctgatttttttactgggcttttttattgattgtatcaatatctttatgtcggccatcacgctgcctgctattgcagaggcaatgcaggtgtcatccctgtcggtgacctgggtggcaaacagctatattctcggactgacactgattatcccgctcagtccccggctggcggcccgtttcgggatccgtgaactgatgacagcctcgatgctgctgtttgccgcagcagcagtactggcaggcagtgcggaatcctttacttcgctgattttctggcgtcttttacagggtgtggcaggcggattactgatcccggccgggcagtcactgacttttcagtattttcaggggcgtgagcggagcaaaatatccaccattattatgatgatcgcgctgatagcgcccgcgctttccccgatggccggagggatcattgttgacctcgccggatggcggcctgtcttttatgtcaatgcaccggtggcactttttacggcactgctggcctggtgctggatccgtgaaccgaaaaccgctgccggagaagcaccggatctcaaagggttgcttctggtcagcctgacgctggcatccctgctgattgccctctcattgtacggggaataccacaatatcaccggcgcactggcgctcggcggactgatgttgttcagtgcagggctttattaccgccattaccggcagacaccgcaggcaattattgatttatcgctgctgaaaaatacacggctgtggctctcggttgcagtgtattacgcggtaccgggcgtattcaccggggcgaacatcctcgctatcttttatctgaccacggttcccggcctgagtactgccgtcaccggtgcgtttatgttgttgtatgcggcgggggcgatggcagctatgctgatcagcggcgcggtgtataaccggaccggtgccgggcgtctgtttattatcagtctgctgctgcacagcggcggtatcgcgctgtttgccctgacagacagccacacaccgttatatttcatcggcctgatttatttgctgaccggcaccggcggcggcatcgccgcaaactgtgcacaaaccaccgcactatatgatttttacggaacacagctgaacaaagccagtgtgatctggaatatcaaccgccaggtggtgttcagtattggtgctgccgtcatgatgacgctgtatcagaccctgaatgccattgttccgggacaggcattcgccctgacatttctgggaggcgcactggccgggcttatcccgctgattttcctggtccgcccgcagttccgtacttcattaaaacccgcagaggagattatccgtgagtaa

SEQ ID NO: 276556 - DNA, 408 bp, Morganella morganii
gtgagtaataccatatttcagcaggcgtgtgacgaaatccatcatgttcatgacctgatttttaaaacatttactgtccccggggcagaagggcaggcggcactgtctgaattgctgacccatttcactcctgagttttccatgaccggtatcagcggggcagtgattgatctcgcggcggtgacggcgatgtttacccgtatacagggtcagagacagggagcaccgattgaaacggcggagtatcagtgtgtcagcctgacagaaaacaccatatccgtgcgctatcaggagacacagcattttgccgaaagcaccacagcacggcgctcgctggttattctccgccgggaggataacgggaagtggctgtggcattatttacatgaaacaccgctgtctgcctga

SEQ ID NO: 276557 - DNA, 159 bp, Morganella morganii
atgaaaaaatattttgttacgtattacaacaccttaggggcgttattttttgctctgaaagctatcattaaacacttattaaaagacatttttccccacgaatacacaaaaatccggaattatccggatttttgtgctaccgatttatttaccgcgtaa

SEQ ID NO: 276558 - DNA, 393 bp, Morganella morganii
atgttcagttggccaattcgggtttattacgaagataccgatgctggtggtgtagtataccacgggcagtatcttgcattttttgagcgcgccagaaccgaaatgttacgggaacggggctttcatcagcagcgtctgctggaagagcagctcggctttgtggtccgcaaattaactatcgattaccaccatccggcaaggttagacgatctgttagaggtacgcagtgagatcaccgacatccgtcgtgcgtctctgacatttacgcagacacttatgcataaaaacggaactcttttatgtcgcgcagaggtactggtcgcctgcgtgaatatttctttaatgaagccggtagcgcttcctgagtctattgtcgcggagtttaagcagtga

SEQ ID NO: 276559 - DNA, 687 bp, Morganella morganii
gtgactgacatgaatatctgggatttattcctgaaagcaagttacctcgtgcaatttatcatgctggtattgctgggcttttctgttgcctcgtgggccattattattcagcgcaccaaagtcctgaatgcggccacccgtgaagcagaagcgtttgaagacaaattctggtcaggaatcgaactgtcccgtctgtataaagaaagccaggcccgccgtgatgaactgagcggtactgagcagatcttctactccggctttaaagaatttgcccgcctgcatcaggcgaatgtgcactctccgcaggcggtggaaaccggtgcggcgcgtgcaatgcgcatctccatgaaccgtgagatggaaaatctggaaaaccacatcccgttccttggtactgtcggttctatcagcccgtatatcggtctgttcggtacagtatgggggatcatgcacgcctttatcgcactgggtgcggtaaaacaggcaacattacagatggtggcaccgggtattgcggaagcactgattgcaacagcaatcggtctgtttgcggcaattcctgcggttatggcatacaaccgtcttaatcagcgcgtgaacaaattagaacagaattacgacaacttcagcgaagagtttctggcgattttacatcgtcaggcctttgctactgctgataagaaataa

SEQ ID NO: 276560 - DNA, 426 bp, Morganella morganii
atggcacgtcatcgcggacgccggcgggagctgaaatccgaaattaacattgttcctttactggacgtgttactcgtgttgctgctgatcttcatggcaacagcgccgatcatcagtcagagtgtggaagtggatctgccggatgcctccgattcacaatccgtttccaccaatgataatccgccggtgattctggaagtctccggtgtcggccgctacaccctggtggtgaagcaggatcgcctggaactgttaccggaagagcagatcattgctgcggcaaaacagtatctggctgaagatccgaagactattttcctggtcggcggtgccaaagatgtgccttacgaagagattattaatggcctgaatattctgaaacaggccggagtgaaatctgtgggcctgatgacgaagccgatgtaa

SEQ ID NO: 276561 - DNA, 1086 bp, Morganella morganii
gtgggaaagctgaaagagcgtaaagataaattaaatcgttctgtcatcacctctgtggtgttgcatcttttgctgattgcgcttgtgatctggggatcgtttgtaaccaaatcagggctgaccggcggcggtgagggcggtcaggtgatcgacgccattatggttgatccgaacgccatggttgaaaattttaaccagcagcaacagcagcaggccaacgcaaaacaggctcaggcgcagcgcgagaaaaaagcgaagcagcaggaagaagaattacgtcagaaagaactgcgtgagcaggagcgcttaaaagcaattgaagaagagcgcctgaagaccgaacaacaagttgaagaccagaaaaaacaggctgaagagcagcaaaaacaagctcaggaagccgtgaagaaagccaaagaagagcaaaagctggcggaagaagccgctgccaaagctcaggctgaaaaagaaaaagtgattaaagagcaggcactggcgaagaaacaggctgacgaaaaagctgccgcacagaaagccgctgaagaagaaaaagccaaagccgaaaaagcggctcaggaaaaagcagccaaagccgaagccgctaaagcggaagcagccaaagcagaagccgccaaagctgaaaaagcagccaaagacaaagcagctaaagaaaaggcagccaaagccgcagcgaaaaaacaggccagtgaagtcgatgacctcctcggcggactggcgtccaacgctccgggcacagaaagcggcggtgcatccgcagccggtcagggcggtggcaagaagagcggaacaaattcggatggcgatatgaacggttatatcgcacaggtccggttagcgattcaggcgaagttctataatgcggatatgtaccgcggtaaaacctgtacgctggaaattaatatcactgataaaggtacgcttatcagtgtgaatgcggtcggtggtgatgacggtttatgtcaggccgcactcgcggcggccaaacaggctcgtattcctgcgccgccgagcaaatcggtctggcagcagtttaagaataccaaactggactttaagccggaataa

SEQ ID NO: 276562 - DNA, 1293 bp, Morganella morganii
atgaagcaggcagtgaaatacatgctcggttttctgatgctgtgggcggcagttgctcaggctgaagttcgtatcgagattactcagggtgttgattcagcacgtcctatcggcattgtacctttccaggtcgccggcggcggcgctgtaccggaagaagtcggcgcgatcattgctgctgacctgcgtaacagcgggaaatttaacccgatcgaccctaaccgtatgccgcagttaccgggtaccgcctctgaagtggttcctgagtcctggacggcgttaggcattgatgctgttgttgtcggccaggttcagccgggtgctgacggcaactatctggtgagctaccaactggtggatacctccggttccccgggcagcgtgcttgcacagaaccagtttaaagtcaccaaacagtggttgcgttatgcggcacatactgccagtgatgaagtatttgagaaattaaccggtattcgtggtgcattccgcacacggatcgcgtatgtggtggttaaaaacagcggtgactatcgtcacgagctgcgcgtgtctgattatgacggctacaaccagttcaccgttcaccgttcacctgagccgctgatgtcaccggcatggtcaccggatggcgagaaactggcgtatgttacctttgagagcggaagttcagccctggttattcagaatctgtccagcggacaggtgcgtcaggttgcttcattcccgcgtcacaacggtgcaccggcattttcaccggacggaaccaaactggcatttgcgttatcaaaaaccggtagtctgaatctgtatgtgatggatctcggctcaggccagatgcgtcaggtaacagatggtcgcagtaataacactgaaccttcatggttcccggacagccagacgttagcgttcacgtctgaccaggctggtcgtccgcagatctataaggttggtattaatggcggtgcgcctgagcgcctgacgtgggatgggactcagaaccagaatggtgacgtcagtgctgacggcagtttcctggtaatggtcagttcaggcggcgggaaacagcatatcgccaaacaagatctagtagcgaacaatttccagattttaacggatacgttcctagatgaaacgccaagtatcgcacctaacggcactatggttatttatagctcctcacaaggtatgggaactatattgcagctggtttcgaccgacgggcgtttcaaagcgcgtcttccggcgactgacggacaggtaaaattccctgcctggtcgccgtatctgtga

SEQ ID NO: 276563 - DNA, 495 bp, Morganella morganii
atgcaacttaacaaagtgcttaaagggctgatgttagctttacctgttctggctgttgctgcatgtagttctaacaaaaacgaccagactgatgcgggcactgtcgacaatggcgcaaacaccggtatgtctgcggaagaactggcacgccagcagctgcaggaacttcagaacaacaatatcgtatacttcggtttcgacaaatacgatatctctcctgaattccagcaaatgctggatgcacacgctgcattcctgcgcaacaacccttcttacaaagtaactgtagaaggtcatgctgacgaacgtggtactcctgagtacaacatcgcactgggcgagcgtcgtgctaacgcagcgaaaatgtacctgcagggtaaaggcgttaacggcgaacaaatctctatcgtttcttacggtaaagagaagccggcagttctgggtcacaccgaagctgactacgctaaaaaccgtcgtgctgtaatcgtatactaa

SEQ ID NO: 276564 - DNA, 780 bp, Morganella morganii
atgaaaagtaacttcagacgcctgatggtgagtctgtcgttattgataggtgtagcggccccctgggccgctattgctcaggcacccatcatcaatatcggctcaggctccactgatgaccgcctcacgcagctcgagcgtatttctaacgctcatggtcagctattaacccaacttcagcaacaagtcatggacaaccagcgcgatatcgacatgctgcgcgggcaaatccaggaaagtcagtaccagctgaatcagttgacagaacgccaacgcgaacttttctcacaggtggattccctcaccggtggcggcagtgcatcaacagataatacatccgcggcatccggtaatacggactctgcgggtactgccgcaacctcagctcctgctgctgcaagtaagggcaatgagaaagatgactataacgccgcggtaaacatggcgatgaacaccaaagattacgatggtgcaatcagcgcatttcagagttttatccaaagctatccgaaatccggttatcttcctaatgccaattactggttaggtcagatgaactacaacaaaggcaaaaaagatgacgctgcggcgtattttgcttctgtggtaaagaactggccgaaatcccagaaagcaggagagtccttctataaagtcgggctgatcatgcaggagaaaggggataaagcgaaagcgaaagcaatttatcagcaggttgtcgcaaaatatccgggctcttccggtgcgaaactggctgagaaaaaactggctggtttataa

SEQ ID NO: 276565 - DNA, 1158 bp, Morganella morganii
atgagcactcaccctgatttacaccagcttgccgcccggatcaagcaatggggacgcgaactcggctttcagcaggtcggtatctgcgatacagatctcagcgcggaagagccgaagctgcaggcgtggctggatgcaggctatcagggagaaatggactggatggcgcgccacggcatgatgcgcgcgcgccctcatgaactgctgccgggcacactgcgggtgatcagtgtgcggatgaactaccttcccgccaaagcgtcctttgctgccgtactgcaaaacccggagcagggttatatcagccgttatgcgctggggcgtgattaccacaagcttctgcgccagcgcctgaagcagctgggagagcggattcaggctgagtgtgatgagctggctctgggaaataccctcagctaccgcccgtttgttgactcagcaccggtactggaacgcccgctggcagccaaagcgggccttggttgggttggtaagcactcacttattttaaaccgtgaagccggttcctggtttttcctcggcgagctgctgatcaacctgccgctgccggttgatatcccggttgaagaacaatgcggccgctgtgtcgcctgcatgaccacctgcccgactcaggcgattgtcgcgccttatactgtcgatgcgcgccgctgtatctcctacctcaccattgagctggagggcgctatccccgaagaattccgcccgctgatgggaaaccgcatttacggctgtgatgactgccagcttatctgcccgtggaaccgtttttcacaactgacagacgaggcggatttctcaccgcgcaagcgtctgcacacgccggagctgctggatttatttgcctgggatgaagccaccttccttcgggtgacagagggctcggctatccggcgcatcgggtatctgcgctggctgagaaatatcagtgtcgctctcggcaacgcgccgtatgaagataaaattgttattgcactgacagaaaaaaccggactggctgactggcttgatgagcatatccgctgggcggttgcccgtcagtatgccaaaagagatgaatcacgtatcgaaatacagacttcacagcaaaaacgtcttatccgcgccatttccaaaggtttgccgcgcgacgcctga

SEQ ID NO: 276566 - DNA, 465 bp, Morganella morganii
atgaaagaacgtctgtttacgctggcagatgaagctgccactgtcgcgctcggccgtgcactggcacagcagagtcagcgcggatttgtcctgcatcttttcggcgatctgggggccggaaaaaccaccttcagccgcggctttcttcaggcactggggcatcccggccatgtgaaaagcccgacttacaccctggtcgagccctatgagctctcaccacgcccggtctatcactttgacctgtaccgcctggcagatccggaagaactggaatttatggggatccgcgattatttcggagaaaacaccgtctgtctggtcgaatggccgcaaaaaggggccggtttcctgccggatgcagatttggaattgcacttacggtatgatggtgaaggacgggaagcccgttttgccgcccgttccccttatggtgaagaactcctggataagttagcggagatgtga

SEQ ID NO: 276567 - DNA, 1308 bp, Morganella morganii
atgaatgcatatctgacacggaaatctgatgtggctgccgtttcatggctgacggcgctgtttttctgcgtgagcctgctgttcagtgcagccgggcacgccgcgtccctgacgggcatcaatgtgaacaacaacggttcgcagggcacattacagctcagttttgacggcaaaccgcaatataaactgtttccgctgcatgacccggagcgtctggtgatcgacatccgtcagccgcagaaaattaccggtctgccgattaatctgaataacgggctgattaaagtggtcagagagagccgcgcgccggatgctcagcatcagcgcatcgtgctggagctggctgataaaaacagtttccgcgattctgcggataacagcggtctgaccatcacgctgaccggcaaaaacagttatagcgcagccccggtggctgccgcacaaccggtcaccaccacaagcggcaaaccgctgcgcatgaacagcggcagtgctgccccggcggccgcggctccggcagcaaccactccggccgctgcaccggcacaggcgaaaatcccggtggtaccgacaggtaaactgccgaaaaacagccgtcaggtcgtggtggcgattgatgccggacacggcgggaaagacccgggcgctatcggccagaacggcctgaaagaaaaaaacgtcactatcagtatcgcccgcaagctggaaaaacgtctgaaagatgacccgatgttcaaaccggtactgacccgtgacggcgattattttatctcggtggccgggcgctctgaagtggcgcgtaaattcggctccaatatgctggtgtccatccatgcggattccgcaccaaaccgtaccgcgaccggttcgtcagtctgggtgctctccaaccggcgggcaaacaacgaattaggtaactggctggaacagagcgagaaacaatccgaattgctcggcggtgccggtgatgcactggcaaacggtgcggatccgtatctcagccaggcggtactggatttgcagttcggtaactcccagcgtgtcggttatgccgtggcgcaggacgtgatccgtcagctgcgccagataggcaaagtccacaaaggcacgccggagcacgcgagcctcggggtgctgcgttcgccggatattccgtccattctggtggaaaccggctttatcagtaacagcactgaagaacagctgttaggatctgacacttaccaggagcaggtcgctgccgcgatccacggcgggttacgcgcatactttaccgcgaacccgttacaggcagcgccgtccaaataa

SEQ ID NO: 276568 - DNA, 1899 bp, Morganella morganii
atggcgatccggattttaccgccgcagctggcaaaccagatagccgcaggcgaagtggttgagcgcccggcatcggtggtgaaagaactggtggaaaacagcctggacgccggtgccacccgtatcgatattgatattgagcgcggcggcgaaaagcttatccgtatccgtgacaacggctgcggtattgccaaagacgagctggcgctggcgctggcccgtcacgccaccagtaaaatcgccacactcgatgatctcgaagccatcatgagcatggggttccggggggaggcgctcgccagtatcagctccgtatcacgcctgacctttacctcccgcacccgcgaccagaacgaagcctggcaggcatatgccgaagggcgcgaaatggcggtgacgctgaaaccggcggcacatccggcgggcagtaccgtggaagtactggatctctttttcaatacacccgcgcggcgcaaattcctgcgcactgaaaaaacggaattcggtcatattgatgaagtggtgcggcgtatcgcgctgtcccgttttgatgtggccattaatctcacccacaacggtaaactgatgcgtcagtatcgcccggttaaagcggaagatcagcaggagcgccgtctcggggctatctgtggtactgcgtttatgcagcaggctctggcagtgacctggtctcacgaagagctggagatccgcggttgggtggcctcaccggcagattacaacggcccggcggatttacagtattgctatgttaacggacggatgatgcgcgaccgcctgatcaaccacgctatccgccaggcctatgaagaccgcctgagcggcgatcagcagcctgcctatgtcctttacctgactattgacccgcgtcaggtggatgtgaatgtccatccggccaagcacgaagtgcgttttcatcaggcgcggctggtgcatgactttatttatcaggcggtgctcagtgtgctgaaacagcatgagcagccggtctctctgtttcaacctgatccgtctgcaccacagacacagcatgtgccggaaaaccgtgcggcagccggtaaaaatatctttgagcgtgaggaagtactcacaccgccgccccgccgggaaaccaccgggggcggcgcgtctcacagcggccacaacagcggaaaaccggcatattctgcggataaacccgtttacagcccgaaagaagccggaatatatcagtcactgatacagacaccggcagaaacccggccgcagctgttcccggaaaaaagcacttttctgtcagaaaaccggatcagcgccgcaagtgagccggtgacggaaaaaagtgagcgtgtaagttttggtaaaatccttacgctttatccgccgtgttatgcgttaattgagacagatgcaggtattgcgctgttttccctcagcaaagcatcacattatctgcgttgtcagcaactgatcccgggagagcagggactgaaatcccagccgctgatgatcccgcttcagatggcattaaacgcacaggagtgtgagacatttacgcagtttgccgggttattgcgtactttcggtatagaaggctcagtttcccgtggaaaagcgacgattcgtacggtatcgttaccgcttcgtcagcaaaatttaccgcatcttatccctgaattactgcgtttcctggctgataacccggaggcggatgagaaagccattgcgtcgcggctggcagagatgctggtcagtgaaccggcgactcagagcaaagcccaggcagtgcagctgctggccgatgtggagcggctgtgcccgcaactggtgcgcaggccgccggcagatttattgcaattaattgatttaactgaggtcgttgcagcattacgtcatgagtga

SEQ ID NO: 276569 - DNA, 939 bp, Morganella morganii
atgagtgaacagaatcatcataaacccgcagccctgtttctgatggggccgacggcttcaggaaaaaccgcgctggcgattgaactgcgtcagcacctgccggtggaaatcatcagtgtggattccgcactgatttataaggggatggatatcgggaccgcaaaacccgatgctgccgaactggcactcgccccgcaccggctgattgatattctcgacccgtcagtggcctattccgccgccgatttccgccgtgatgcgctggcggcaatgcatgagataaccgcgcagggaaaaattccgctgctggtcggcggaaccatgatgtatttcaaagcgttgctggaaggattatcgccgctgccgtccgctgacccggaaatccgggcacagattgaggcgcgggcggcacaggaaggctggcaggttcttcatgatgaactgagccggattgacccggtcgccggggcgcggatccacccgaatgatccgcagcggctcagccgggcactggaggtatactatatctccgagaaaacaatgacagaactgacggaaacggccggggaaaatttgccctttaatgcttatcagtttgccattgcaccggcagatcgtaaaatattgcatcagcgaattgaaatgcgttttcagatgatgctgaaggccggttttgaggacgaagtccgtgcgctgtatcagcgcggggatcttcatccggatttgccgtcgatccgttgtgtcggctaccgccagatgtggtcatatctggccggagaaatcagttatgatgacatggtgtatcggggcatttgcgccacccgtcagcttgccaagcggcagatgacgtggttgcggggttgggaaggtgttcagtggctcgacagtgaacagcctgaacaatctcttaaagccgttatgcaggttcttcgtgcatag

SEQ ID NO: 276570 - DNA, 306 bp, Morganella morganii
atggctaaggggcaatctttgcaagatccgttcctgaacgcattacgtcgcgaaagggttccggtttctatttatctggtcaacggtattaaattacagggtcagatcgaatcattcgaccagtttgttattctgctgaaaaacacggtcagccaaatggtttacaaacacgcgatctctaccgtcgtaccttcccgtccggtttctcaccacagcggtggcgcaaacccggggaccggcggcagcaattaccaccagtcagccggtaacggtggtgcgcaacaggatactgatggcgctgaataa

SEQ ID NO: 276571 - DNA, 1281 bp, Morganella morganii
ttgtttgacaggtatgaaggcggtgaacgggccgtactggcccatatatttttctcacaggataagaacactgatgatctcagtgaatttgaatcccttgtgacatccgcgggtgtgacaccagttcagatagtcaccggcagccgcagcgccccgcacccgaaatattttgcgggtgaaggtaaagcggaagagattgccgatgctgttatcgacagtgaagccgatgtggtgctctttaaccatgccttaagtccggcgcaggaacgcaacctcgagcgtttgtgccagtgcagggtggttgacagaaccggggttatcctcgatatcttcgcccagcgggcacggacacatgaaggtaaattacaggtggaactggcgcagttacgccatctttccacgcgtctggtccgcggctggacgcaccttgaacgtcagaaaggcgggattggtctgcgggggccgggtgagactcagcttgagtccgaccgccggatgctgcgggataaaatcaaacagatttcagggcgtctcgaaaaagtggaacgccagcgcggacaaggccgtcaggcgcgcagtaaagcggatattccgacggtgtctctggtcggttacaccaacgccgggaaatccagtctgtttaatcacataactgatgcgaaagtctatgctgcggatcagttatttgcgacactcgatccgaccctgcggcggattgatgtcggtgatgtcggtacggtggtgctggcggatacggtcgggtttatccgccatctgccgcatgacctggtggcggcatttaaagccacgctgcaggaaacccgcgaagcgacactgctgcttcatgtggtcgatgcggcggataaccgggtggatgaaaatattcatgcagttaatgcagtgctggaagagattgatgcacatgaaattccggttctgatagtgatgaataaaatcgatatgctggacgatttcgaaccgcgtatcgacagaaatgaggataacctgccggtcagggtctggctttcagcacagaccggagcagggatcccgttgttgttccgggcgctgacggaacgcctttccggtgagatcgcacacctggaattgtgtctgcctccgtcggagggtcgtctgcgcagccgtttttatcagcttcaggcgattgaacgcgagtggcttgatgacgacggccggatttgccttgaaatcaggctgcccattgttgactggcgccgcctctgcaagcaggaacaacagttagccgattacgttatctga

SEQ ID NO: 276572 - DNA, 1278 bp, Morganella morganii
atggcgtggaatcagcccggtaataacggacaggaccgcgacccgtgggggagcagcaataaaggcggcaactccgacggtaacaaaggcggccggaaccgtggggcatctgatctcgacgatctgttccggaaaatgagcagaaaactcggtggtctgggtggcggtaaaggcggaaacaataacgggcagtccggcgggaacaatcgtcctccggtacagttcgcgggcggacgtattatcagtctcgctattgccgccgttgttgttgtctgggccgcaaccggcttctatacgattaaagaaacggagcgcggcgtggttacgcgtttcggtaaattcagtcatgtggttcagccgggtctgaactggagaccgacctttattgatcgcgttacggcggtcgatgtggcgacggtccaggatctggccaccaacggcatgatgctgaccgctgacgagaacgtggtccgcgttaacatgaacgtgcagttccaggtagtgaacccggaagattacctcttcagcgtcaccaacccgaacaacagtctgcgtcaggcgatggacagcgcggtgcgcggggttatcggtaagttcaccatggagaaaatcctgacggcgaaccgtaccgtggtccgtaacgaaacccagaaagtcctcgaagagacaatcaaaccttataaaatgggaatagcgattgtcgacgtcaacttccaggaagcgcgtccgccggctgaagttcaggcttcattcgatgacgtgattgccgcgcgtgaaaacgaacagcaatccatccgtgaagcggaagcttactcgaacgaagttctgccgctggcaaaaggtaatgcgcaaagtatgatcgaaagcgcacaggcgtataaagccagtatcgtgctgaaagcgcgcggtgaagtggcaagcttctcgaaaatgctgccggaataccgtgcggcaccggatatcacccgtgaacgtctgtacatagagacaatggaacgtgtgctgagcaatacccgtaaagtgattgccaatgataaaagcaacagcatgatggtgctgccgctggatcagattatgcgtgagcagagagccgcctctcaggctgcaccggcgaaagctgctgccacaccatcatccgcaccggcaacacaggcaccggcaggccgtcaggcacaaaacagcagccagaatccgaatgtacccgctgaatacaacaacacgtatgatctcagcagttcgggtatccgtggcaacactgaacgcacagggagacaataa

SEQ ID NO: 276573 - DNA, 1014 bp, Morganella morganii
atgcgtaagtatttagccgttattgttattctggttttaggcgttctgtatgcgtctgtctttaccgttcagcagaccgagcgcggtattgtgctgcgctttggcaaagttctgcgtgatgcggataacaaaccgattgtgtatgagccgggtctgcatctgaaagtgccgtttattgaaacagtgaaaatgctgcctgcccgtatccagacactggatatccaggctgaccgtttcctgacaaacgaaaacaaagacctgatcgtcgattcctaccttaaatggcggattagtgatttcagcctgtattatctcgcaacaaacagcggtaatattaatcaggctgaaaacctgctgaagcgtaaattcagtgaccgtctgcgttctgagttcggtcgtctgagcgtgaaagagattgtgacggattcccgcggtacattaacgacggaagtcaaaaatgcactgaacgaagggagctccggtaacgatccgcaggcaactgatgctgataacgctattgccgatgcggcagcgcgtgttcaggaagaaaccaaaggcgcacagccgcaggtgaatccgaacagtatggcggcgttaggtatcgaagtggtggacgtccgtatcaagcagatcaacctgccggcggaagtctccgaagctatcttccagcgtatgcgtgcagaacgtgaagcagtggcgcgtcgtcaccgctcacagggtctggaagaagccatgaagattcgtgcggtggcagataaaacccgtactgaaatcctggccgaagcggagcgccagtcactctccctgcgtggtgcgggtgatgcggaagccgctaaactgtttgcggatgcattcagtcaggatccggatttctatgcgtttatccgaagcctgcgtgcttatgagcaaagcttcaaacccgatggcaacgacattatggtgttaagcccggatacggatttcttccgttacatgaaggcaccgacatcattgcgtccggcttcaggccagtaa

SEQ ID NO: 276574 - DNA, 1299 bp, Morganella morganii
atgggtaagaacgttgtcgtattgggcacccaatggggtgacgagggcaagggcaaaatcgtcgacttgctgactgaacgggctaagtatgttgttcgttatcaaggtggccacaacgcgggtcacactctggttatcaacggtgagaaaaccgtcctgcatttaattccgtcaggtattctccgcgaaaacgtcgtcagcatcattgctaacggtgttgtactcgcacccgatgcactgctgaaagaaatgactgcactggaagagcgtggtgttccggtgcgcgaacgtctgctgatttctgaagcatgtccgctgatcctcccttatcatgttgcgctggataatgcccgtgagaaagcacgcggcgcgaaagctatcggcacaacagggcgcggtatcgggcctgcatacgaagataaagttgcccgtcgcggtctgcgcgtgggtgatctcttcgataaagagaccttcgctcagaaactgaaagaaatccttgagtatcacaacttccagttagtgaactactacaaagagcctgcggttgactatcagaaaaccctggacgaaatcatggcagttgcggatatcctgaccggtatggttgtggatgtctctgatctgctgtacaaagccaccgttaacggtgagctggtgatgtttgaaggcgcgcagggtacactgctggatatcgaccacggtacctatccgtatgtgacttcctcaaacaccactgccggcggtgttgccaccggttccggtttaggtccgcgttatgtggattatgtcctgggtatcatcaaagcttactccacccgtgtgggtgccggtccgttcccgaccgaactgtttgatgaaaccggtgaatacctgcgtaccaaaggccaggagttcggtgcgaccaccggacgcagccgccgttgcggctggctggacatcattgctatccgccgcgctgtgcagatcaattccctgtcagggttctgcatgaccaagctggatgtgctggatggtctgaaagaagtgaaagtgtgtgtcggttaccgtttaccgaatggtgaaatcatcgaaaccacaccactggctgcggataactgggaaggcattgagcctatttatgaagtcatgccgggctggactgaaaccacattcggggcgaagagccgcgaagaactgcctcaggcagcactggattacatccgccgcattgaagaactgacaggcgttcctgttgatattatttcaaccggtccggatcgttctgaaacgatgatcctgcgcgacccgttcgacgcataa

SEQ ID NO: 276575 - DNA, 381 bp, Morganella morganii
atggcgtcacttcctgatggtaaaatgaccagtattacggaagtgacggacgtttacggcgtatcacgtaaccatatggtcaagataattaaccaattgagccatttgggttatgtcgaggcgattcgcggcaaaaatggcgggatccgcctgggaaaacctgctaatactataggtatcggtgaggttgtccgcgcgctcgagccgttaacactggtgaactgcagcggtgaattctgtcacattactccggcatgcaggctgaaatcggtactgaataaagccatacgggagttcttacaggaactggataaacacacgctcgctgatatggtgcaggacaatcagcatctttataaattgttactgacggacgaataa

SEQ ID NO: 276576 - DNA, 2439 bp, Morganella morganii
atgtcagtggaaaaacaatcaaacgacccttatcgtgagcgcgaagcggaaaaatatgattccccgatcgcgagccgtgaatttattcttgaaactgtccgccgccacaccaaaccggtgagccgcgaagatatcgcacaggaactggggatcaccggtgaagaggctcaggaagccctgcgccgccgtctgcgcgctatggagcgtgacgggcaactggtctttacccgccgtcagtgttacgcactgccggagcgtcttgatttaattaaaggaaccgtgatcggccatcgtgatggcttcgggttcctgcgtgtcgaaggacaaaaagacgatctctacatcccgcaggatcagatgaaattatgcatccacggggatgtgatcctggcccaggtgatgggggctgatcgcaaaggccgccgcgaagcgcgcgttgtacgtgtgaccgagccgaaaaccggccagattgtcggccgttactttaccgaagaaggcatgggatttgtcgtgccggatgacagccgtttgtgcttcgatattctgatcccgaaagagtcaattaacggcgcacggatggggaatatcgtggtggcggaactgacccgccgtccgggcaaacgggtgcaggcgctcggcgttatcaccgaagtgctgggcgagaaaatgggtaccagcattgcggtggatattgccctgcgcaaacatgaaattccgttcacctggcctgctcaggtggaacgtcaggtcgcggatatccgcgaggaagtaccggaatccgccaaaaaaggccgtgttgatttacgcgatctgccgctggtcactatcgacggcgaagatgcccgtgactttgatgacgcggtacactgtgaagccaaacgcggcggtggctggcgtctgtgggtggcgattgctgacgtcagttattatgtgcgtccgcagacggcactggatgatgaagcccgcagccggggaacctcggtttacttcccgtcacaggttgtgccgatgctgccggaagtgctgtcgaatggtgtctgttcactgaacccgcaggttgatcgcctgtgtatggtgtgtgaaatgaccatttcggcgaaaggtaagctttccggttaccgtttctatgaagcggtaatgagctcccacgcccgtctgacctataccaaagtgtggaaaatcctcgaaggggatgaagagctgcgtgaacactatgcgccgctggtaaaacacctggaagaactgcacaaactctataaagcgctggcggaagcccgtgatgagcgcggtgcgattgcctttgaatccgaagaagcgaaatttattttcaatgcggaaaaacgcattgagcgcatcgaaccggtactgcgcaacgatgcacacaaactgatcgaagaatgcatgatcatggcgaacgttgcggcggcacgctttgttgagaaaaacaacgaaccggcactgtaccgtgtgcatgatcgtccgaaagaggacagcgtcatcaatctgcgcaccgtctttaatgagctgggtctgaccctgccgggcggcctgacaccggaaccgaaagattacgcccgtgtcatgctggaagtggcggagcgtcctgaccacgagctgttacagaccatgctgctgcgctcgatgaaacaggcaatttatgatccggacaaccgtggtcacttcggcctggcgttaccggcgtatgcccactttacttcaccaatccgccgttatccggatctgagtctgcaccgtgcgattaagtacctgctggcaaaagagcgcggcgaagcgaaatcgcagaccggtgcgtggcattacgatatgcagagcatgcttcagctcggtgaacatacttccatgacggagcgccgtgccgatgaagccacccgtgacgtggcagactggctgaagtgcgactttatgcaggatcaggtggggaatgtctttaccgggcttatcaccagcgtgaccggcttcggtttctttgtccgtctgaacgacctgtttatcgatggtctggtacacgtatcaacacttgataacgattactaccgctacgataatgtcggccagcgtctgattggtgaatcctcctccaatgtgtaccgcctgggtgatgaagttgaaatccgggtggaagcggtgcatatggatgagcgcaccattgatttcgcgctgatttccaccacccgccgtgcccgtaatgaaggcaaaaccgcaagaacccgggccaaagccggggagaaaggggataaacgccgggacggtaagaagggggatccccgccgtgacaaaaacttcgagccggacagtgcgttccgtaagaagaaaaaagacgacggcccgaaagccccgaaaggtaaaaaatcagcccggaccaaaaaaatcgaggcaaatataaaggcgaaacgcgcgaagaaaaaagccgaaaagtaa

SEQ ID NO: 276577 - DNA, 735 bp, Morganella morganii
atgagtgaaattatttatggtatccacgccgtggatgccctgctggcgcgtgatcccagccgttttcttgaagtctttatcttaaaagggcgtgaagaccgccgcctgaccccggttgtgcatgctctggaagcggcaggtgtccgtgtgcagatggccagccgtcagtggatggacagccagaccgaaggtgccgtccatcaggggattatcgccaaagtcagaggcggccgtcagtatcaggagcaggatctgcctgatctgctggctgagcatgagactccgttcctgctggttctcgacggcgtgactgacccgcacaacctgggagcctgtctgcgtaccgccgatgccgccggtgtacatgcggtgatcatcccgaaagaccgttccgcgcaactgaatgccacggcgaaaaaagtcgcctgtggtgcggcggaaagcgtaccgcttatccgtgtcaccaacctggcccgcacactgcgccagctgaaagacgaaaatatctgggttgtcggcactgccggtgaagccacccatgatctgtatcagagtaaaatgaccggcccggtggcgctggtgatgggtgcggaaggggaaggcatgcgccgtctgacccgtgacctgtgcgatgaactgatcagcattccgatggccgggtcagtctcttccctgaacgtctcggtggcaacgggtgtctgcctgtttgaggccgtgcgtcagcgcgcaaaataa

SEQ ID NO: 276578 - DNA, 390 bp, Morganella morganii
atgcgtcattacgaaatcgtcttcatggttcatccggaccagagcgaacaagtaccggcaatgatcgagcgttataaaactgctattactaacgcagaaggtcagatccaccgtctcgaagactggggtcgtcgccaactggcttacccaatcaacaaactgcacaaagcgcactacgttctgctgaacgttgaagctccgcaggaagtgattgacgagctggaaactattttccgcttcaatgatgccgttatccgcagcatggttatgcgcgttaagcacgcggtgactgaaccttctccaatggttaaagcgaaagacgaacgtcgcccgcgcgacatgtctgacgacattgaagaaaatgatgaagctgaggaaactgaagagtaa

SEQ ID NO: 276579 - DNA, 228 bp, Morganella morganii
atggcacgttatttccgtcgtcgtaaattctgccgtttcaccgcagaaggcgttcaagagattgattataaagacatcgctacgctgaaaaactacatcactgaaagtggtaaaatcgtaccaagccgtatcaccggtaccagtgcgaaatatcagcgtcagctcgctcgtgctatcaagcgtgcacgctacctgtctttactgccttacactgatcgtcatcagtaa

SEQ ID NO: 276580 - DNA, 450 bp, Morganella morganii
atgcaagttattctgcttgataaagtagcaaacctgggcagcctgggcgaccaggtaaatgttaaatctggttatgcacgtaactacttagtaccgcaaggtaaagcagttcctgcaaccaagaaaaacatcgaattcttcgaagcacgccgcgcagaactggaagctaaattagctgacgttctggcagcagcacacgctcgtgcagaaaaaatcaatgccctgggcgttgtgactctgtcttccaaagcgggtgacgaaggtaaactgttcggttctgtcggtacccgtgacatcgctgatgctgtaactgcagcaggcgttgaagtggcgaaaagcgaagttcgtctgccaaacggcgttctgcgtactctgggtgatcacgaagttcacttccaggttcacagcgacgtgtttgcagaactgaatgtgaagattgttgctgagtaa

SEQ ID NO: 276581 - DNA, 588 bp, Morganella morganii
atgagactactgccaaagcgccatctttacgctatcgccgccattgcgctgattatcatgctgatcctgtttttctggcctgccgcgcagaaaccgccggtgaccgttccgcctcagaatatcacactgacgccaccggcagatccgttaggtgacctgatagctgaacagaccggcacactaccggaggcaccatccgatatcccggatttgccgctgccggataatctgccgcctggtgcactgaataccgaaccggctccgcaaccggcgaccacaccaccgccggttagtgcagagtctgctcctgctgcggtgcctgcacaggcagatgcactgcgtttcaccctcaaaaagggccagaccatcgcccaggtctttcgcagcaacgggttaccggtggatgacttatttcgcatgacagccgttgaggggccgcagaagccgcttaatcaggtggaggcaggggataaaatcagtgtgaccaaaggaaagggaaatacggtctcagtgctgagaattgataaggctaacgggcagtccgccacctttaagcgacagaaagacggcagctaccgccgctcttaa

SEQ ID NO: 276582 - DNA, 621 bp, Morganella morganii
atgacacaaccgacttttgacacgatggaagcacaggcaagctacggaatcggcttacaaatcggccagcaattacaggaatccggactgagcggattagtaccggaagctattctggccggtatcaccgacgcactggaaaataaccagccggctgtggcggtggatgttctgcatcgtgccctgcgtgaaatgcatgagcgtgctgatgctgtccgcaatgaaaaacaggctgagctggtcaaagacggcatgcgtttcctggaagaaaacgcgaagaaagaaggcgtttccaccactgaaagcggcctgcagttctctgtcattaatcagggtgacggtgctatcccggcccgtactgaccgtgtccgtgttcactacaccggccgcctgattgacggtaccgtgtttgacagctctgtacagcgcggccagccggcagaattcccggtaaacggtgtgatcgcaggctggattgaagcactgaccctgatgccggtcggctccaaatgggaactgtatatcccgagcaacctggcttacggcgagcgcggtgccggtgcggcaatcccgccgtacagcacactggtattcgaagtggagctgctggagatcctgtaa

SEQ ID NO: 276583 - DNA, 741 bp, Morganella morganii
atgctcaatcaaatttgtctgctggcccggcgggcgggcgatgcaatcatggatatctaccatcatcccgacacactgaccatctccgccaaagcggataactcccccttaaccgctgcggatttagccgcacaccacatcatcgtgcaggaactgaaagccctgacaccggacattccggtgctgtcagaggaagatccgcagccgtggtctgagcggcagcactggacacaatactggctggtggatccgctcgacggcaccaaagaatttatcagccgcaacggtgaatttacggttaatatcgccctgatttctgacggcgtaccggtgatgggcgtggtgtatgccccggtaccggacgtgctctatctggcagaaggcaaacatgcctggcgtgaacggggcgggcagcggatggcgatcaaagtggtgaatacagatctgccgatggtagtaatcagccgttcacatcaggatgcggaactggcggattatctggagcagctgggaccgcatgaaacccgcgccatcggctcatccctcaaattctgcctggtggcggaaggtaaagcgcagctctatccccgttttaacccgacccacatctgggacacggcagccggacacgctgttgcactcgcggcgggagcgcatatcacggactggagcggaaaaacgctcgactatacaccgcgtgaatcgctgataaacccggggttccgcgtcagcagtttctga

SEQ ID NO: 276584 - DNA, 207 bp, Morganella morganii
atgaaaattttcgcccgttacaacccggctcagatcgcccgctacgtgaaaactttattccgtggccgcctgtatatacaggggatgggcgcgtttgaatttgattacggcaagattttaccgccgaaaatcagagacaaacgccacctgagtgcaatgagtgaaattaatcagcaggtatcgttgctgcaggcgcagctggcgtaa

SEQ ID NO: 276585 - DNA, 1380 bp, Morganella morganii
atgttaaatagtttattaatcgtcctgttactctgcgcgatcagcgcattcttttcgttatctgaaatatcgctggccgcctcgcggcgtatcaaactcaaagtcatgattgacgaaggcaataccaatgccgcccatgtgctccgtttacaggaagcaccgggaatgttcttcaccgtggtgcaaatcggcctgaacgccgtggcgatcctcgccggtattgtcggtgaatccgccttttcaccggcgctgcgcaccctgttcggcaattttatggccgatgccgccgcacagcagctcggctccgtattgtcatttattatcgtgacctccatgtttatcctgctggcggatctgaccccgaaacgtctcgggatgatcaaaccggaagcggtcgccatccggattgtccagccgatgcgtttttgcctgacagtactgcgcccgctggcctggctgtttaacgggttatccaacctgttctttaaattattcaaaatcccgctggcacgaaatgaagatatcacctcagatgatatttacgcggtggtggaagcaggtgcggtcgccggagtactgcgcaagcaggagcacgaactgatcgaaaacgtgtttgagctggaatcccgtactgtgccgtctgctatgacctcccgtgagagcgtggtctatttcgacaagcaggaaaacgaagagagcatcaaagagaagatctccacacagccgcactcaaaattcctggtgtgcgacggcggtctggatcatgtgctcggttatgtcgattccaaagatctgctcaaccgcgtgctgaacggccagagcctgaatctgcatgaaggtgtgcaaatccgcccggcactgatgatcccggataccctgagcctgtcagacaccctggagagctttaaaaatgccggggaagacttcgcaatcattctgaatgaatacgccatggtgatgggtgttatcactatcaatgacgtgatgattaccctgatgggagatctggtcggtcaggggcaggaagagcagattgtcgcccgtgatgaaaattcctggctgattgaaggcggtacaccgattgaggatgtgcagcgggtgctggatattgatgagttcccggatgacagcaactacgaaaccatcgccgggttcctgatgtataagctgcgccgtattccgaaacggaccgattccgtgaaattctcaggctttaagtttgaagtggtggatatcgacaactacaagattgaccagctgctggttacacggatcccggatgccccggttgtcccggttgtcccgcgtccgtcagcggcggaaagcggcaaagagggtcagtctgacgtggcacacaacgaacagcaccagaaaccgtaa

SEQ ID NO: 276586 - DNA, 666 bp, Morganella morganii
atgacacaaaacaccactcaatacccgcaggacactattgtatctcctgtttccgccgctgatgcactgccggacagcgccgtggcgctgaccatcagcccgcgccataccgtaaccggccatgatgtgaaccatgtgcctgacggctttgataccgcgtattttgccatgggatgcttctggggcgtggagcgcctgttctggcagcagccgggcgtgtacagcaccaccgccggttacaccggtggtacgacaaaaaacccgacctatgaaggcgtctgcaccggcaacaccggtcatgctgaagccgtccgcattgtgtatgacccgtccgttatcagctatgccgatctgctgcgtctgttctgggaaaaccatgatccggcacagggcatgaaacagggcggcgatatcggctcacagtaccgttctgctatctatacccagtctgacagccagcgcgtgcaggcacttgcctcccgtgagcagtatcagcaggcgatgaatgagaacaatgacagccgcagtatcaccacggctatccgcccgctcggcccgttttatgtggcggaggattaccaccagcaatacctggataagaacccggaaggctactgcggactcggcgggatcggtgtttgtctgccgccttcgctgagaaactag

SEQ ID NO: 276587 - DNA, 1743 bp, Morganella morganii
gtgatccggtaccctcttgtttgtgttgtcgctgtgtctctcacatcccctctggcatatagtgcaaatcttcgcttaaaagtggaagggctcagcgggcaacttgaaaaaaatgcaagagtccagctttccactatcacgaccgatgaggtcgtggctgacggccgttttcgtgcccgggtggaaaaagccatcaaagaggggcttcgtccgctggggtattatgagccggtgatcacctttgattatcaggacaacgcgccgcctgcgcgtcctgtgctgtatgcccgtgtcgttccgggggagccggttaaaattgccggggttaccgtggatatcgaaggtgcggcaaaaaccgatcccgcattcaaaaaattcattaccaaaaatacacctgaaaccgggactgtcgtcaatcacggcgagtacgaaagttttaaaagcggattatccgggcttgccttaaaacgcggctattttgatgccgaaatggaaaaaagccagctcggcattgcgctttcccgtcatgcggcctactgggattttgtgttcaacagcggcaaacgataccgtttcgggaaagtgaattaccagggctcgcaaatcagcgatgcgtatctggaaggtttggtgccgtttaaagaaggcgattactacacctctgatcaactggcagaatttaaccgtctgctggcggaaaccggctggttccagtccgcgatcgtcaccccggatattgcaaaggcccgggcggataacagtgattatctgaccatggatgcctcattcaccccgcgcgcgcaaaactttgtcgagctgggcggcggctttgccaccgatgtggggccgcgtgttcaggcgaaatggaataagccgtgggtgaattccagcggccacagcctgacctccagtatcagcctgtccgcgccggaacagattattgatacctcttaccgcatcccgctgaaggtcaacccgattgagcagtattacgccgtctccggcgggtataagcgtaccgacctgaatgataccaaagccgataccgcgacagtcagtgtttcccgtaactgggatttatccaccggctggcagtacggtatcaatatgcgctggagtctcagccactttacccaggcggatatcaccaacaccaccatgctgctctatccgggggtgaatgtcagccgtgtccgttcgcggggcgggatgatgccgtcctggggggacagtcagcgctactcagtggatgtttccaatgaaatgtggggctcggatgtggatttttccattttccgcgcccgtaacgtctgggtgagaacgccgtgggatggtcaccgctttgtgatgcgcggcaacctcggctggattgaaaccaataatttcgacaaggttccgccggatctgcgtttcttcgccggtggcgatggcagtatccggggttaccgttacaacaaaatctcaccggaagattctgacggcaaactgaccgggggctcgcggctggtggtcggctcgctggaataccagtacaacgtaaccggaaactggtggggcgcggtgtttgtggacagcggtgaagtggtgaacgatatcaaacggagtaatttcaaaaccggtgccggtgtcggggtgcgctgggcatcgccggtcggaccgatcaaatttgaccttgccgcgccggtcggtgatgaccagacgaaaaatatccagttttatatcggattgggggcagaactctga

SEQ ID NO: 276588 - DNA, 3771 bp, Morganella morganii
atgaaatggctgaagtatctgaaatggccggcaatcattctgctggtcctcattctgctgattggcggcacactcggctggatcctgggcacacagtccggcctgcattttgcactgaatcttgcaccgcgtgtggtttccggcctggctatcggtcaggttgagggcgatctgcgtaatctgaccctgaagcaggtgaaatacaccatgccgggtattgatgtcagcgtggataaggtgaatctggcgctgcgcctgggctgcctgaaagacatgacactctgtattgaaaatctcagcacggacggcactcgggttgctgtcgatacagcaaaactgccgccgtcagaagaaactccgccgtcagagccgctgacagagctgaatgcaccgctgaccattttcctggattctctctccgtgaccaacgctcaggtcaccgtggatgatatggcggtaaatctggataccttccgcactgccatgacctggcagggtgaccagctgaccctgaaaccaacggtgattaatgcgctttctgttgtgctgccgaaaagtgacccggctgcggcagaagaaccggcgccggcagcggatgcaccggaaaagccgttaggtgaaaccatcagtgagatttttgctcagccgatgctggcagaattgccggaggttattctgccgctgaatatctcagtggaaggtatttccggtgaaaactggcaggtgagcggtgatgcaccggtaaccattaattccctgcatctggcactgtttaacaaagggcaggtgctgactctcagtgatctgtctgcggatgcgccacagggcaatatcgcggtcagcggggaagtggcgcttagtgaaaaatggccggtggcgttgtcggtgaaaggccatgtccgtgattttgaggaattcagcgggcaggatctcgatctcaccctgaacggcgggctgctcgatgagctgaaactggcgctggcactgaaagggccggtcaatgccacgctggatgcacagactaacctgacacaggccgatctgccgctgctgctgaccctggagagtcagaaagtcagctggccgctgaccggtgaggctgattatcagcttgatggcgtgaagctgcgccttaacggaaaagtgagcggttacgacctctctctgcgttcggatatcaaaggaaaggacatcccgcctgcgctgctgacgctggatgcgaaagggaataccgaacagctgaatcttacccggctgcgtctgaatgcgttacagggctttgcggaagtgaccggggtggcggactggcagaaagccatcagctggcaggcggttctgacgctttccgggctgaataccgcaaaagcctatccggagtggccggccaaagtggacggcaaaatcagtacccggggcagcctgtacggcggtaactgggagcttgaaatcccggatatcaccctcgatggcaaagtgaaaacctatccgctgaaagcgcgcggtaatgtgaaaggtaacgcaggcggtcagtggacgatcccggagctgaaactggcgctgggtaacaataaactggatgtgcggggcgagctggcggatgcctggaagctggatgcggatatcaatgctccggcgctcggcggtctggttccggggctggcgggtacgatcaaagggaagctcaatgttcgcggcaatatggaaaaaccacagattctcgccgatctggctgttaacagcctgaaatggcagaacgacctgtcggtggcggatgcgaaaatcaaaggggatatcacctctgcagagcagatcaaaggccagctggatgtaacagtgaatcagctgaaacaggctgatctggtgatcagcaatctgaccctgaatgccaaaggtacagaagcacagcaccagctgaaactggtcatgaaaggcgagccggtctcggcacagctgatgctgaacggcgggtttgaccgtaaaaccgaaacctggaaaggtacgctgaataacacccgctttgacacaccggtgggtgagtggtcactcagtaaagcaatggcgctgacctatctgaatgaaaaacaggaagtgaccatcggtacccattgctgggtgaatccggatgcccgtatctgtgtaccgaaaccgatcaccgcaggggcttccggtaatgcgtctgttgcccttgaacggtttgatctggcgatgattaaaccattcctcgggccggatacccggctgaacggtgtattcagcggtaatgccaatgtccgctggtttgcggacggctcacagccggtggtggatgcatccctgaaaggcaacggtgtgaaggtggtgcagaacctcgacggcacgaatctgccggtcgcgtttgataccctgaccatgaccgccgccatgaagaacggcaaactcaatcttcagtggctgattgctatcgccggtaacgggaagattaacggtaatgtccagatctctgatctggagaaacgccgccagctgagcgggaatgtcgggatcgataatatctcgctggatctgctgaaaccattgctcggcaaaggggataaagccaccgggcggctgaatgccggattacgtctgggcggtaatgccgcatcaccactgctgtttggtcagctgggattatcggatctcgccgtcagcggccgtctgctgccgtttgatatcacgaccggcggactgactgtgaactttgatggtgcccgttctgatctcagcggaaacatcaaaacgccggaaggttatcttaacctcagcggtaacgcggactggcgcagaatggatgcctggagtgcacggatcttcgcacagggtgacaaactgcgcgtttccctgccgccgatgatccggattgatgtcagcccggatctggtctttgaagccacaccgtcgatgctgaagctggacggaacggtcaatattccgtgggcgcggatcacagtgcatgaagtaccggagtccgccgtcagcgccacatccgacgaagtgatgctggatgacaacttacagccaatccgtgagaaacagaccagtattccgatcctgagtaatctgcggatccatatcggtgatgatgtgctgctcgatgcctttggtctgaaagcaaaactcaccggggatctgaaagtcgcccaggataaacagggtctggggctcaacggccaggtggatattccgcgcgggcgtttccatgcttacgggcaggatctgctggtgcgcaaaggacagatcctgttctccggtccggctgatcagccgttccttaatctggaagctatccgtaacccggataacactgctaacggcgtgatcgcgggtgtccgggtgaccgggcttgccgacagaccgaaagtggaaatattttctgacccggcgatgtcccaggaaaatgcgctctcttatctgctgcgcggtgaggggctggattccggtgacgcagacagttcgcagatgacatccatgcttatcagcctcggggtggcacaaagcgggcagttagtcggaaaaattggtgaaacattcggtatttcggatctggcgctggatacccagggtgtgggcgataaatcgcaggttgtggtcagcggtaagataaccaacgacctgcaggtaaaatatggtgtcggtatatttgactccctggcgaccttaacgttacgctataggttaatgcccaggttatatctggaagcggtgtctggtgttaaccaggcgatcgatctgctttatcagtttgagttttaa

SEQ ID NO: 276589 - DNA, 363 bp, Morganella morganii
atgcgagtgatcgtttatggcagtttgcggcagaaacagggcaaccatcattggatgacctatgccgccctgctgggagaatatacgcttgaaggctatgacctgtatgatttgggacactatcctgcggtggtaccgggaaccggttcgatcgaatgtgaagtgtaccggatctcctcgtcgatcctgactgagttggatgaattaaaaaaagatggtcaggattaccggcgtgaattggtttcaacgccgtacggcagtgcctggatttacttatatcagcgtccggtggacggactggtgaagataaacagcggggactggctgaaacggcacgaggcagaaggcccggaaagcgaatga

SEQ ID NO: 276590 - DNA, 531 bp, Morganella morganii
atgagcctgaataatgttcctgcaggtaaagatctgccggaagatatctatgttgttatcgaaatccctgctaacgcagatccgattaaatacgaagttgataaagaatccggtgcactgtttgttgaccgtttcatgtcaaccgccatgttctacccgtgcaactacggttacatcaaccacaccttatctctggatggtgatccggtagacgtgctggttccgactccgtatccgttacagccgggttcagtgatccgctgccgtcctgtcggcgtactgaaaatgaccgacgaatccggtgaagatgccaaactggttgcggttccgcacaccaaactgagcaaagaatacgatcacattaaagatgtgaacgatctgcctgagctgctgaaagctcagatcactcacttcttcgagcactacaaagatctcgaaaaaggcaaatgggtgaaagttgacggctgggaagatgctgctgccgccaaagctgaaatcattgcttctttcgaacgcgctgcgaaaaaataa

SEQ ID NO: 276591 - DNA, 1014 bp, Morganella morganii
atgaaaacattaggcgaatttatcgtcgaaaaacagcaggacttttctcacgccaccggagaactgactgcactcctctccgcgattaagttaggcgctaagattattcaccgtgatatcaacaaagccgggctggttgatatccttggtactaatggtatctcaaacgtgcagggcgaagtccagatgaaactggatctctatgccaacgagaaactgaaagccgcgctgaaagcccgtggtgaagttgccggtattgcctccgaagaagaagacgacatcgttgtttttgagggcggccgtgcggaaaacgccaaatatgtggttctgatggatccgctcgacggctcatccaacattgatgtgaatgtgtcagtcggtactattttctctatttaccaccgtatcaccccgctgggccagccggtcaccgaagctgacttccttcagccgggtaaccgccaggttgctgccggttatgtggtttacggctcttccaccatgctggtttacaccaccggtaacggtgttcacgccttcacctatgacccgtctctgggtgtgttctgcctgtgccaggccgatatgaaattcccggaaaacggcaaaatgtattctataaacgaagggaactacatccgtttccctgtcggcgtgaaaaaatacatcaaatactgccaggaagaagatccggcaactgaccgcccgtacaccacccgttatatcggctctctggtggcggatttccaccgcaacctgctcaagggcggaatttacatctacccgagcactgcaagccacccgaacggcaaactgcgtctgctgtatgagtgcaacccgatgtcattcctcgcggaacaggccggcggtaaagcgagtgacggtaagaaccgtatcctcgatatcattccggaaaaactccaccagcgttcaccgtactttgtcggtacccgctcaatggtagagaaagccgaaagctttatggcggaattcccggacgaaaacgggaagtaa

SEQ ID NO: 276592 - DNA, 1353 bp, Morganella morganii
atgcatattcatattctcggtatctgcggcaccttcatgggcagcctggctatcctggcccgtgcacaggggcacaaagtgaccggttcggatcagaatgtctacccgccgatgagtgatttactgacagagcaggggatcgaactgattcagggttatgacccggctcagctgacgccgcgcccggatatggtggtgatcggtaatgccatgaaacgcggaaacccgtgtgtcgaggcggtgctgaaccagggtattccctacacttcagggccgcagtggctgcatgaccatgtattaccggagcgctgggtgctggcggttgccgggactcacggcaaaaccaccaccgcgggtatgctggcgtggattctggaagactgcggctatcagccgggctttctgatcggcggtgttccggggaactttgatgtttccgccacgctgggtaacagcccgttctttgttatcgaagcagatgaatatgactgtgcattctttgataaacgctcaaagttcgtgcattacagcccgcgcacgctgctgctcaacaacctcgagtttgatcacgcggatatctttgaaaacctcgctgcgattgaaaaacagttccatcatctggtacgtgtggtgccgggtgatggcaaaattatcgccccggcgcaggatgccaatctgaaacaggtgctcagtatgggctgctggagtgaggaagagtacaccggcgacaatgcccgctggcaggcggagaaagtcaccaatgactgcggtgagttcgatgtgcgttatgacggtgaaatcagcggccgcgtaacctggggactggtgggtgagcacaatatgcagaacgccctgatggcggtggctgccgcacatcacgtcggtgtgccggtcgcggaagcctgccgtgcgctgggtaaatttatcaacgcccgccgccgccttgagctgcgcggtgaggtgaacggtatcagtgtctatgatgactttgcgcatcacccgacggcgattctggccacattacaggcactgcgcagtaaagtcggcggcacggcccgcatcctcgtggttctggagccgcgttcaaacaccatgaaaatggggatcagcaaagacgatatcgcgcctgcgctgggtcgtgcggatgaagtctttatcttccagccggcgaatattccgtggctggtcagtgaaattaccgaacgctgtgtacaaccggcatactggagcggtgacctggatgcgctgaccaatatggtggccgaacatgcacagccgggggatcatatcctggtgatgagtaacggcagcttcggtggtatccacgataaactgctggaaaaactgaagtaa

SEQ ID NO: 276593 - DNA, 471 bp, Morganella morganii
atgcgcgcaccttctaaacaggaagatctgatcaaggcgtttaaggcgctattgaaagaagagaaattcagctctcagggggagatcgtcaccgccctgcaggaagagggctttgagaatattaaccagtccaagatttccaggatgctgaccaagttcggtgctgtccgcacccgtaacgcgaaaatggaaatggtttactgtctgcctgcggaactgggtgttccgacagccaccagcccgttaaaaaacctggtgctggatattgattacaatgactcggttgtggttatccgtaccagcccgggagcagcacagctgattgcccgtctgctggattccatcggcaaatctgagggcattctcggcagtatcgccggggatgacactattttctcgacaccggccaaagatttcaccacagaacagctttacgaagcgattctcgccctgttcgagcaggaactgtaa

SEQ ID NO: 276594 - DNA, 939 bp, Morganella morganii
atgaaagttgcagttctcggagcagcaggtggtattggtcaggctctcgcccttcttcttaaaacccagcttccttcaggttcagatcttactttatatgatatcgcaccggtcacaccgggtgtggcaaaagatctcagccatattccgaccgatgtccggatcaccggattcgcgggagaggatcctacccctgcattagaaggcgcggatattgtcctgatttctgccggtgtggcccgtaaacccggcatggatcgttctgatctgtttaatgtgaacgcggggatcgtccgcaatctggtggaaaaaattgccaaaacctgtccgaaagcattaatcggcatcatcaccaacccggtgaacaccacagtggcgatcgcggcagaagtgctgaaaaaagccggtgtgtatgacaaaaatcgcctgttcggcgtgaccacgctggacatcatccgttccaacacctttgtggcggaactgaaaggcaagaaaccacaagagctggaagtaccggttatcggcggccactccggtgtgaccattctgccgctgctgtctcagatcccgggtgtcagcttcagcgacgcggaaatcgacagcctgaccaaacgcatccagaatgccggtactgaagtggtggaagccaaagcaggcggcgggtccgcaacactctctatgggccaggcagccgcgcgtttcggcctgtcactggttcgcgcgatgcagggcgagagcaatgtggtggaatgcacttataccgaaggtgacggcaaatacgcccgtttcttcgctcagccggtcgtgttaggcaagaacggtgttgagaagcgtctggacatcggttcactcagtgcatatgaagagaaagcactgaacggcatgctggatgtgctgaaggctgatattgcgcttggtgagaaatttattaacagctga

SEQ ID NO: 276595 - DNA, 267 bp, Morganella morganii
atggattccggtaaatctgactggcaccctgctgatataattgcatcgctgaagaaacgggggacaaccctggctgccttgtcgcgcagtgcgggactcagctcctcaacgcttgctaacgcgctttcccggccgtggccgaagggtgaatggctcatcgcagactttctcgccgtccatccgtcagagatttggcccagccgttattttaattctatcacaggtgaattattagataggaaaataagagtgaaggtaactaattaa

SEQ ID NO: 276596 - DNA, 387 bp, Morganella morganii
atgaaaaaagaatggtattccgcgaaggaattggttggtttggcgggcttgccatcatctcctcaaggtgtcaacctgatggcgagacgggaaggctggcaccagcggcgcaagcgcggcgtgcagggaaaagcagtcgaatacagtatcgatagtctgccggatgaagttcaggcgatcctgcatgcatgtgataacagcgcaagctatcaggcgaaacggcaggatgcgtttctgatctgggtggaagcctattatcagctgaccagagaagaacgggagaaaatcgtcacgttcattctgcgggaagggctggctaaactgatccagcatcttgatgcacaggagcttccgggcagccgggagccggacgaaaaaccggaataa

SEQ ID NO: 276597 - DNA, 972 bp, Morganella morganii
atgaactcagaacaaataatcgcgctgactgcggatgatatggccgcagtcaatcaaaagattcaaaaacagctgacctcggacgtatcacttatcaaccagctgggttactacattatcagcggcggcgggaaacggatccgcccgatgatcgctgtgctgaccggccgggctctgggctatgacggcgacaaacatattcaggtggcggccctgatcgaatttattcataccgccacgctgctgcacgacgatgtggtggatgaatccgacatgcgccgcggcaaacagacggccaacgaagtgttcggcaatgccgccagtgtgctggtcggggattttatctacacacgatcctttcagatgatgacggatctggattccatgcgtgtgctgaaactgatgtcagaagcgacaaacgtgatcgcggaaggggaagtgctgcagctgatgaactgcaacgatccggatatcagcgaagcggattacatgcaggttatctacagcaaaactgcccgcctgtttgaggctgcctcacagtctgcggcaatcctggccggtgccacaccggaacaggagaaagcccttcaggattacggccgctttctcggtaccgcgtttcagctgatcgatgatgttctggattatgatgcggataacgcgacactcggcaaaaataccggggatgatctcgatgaaggcaaaccgacactcccgctgctccacgccatgcacaacggcaatgcggaagaatccgcgctgatccgtcaggcgattgaacagggtaacggacgtcacctgctggagcaggttcttgcgaccatgaagcgctgcggatctctggcttacacctatgcccgcgcagaagaagaagcagacaaagctatcgcagccctgtccgcactgccggactcacagtacaaagatgcactggccggcctggcccatatcgcagtccgccgctcagcctga

SEQ ID NO: 276598 - DNA, 309 bp, Morganella morganii
atgtacgcggttttccaaagtggtggtaaacaacaccgggtcagcgaaggtcaaatcgttcgcttggaaaagctggacatcgcaacaggtgaaactgttgagtttgaccaggttctgatggttgcaaatggtgaagacatcaagatcggcgctccagtcgttgaaggtgttaaaattaaagctgaagtggttacacacggtcgcggcgataaaattaaaatcgttaagttccgtcgtcgtaaacacagccggaaacagcagggccaccgtcagtggttcactgatgttaaaattaccggtatcgcttaa

SEQ ID NO: 276599 - DNA, 258 bp, Morganella morganii
atggcacacaaaaaggctggcggctcgactcgaaacggtcgcgattctgaagcaaaacgtctgggtgtaaaacgtttcggtggtgaagctgtattagcaggtagcatcatcgttcgtcagcgtggtactaaattccacgcaggcagcaacgtaggttgcggtcgcgaccacactctgttcgcgttagctgacggaaaagtcaaattcgaagttaaaggcccgaaaaaccgtaaattcatcagcatcgaagctgaataa

SEQ ID NO: 276600 - DNA, 1170 bp, Morganella morganii
atgaaatttgtagatgaagctaaaatcctggttgtggcaggagatggcggcaacggatgcgtgagcttccgtcgcgaaaaatatattccgaaaggcggaccagacggcggagacggcggcgatggcggtgatgtatacctccaggccgatgaaaacctcaataccctgattgattaccgttttgaaaaatcattccgcgctgagcggggtcaaaacggtcagagtcgtgactgtaccggtaaacggggcaacgatatcacgattaacgtgcctgtaggcacccgtgtgcgcgatatgaccaccaatgaggtactggcggacatgttgcagcatggacagcgtcacatggttgccaagggcggatttcacggcctgggtaacgcacgctttaaatcatccgttaaccgtgcaccgcgtcagcgcaccatgggtaccccgggcgaaacccgcgaactcatgatggaactgatgctgctggctgacgtcgggatgctggggatgccgaatgccggtaaatccacctttatccgttctgtctctgcggcaaaaccaaaagtggcggactatccgttcaccacactggtaccgagcctgggtgtggtgcggatggataactcacagagcttcgtggtcgcggatatcccgggactgatcgaaggtgcatctgatggtgccggtctggggatacgttttctgaaacacctggaacgctgccgcgtgctgctgcacctgatcgacatctgtccggtggatgaaagtgatccggtggaaaatgcgaagatcattgtcggcgaactggaaaaatacagtgagaagctggcagagaagccgcgctggctggtcttcaacaaagtcgatctgattgatcctgaggaagcgaaagcccgttctcaggcgatcgcggatgcgcttggctgggaagataaattctatatgatctctgcggtcaatcatgaaggcgtgaaagcactgtgctgggatctgatggaattcctcaacacccatgcccgcgaggccgtggctgaagtgccggctgcggacgcaaaagtggactttatgtgggatgattaccacaaagagcagcttgagcaggcagaagacgatgatgactgggacgacgactgggatgaagacgacgaagaaggtgtcgagttcatctggaagaaataa

SEQ ID NO: 276601 - DNA, 1443 bp, Morganella morganii
atgaatgtttttacccggctcgcatatgcgatgggattgtcagtattactggctgcaggtgcagcagccaccccggtcgaacaatatacccaatatctgcccgccggtacaaacctggcgatgattgcgcagcgggtgggcgattctcagccaatcgtggaataccaggggcagcagatggcactgcccgccagtacccagaaagtggtgacggcacttgccgccctgttgcagctggggccggatttccgttttaccaccagtctggaaaccaaaggacacgttgaaggcactaccctgaaaggggatttaatcacccgttttaccggtgatccgaccctcacccgccagcagatccgcaatatggtcaatgaactgcgtaaagccggggtacaggccatcgacggtgatctggtgatcgatatctctgcctttgccagtcatgacaaagcaccgggctgggtatggaatgatttaacccagtgcttcagtgccccgccgggtgccgcgatcatcgaccgtaactgcttttcagtgacgctgtacccgggggaaaaacccggcgatacagcctatatccgcacctcggagtattatccggtcaatatgttcagtgaggtcaaaaccctcgaacgcggctctgccgaagggcgcttctgtgagctggatgtggtgccgggtgaacttaaccgctataccatcaccggctgtatgaatcagcgcagcgagccgctgccgctggcattcggtgtccagaacggcgcaagctacgccggggcgatcgtcaaaaatgaactgatccacgccgggatcaccctgagcggcaatgtccgccgtcagacgcacccggaacagccgggcaccgtactgatacagacccaatccgccccgctgcatgccctgctgaccaaaatgctgaaaaaatccgacaatatgattgccgatgaagttttccgcaccatcggccgcagctattacggcgtgccgggcacctggcgttccggccagcaggccgtccgtcaggtactgaaagagaaagccggtattgatatgggcaataccgtgatggtggatggctccggattatcccgtcacaacctgatcaccccggcgaccatgatggaagtgctgcaatttatagccaagcatgatgatcagctgcaatttatcaaaatgctgccgctctccggctatgacggcacactgcaataccgcggcggtctgacagaagcgggcgttaacggtaagctctccgccaaaaccggttcattgcagggcgtgtataatctggccggattcctcaccaccgccagcggacaacgcattgcgtttgtgcagtttatttccgcttatgccgtcccgcctgccgagcagcgcagccgccgtgtgccactggtccgctttgaagggcatttgtataaggatttataccggaattactga

SEQ ID NO: 276602 - DNA, 477 bp, Morganella morganii
atgaaacaaatccctatgacggtacgcggcgcagaccaactgcgtgaagaattagaatttctcaaaaatgagcgccgtccgaaaattatcgctgatatcgcggaagcccgcgagcacggcgatctgaaagaaaacgcagaatatcacgccgcccgtgagcagcagggtttctgtgaaggccgtattcaggagatcgaagccaagctctccaatgcgcaggtgattgatgtcaccaaaatgaccaacaatggccggattattttcggtgcgaccgttaccgtttttaacgtcgcaacggatgaagagcagacttaccgcatcgtgggtgatgatgaggctgatatcaaatcaaacctgttgtcagtgaactccccgattgcacgcggccttatcggtaaagaggttgacgacgtggttgtcatccagacaccgggcggtgaagttgagtatgaagtcatcaatgtggaatacctgtaa

SEQ ID NO: 276603 - DNA, 294 bp, Morganella morganii
atgaacctcactaaaaaacaagtccagcacctgaaagcactcgctcatcatctgaacccggttgtcatgattggcaacaacggactgactgaaggcgtactcgcagaaactgaagtggctcttacacatcatgagcttatcaaagttaaaatcgcgggcgaagaccgtgaaatgaaaaccttgattgctgatgcgattgtgcgtgaaaccggtgcttacaatgtgcagattatcggtaaaattctggtgctctaccgtccgtcggaagcccggaagatcattttacctaaatga

SEQ ID NO: 276604 - DNA, 630 bp, Morganella morganii
atggccaataaaaaacgttcagcaagctccgggcgctggttacaggaacattttagtgataaatatgttcagatggcgcaaaaaaaggggcttcgctctcgtgcctggtttaagctcgaagaaattcagcagggcgataatattttcagaccgggtatgactattgtggatctgggtgctgcacccggcggctggtcacaatatgctgttaatcatatcggtcagtccgggcgtgttattgcctgtgacctgttaccgatggatcccatcgtcggcgtggatttccttcagggcgatttccgtgacgaaaacgtgctgaaagctctgctggggcgcgtgggggataaaaaagtccaggttgttatgtcagacatggcaccaaatatgagcggaactccggctgttgatattccgcgcgcgatgtatctggttgagctggcacttgatatgtgccgttctgttctggcaccggggggcagttttattgttaaagtctttcagggagatggctttgacgagtacctccgggaggttcgctccctgttcacgaaagtgaaaatccgtaaacccgatgcttcgcgggcccgatcgcgtgaagtatacattgtagcgacagggtggaaagtgtag

SEQ ID NO: 276605 - DNA, 1950 bp, Morganella morganii
ttgagtgacatggcgaaaaacctaattctctggctggtcatcgcggtagtgctgatgtcgttgttccagagttttggcccaggcgattcaaacagtcgtaaggtggactactctaccttcatcactgagttagcacaggatcaggtgcgcgaagtccgtatttccaatcgtgatcttaacgtcagtaaaaaagacggctccaaatacacgacgtacctgccgatgcaggacaatcagctgcttaataccatgctgaacaaaaacgtcactgtggtcggtgaaccaccggaagagccgggtatcctgacaaccattttcatttcctggttcccgatgctgctgttaatcggcgtctggatcttcttcatgcgccagatgcagggcggcggcggtaaaggtgcgatgtccttcggtaaaagtaaggcacgcatgctgaccgaagatcagatcaaaaccacctttgcggatgtggccggttgtgatgaggccaaagaagaagtcggcgagctggtggaatatctgcgtgagccgagccgcttccagaaactcggcggtaaaattccgaaaggtattctgatggtggggcctccgggtaccggtaaaacgttgctggcaaaagcgattgccggtgaggcgaaagtaccgttcttcaccatttccggttctgacttcgtcgaaatgttcgtgggtgtgggtgcgtcccgtgtccgtgatatgttcgaacaggcgaagaaagcagccccatgtatcatctttatcgatgaaatcgacgccgtcggccgtcagcgtggtgcgggtctgggcggtggtcacgatgaacgtgagcagacactgaaccagatgctggttgagatggatggtttcgaaggtaacgaaggtattatcgttatcgcggcaaccaaccgtccggatgtgcttgaccctgcgttactgcgtccgggtcgtttcgaccgtcaggtcgtggtcggtctgccggatgtgcgcggccgtgagcaaatcctgaaagtgcatatgcgccgtgtgccgttatcgccggacgttgaaccgtctgtgctggcacgtggtacaccgggcttctccggtgcggatctcgccaacctggtgaacgaagctgcgctgtttgcggcacgcggtaacaaacgcgttgtgaccatggtcgagttcgaaaaagcaaaagataaaatcatgatgggtgcggaacgccgctctatggtgatgacagaagagcagaaagcctcgactgcctaccatgaagccggtcacgctatcatcggtcgtctggtgccggagcatgacccggtacacaaagtgaccattattccgcgcggacgtgcactgggtgtgaccttcttcttaccggaaggggatcagatcagcgccagccgtcagaaacttgaaagtcagatctccaccctgtacggcggccgtctggcggaagagattatctacgggccggaaaatgtgtccacaggcgcatccaacgacatcaaagtggcaactaacattgcccgtaacatggtgacgcagtggggcttctctgaaaaactggggccgttactgtatgcggatgaagacggtgaagtgttcttaggccgttctgtgtcaaaagcacagcacatgtctgatgaaactgcccggactatcgatgaggaaatccgcgggattattgagcgcaactacaaacgtgcgcgtcagatcctgatggataacctggatatcctgcacaccatgaaagatgcattaatgaaatatgaaaccattgatgcaccacagattgatgatctgatgaaccgtgtgccggttcgcgaacctgcgggctgggaaggtgacaagccgaaagcggatacccgtccgccggaaagcagtaaccaggttccggttcaggaagcacctgaatcatcagatgacaacaatgctgcgccgtctgaagacgacaacaagcagtcataa

SEQ ID NO: 276606 - DNA, 849 bp, Morganella morganii
atgaaacttaccgcacgcggtcagacactttcgctggcaacgccgcaggtgatggggatcctcaatgtgaccccggattcattctcagacggcggtacacacaacacccccgccaaagcactggaacatgcacggaaaatgattgcggaaggcgcggcgattattgatatcggcggtgaatccacccgtcccggagcagcagaagtcagtccggagcaggaagcggaacgggttatcccggttgtggcagcgattgcccgtgagtcggacgtctggatttcagtggatacctcaaaagcgctggtgatccgcgaagccgcaaatgcaggggctcatattctcaatgatatccgctcattcagtgagccgggggcattacaggcggcagcacagagcggcctgccggtttgtgtgatgcatatgcagggagaaccgcgtaccatgcagcaggcaccgcactatcagaatgtggtgcgtgaggtgtatacgtatcttgaagcgcaggtggcacgctgtgtggcggccggaattgaaaaaaatcacataattctcgatccgggcttcggtttcggaaaaacactgacgcataattatcagttattggataaattagacctgtttcataacctgggattaccggttctcgccggaatgtcacgaaaatctatgattggccagctgatggatattcccccggatgaacgggttgccggcagcgtggcctgtgcggtgattgccgcgatgaaaggtgcgcagattatccgtgttcatgatgtaaaagaaactgtccaggccatgaaagtggtggaagcaacccgtttagcgaaggaaacaaacgacaatgagtga

SEQ ID NO: 276607 - DNA, 1335 bp, Morganella morganii
atgagtgatcgcaaatactttggtactgatggcatccgcggaaaagtgggtgacagcccgattacccctgattttgtgctcaaactgggctgggcagcagggaaagtgctggcacgtcacggctcacgtaaaattattatcggcaaggatacccgtatttccggctatatgctggaatccgcactggaagccggtcttgccgccgcagggttatccgcttcatttaccggcccgatgccgacaccggcggtcgcttatctgacccgtactttccgtgctgaggccggtattgttatctccgcctctcacaacccgtattatgacaacggtatcaaattcttctccatcgacggcaccaagctgccggataacgtggaagaagcgattgaagccgaaatggaaaaaccactgacctgtgtggaatccgccgagctgggccgtgcaaaccgtattgtggatgccgccggccgttacattgagttctgtaaagggacattcccgaacgagcagagcctgaacgggctgaaaatggtgatcgactgcgcacacggcgcaacctatcacatcgcaccgaacgtattaagtgaactgggtgcggaagtgattgctatcggctgtgatccgaacggtatcaacattaacgaaaaatgcggtgcaacggatgtccgtcagttacaggaacgtgttctggctgaaggcgcacatgtcggcctggcatttgacggtgacggcgaccgcctgatcatggtggatcacctgggtgaaaaagtggacggtgaccagatcctgtttatcattgcccgtgaagcactgcgccagggacaactgcgcggtggtgctgtcggtacactgatgagtaatatgggactggagctggcgctgaaacagctgggtattccgtttgagcgcgcgaaagtcggcgaccgttatgtgctcgaaaaacttcaggaaaaaggctggcgtctgggtgcggaaaactccggccacatcatcctgctggataaaaccactaccggtgacggcattgtggcgggtcttcaggtactgagtgccatggtacgcaacaacatgagcctgcacgacctgtgcagtggcatgaaactgctgccgcaggtgctggtgaatgtccgctttgccggtcagcacgacccgctggcaagcgaggaagtcacccgcgtggcacaggaagtggaaaaagagctgaacggcaaaggccgtgtgctgctgcgtaaatccggtactgaaccgctgatccgtgtgatggtggaaggggaagatgaagcgcaggtcactgcaatggcaaaccgcattgcagacgcggtgaaacgcgtataa

SEQ ID NO: 276608 - DNA, 339 bp, Morganella morganii
atgtatacagctctcttagtcgttttcttacttgttgcgattgccttagtcggcatgatcttaatgcagcaggggaaaggtgcggacatgggtgcttcgttcggtgcaggcgcgtctgcaacactgtttggttcttcgggttcaggtaacttcatgacccgtaccacaggcattttagcaacactgttttttgtactgagtttggttctgggcaacatgaccagcaataaaaccggtacaggcagcaagtttgataatctcgctcagccggtgcagacagaacagaaaacagatgttcccgcagcaccagcagctcctaacagcgatattccgcgctga

SEQ ID NO: 276609 - DNA, 483 bp, Morganella morganii
atgccctttttttatgtcccgggggtggtcttgtccacattagagcagaaattaacagagatggtcactgcacctgtcgaagcactcggttttgagcttgtcggcgtggagtttatccgcggccgcgtgtcaacactgcgtatttttattgatagtgaagagggtatcactgttgatgattgcgcggacgtgagccaccaggtcagtgccgttcttgatgttgaagatcctattacaaccgtttataaccttgaggtttcgtctccgggtatggagcgtccgttatttacggctgaacattatcagcggtttaccggtgaggaagtctcactgactttacgaatcgcaatgcagaaccgtcgcagatggcagggtattatcaaagccgtcgacggtgaaatgatcacggttacagtggatggcaaagacgaagtgttcgcacttggcaacatccagaaagctaacctggtaccccacttttaa

SEQ ID NO: 276610 - DNA, 1512 bp, Morganella morganii
atgaataaagaaattctggctgttgttgaggcagtttctaacgaaaaatcgcttcctcgtgagaaaatttttgaggctctggaaactgcgctggcaaccgccaccaagaaaaaatacgaacaggaaattgatgttcgtgtggaaatcgaccgtaaatccggtgattttgataccttccgccgctggatggtggtagaagaagtcactcagccgacccgtgaaatcacactggaagcggctgattatgaaacgccgggcattcaggtaggcgaatatatcgaagatcagattgaatctgtcaccttcgaccgtatcaccactcagaccgcaaaacaggttatcgtacagaaagtacgcgaagctgagcgtgcgatggtggttgatcagttccgcgagcagcagggcgaaatcatcactggtgtggtgaaaaaagtgaaccgcgaaaacattaccctcgatctggggaataatgcggaagcggtcattatgcgcgaagatatgctgccgcgtgagaacttccgcccgggtgaccgtatccgcggagttctgtatgatgttcgtccggaagcccgtggtgcgcaattatttgtgacccgttcccgtccggaaatgctggtcgaattatttaaaatcgaagtgccggaaatcggcgaagagattattgaaattaaagcggctgcccgtgatcccggttcccgtgcgaaaatcgcggtgaagaccaatgacaaacgcatcgaccctgtcggggcatgtgtgggaatgcgcggcgcccgcgttcaggccgtttccggtgagctgggcggcgagcggattgatatcgtgttgtgggatgacaacccggcgcaattcgtgattaatgcaatggctccggcagatgttgcatccattgttgtcgatgaagacaaatgcacaatggacgttgctgtggaaagcagcaaccttgcacaggccattggccgtaacggccagaatgtgcgtctcgctgcacaactgctgaaaaaacatcgtggtgatgacaaatgggaactgaatgtcatgactgcggaggaacttaacgcgaaacaccaggcggaagcacacgcttccattgaaacttttgttaagcatctcgacatcgatgaagatttcgcaaccttattagtggaagaaggtttctccacactggaagaactggcgtatgtgccggtcagcgaacttctggaaatcgacggcctcgaagaggaaaccgttgaagtcctgcgcgaacgtgcaaaagccgctttaacaacgctcgaactggcacagaaagagagccagtcaggtaccacaccggcggatgatttgttaaaccttgaaggcatggaccgcacactggcattcaccctggcttcccgtggtatttgtacccttgaagatctcgcagagcagggtatcgatgacctcacggatatcgaaggtctgaatgatgagaaagcaggtgagctcatcatggcagcgcgtaatatctgttggtttggcgacgatgcatcttaa

SEQ ID NO: 276611 - DNA, 2733 bp, Morganella morganii
atgacagaatcggtaaaatcactggcagacgaaattcagacttccgtagagcgcctggtacagcagtttgctgatgccggcatcaaaaaaacggcgtctgataacgtttcccagcaagaaaaagaggccctgctggcccatctgaaccgcgaacagggcggggcaagtcagccgggtaaattaacacttcagcgcaaaactcgcagtacgctgagtgttccggtaaccggtggcaagagcaaatcggttaatattgaagtccgcaaaaaacgcacatatgtaaaccgcgatgccgctgaacaggcaaaagccgcggaagagcaggcacagcgtgaagcggaagagcaggcaagacgcgaagctgaagagcaggcccgtcgtgaagccgaagaaaaagctaaacaagaggcgcaagccaaacgtgaggctgaagaaaaggcaaaacgcgaagcggcagcagcgaaagtaactgaacaagcggcagaaccggctaagcgtgaagcagcggaaaagaataacgtgaaagaaaataaagcgaaatcagccccggctgatacccgggaaaacagcgaaaaagtgcgccgcgaagccgaagccgctgaaatcaaacgcaaagctgaagaagaacagcagcgcaaacttgaagctgaagtgaaacgtgcagctgaagaagcgcgccgtctggccgaagaaaacggcgagaaatggtctgctcctgtcagcgaagaaacagaaagcgcggactatcacaccaccacctctgctcacgcccgtgaagcggaagatgaaagtgatgcgaaagttgaaggcgataaccgcggccgcggccgtggcgcgaaaaacgtccgccagaagaaaaacaaccgtcattctgagaaagccgatcgcgaagaagcccgtgcgcaactgccgcgcggtaagaaacagcgtaaaggcagctcactgcagcagagctttaacaagccggttgcagcggttagccgtgatgtggttatcggtgaaaccatcactgtcggcgaattagccaacaagatggcggtgaaaggttctcaggtcattaaaaccatgatgaagatgggcgctatggcgactatcaaccaggtgattgaccaggaaaccgcacagctggttgccgaggaaatgggtcacaaagttatcctgcgccgtgagaacgagctggaagaagcgatcctgaacgaccgtgacatgggtgaagcacaggctgaaccacgtgcgccggttgtgaccatcatgggtcacgttgaccacggtaaaacctcattactggactatatccgttccaccaaagtcgcctccggcgaagcgggcggtattactcagcacatcggtgcttaccatgtgaccaccgataaaggcgctatcacgttcctggatactccgggacacgccgcgtttacctccatgcgtgcccgtggtgcgcaggcaacggatatcgttgttctggttgtcgcagcggacgatggcgtgatgccgcagactatcgaagctatccagcatgcgaaagcagcgggtgtgccggttgtggttgcggtgaacaaaattgataaaccggaagctgacccggatcgcgtacgtaacgaactgtctcagtacggcatcctctctgaagagtggggcggtgagactcagttcatcagcgtttccgccaagaaaggtatcggtatcgacgatctgctcgatgctatcctgctgcaggctgaagttctcgaactgaaagcagtgcgtgccggtatggcaagcggtgttgttatcgaatcttacctcgataaaggccgtggtccggtcgccactatcctggtacagagcggtacactgaacaaaggcgatatcgtcctgtgcggctttgaatacggccgtatccgtgcgatgcgtaacgaactgggtcaggatatcaccgaagcgggtccgtccattccggtggaaatcctgggtctgtccaacgtaccgtctgccggtgatgaagcgaccgttgtccgtgacgagaagaaagcccgtgaagtggcactctatcgtcagggtaaattccgtgatgtgaaactggcacgccagcagaaagccaaactggaaaacatgtttgctaacatggaaagcggtaaggtttctgaactgaatatcgttctgaagacagatgttcagggtacctgtgaagctatcaccgattcactgatgaaactgtcaactgacgaagtcaaagtgaaaatcatcggttccggtgtgggtggtatcactgaaactgacgccacgctggctgcggcatccaacgcgattatcctcggctttaacgtccgtgcggatgcatcagcacgccgcctgattgaaagcgaaagcgttgacctgcgttactattccgtcatctacagcctgattgacgaaatcaaacaggcaatgagcgggatgctggcgccggaattcaaacaggaaatcatgggtctggcagaagtccgtgatgtgttccgttcaccgaaattcggtgcaatcgccggttgtatggtgactgaaggaactatcaaacgtaataaccctatccgcgttctgcgtgacaacgtggttatctatgaaggtgagctggaatccctgcgccgcttcaaagatgacgttgctgaagtccgtaacgggatggagtgtggtatcggtgtcaagaactacaatgatgtccgcccgggcgacatgattgaagtcttccaggtgattgaagttcagcgaactatctga

SEQ ID NO: 276612 - DNA, 411 bp, Morganella morganii
atggcgagagaattcagccgtactcagcgcgtttcacaggaaattcagaaagaaattgcgattatcctgcagcgtgaaattaaagatccccgtgtggggatggcaacggtatccggtgtggatttatcccgtgatatggcctatgccacggtatttgtgacctttctgaactttatggatgaagaccataattcagagcaggtgaaaacaggtatcaaagtcttaaatgatatttccggctatatccgttccctgctggggaaagagatgcgtctgcgcattattccggaactcaaatttgaatatgacagttctctggtcgaagggatgcgtatgtccaacctggtgtctgatgtgatcaaacacgaccaggatatgcgtaaatctgcggacgacaaagagggtaactga

SEQ ID NO: 276613 - DNA, 945 bp, Morganella morganii
atggcacgccgtcgtcggggccgtaatgtcaacggcattgtcctgctggataaaccgcaggacatttcatccaatgatgcattgcagaaggtccgccgtctgtttaatgccgccaaagccggtcacaccggcgcgctggatccgctggcgaccggtatgctgccggtctgcctcggtgaagcaaccaagttttcacagttcctgctggattccgacaagcgttaccgcgtgattgcccgcctggggcagcgtacggacacctcagactcacagggtgaggtgatcagtgagcgcccgctgtcattcacggcggaacagcttgcggctgccctggagtcattcaggggcgataccttacaggtgccgtccatgtactccgcgctcaagcatcagggacgtccgctgtatgagtatgcccgcaaaggcatcaccatagagcgggaagcccgcccgatcacggtgtatgaactgctgtttatccgccatgaaggggatgaactggagctggaaattcactgctcgaaaggcacctatatccgcactatcattgatgatctcggtgagaaactcggttgcggtgctcacgtgactatgctgcgccggctgcaggtggccacgtatccggcagaacggatggtgacactggaacagcttcaggaaatgcgccgtgtggcggatgagtctgaagctcctcttgaaaccgcactggatccgctgctgctgccgatggataccgccgtgtcacattttccgcaggtaaatctgacggacgtgactgccgggtattttaagctggggcagccggtacgggctccgcacgacctggcaccggagacattaacccgtgtaacgcagggtgatgacgcgcagtttatcggccttgcggtgatcagtgaggacgggctggtggcaccgcgccgtcttgttgtggaatacacggaataa

SEQ ID NO: 276614 - DNA, 270 bp, Morganella morganii
atgtctctaagcactgaagcgaaagcgaaaattgtcgctgatttcggtcgtggcgaaaacgacaccggttcaagcgaagttcagatcgcgctgctgactgcacagatcaaccacctgcagggtcactttgcagagcacaaaaaagatcaccacagccgtcgtggtctgctgcgtatggttgctcagcgtcgtaagctcctgaactatctgaaaggcaaagacttagcaagctatacctcaattcttgagcgtctgggcctgcgtcgctaa

SEQ ID NO: 276615 - DNA, 2157 bp, Morganella morganii
ttgttaaatccgacaatccgtaaattccagtatggtcagcacactgtcactatcgaaaccggcatgatggcccgtcaggcgacagcagctgtaatggttaacatggacgacaccgcggtattcgttaccgttgtcggccagaaaaaaatgaaaccgggccaggacttcttcccgctgaccgtaaactatcaggagcgtacttacgcggccggccgtattccggggagcttcttccgccgtgaaggccgtcccggcgaaggcgaaaccctgatcgcacgtctgattgaccgtccgttacgtccgctgtttccggaaggtttcctgaacgaagttcagatcatcgcaaccgtggtgtctgtgaacccgcaggttaaccctgatatcgtggcaatgattggtgcctcagcggcgctggcactgtccggtattccgtttaacggcccgattggtgcggcacgtgttggtttcatcaatgaccagtatgttctgaacccgaccactgacgaattagcggtaagcaaactggatctggttgttgccggtaccaaaggtgcggttctgatggttgaatcagaagcacagctgctgaccgaagaacaaatgctgggtgcggtcgtgttcggtcacgagcagcagcagattgttatcgaaaacatcaacgcactggccgctgaagccggtaagccgaagtgggactggcagccggagcctgttaaccagactctgcgtgaccgtgttgctgaactgtctgaaaaagcgctgggtgatgcttaccgtatcactgagaaacaggatcgttacgcacaggttgatatcattaaagatgcaaccatcagtgctctggaagctgaatttgccgcacgcggtgaagagctgaccggcgaactgaaacacgaaatcagcgacatcctggctgcggttgagaaatctgttgtccgtacccgtgttctgaacggcgagccgcgtatcgacggccgtgaaaaagacatggtccgcgcactggatgtccgcaccggtgttctgccgcgtactcacggttcttctctgttcacccgtggtgaaactcaggcgctggtaacagcaactctgggtactgcccgtgatgcacagactctggatcaggtaatgggtgaaattactgacaccttcctgttccactataacttccctccatactgcgtgggtgaaaccggtatggtcggttcaccgaagcgtcgtgaaatcggccacggccgtctggcgaaacgtggtgtgctggcagtgatgccatcccaggaagaattcccgtacaccgtgcgtgtggtttcagaaattactgaatccaacggttcttcttctatggcgtcagtctgtggtgcatctctggcactgatggatgcaggtgttcctgtgaaatcagcggttgccggtatcgcgatgggtctggtgaaagaaggtgacaaattcgtggttctgtctgatatcctcggtgatgaagaccacctcggcgacatggactttaaagttgcgggcagccgtgacggtatcagcgccctgcagatggatatcaaaatcgaaggtatcaccagcgaaattatgcaggtggctctgaaccaggccaaaggtgcgcgtctgcacatcctgggcgtgatggaacaggctatcaactcaccacgtgctgatatctctgagtttgcaccgcgcattcacaccatccgcatcaacccggacaaaatcaaagacgttatcggtaaaggcggttctgtgatccgtgccctgaccgaagaaacaggcaccactatcgaaatcgaagatgacggtactgtgaagattgctgcaactgacggcgataaagcgaagatggctatccgccgtatcgaagaaatcaccgcagaagtggaagtcggccgtatctataacggtaaagttgtccgtatcgttgacttcggtgccttcgtggctatcggcggcggtaaagaaggtctggtgcatatttctcagatcgctgacaaacgcgttgaaaaagtatcagattatctggaaatgggtcaggaagtaccggtcaaggtactggaaatcgaccgtcagggtcgtatccgcctgagcatgaaagaagcagtcagtcaggatgctgcaccggcttcggatgcaacccctgatgcaaataacgctgaataa

SEQ ID NO: 276616 - DNA, 888 bp, Morganella morganii
atgaatttttttctgcgttggtggagcattgcggctataatttttatcgcaggatgcagcagcggtaaaaactggcactccggggatttacttgcagtacccctgcaaccatcattacagcaggaagtgatcctcgcccgaatggaacaaatactggcaagccggtcattaactgaggacgagtacgcccagctgctttatcagcgtggtgtgttgtacgacagcctcggattgcgtgcattggcacgtaacgattttactgttgcgttatcaatgcgtccggatattccggagatatttaattacctgggcatttattttacgcaggcaggcaactttgatgctgcctatgaagcgtatgattctgtattagagcttgatccaacttataactacgcgcgtatgaaccgcggtattgccctgtattacgggggccggtatccggtggcgcgggatgatttgctggcgttttatcaggatgatccaaacgatccgttccgctcgctgtggctttatctcgtcgataaagagatagatccgaagaaagcactgaccgatttacgtcagcgctatcagcaggcgaaaggcggacaatggggctggaatattgctgaattctatctcggcgacatcagtgaaaagacactgcttgatcggctgaaggaattctcaacggataacacttcgctcgctgaacatctcagtgaaacctacttctatttaggtaaatactacctgagtctgggggatacggacagcgctgaaacgctgttcaagctgacggttgccaacaacgcacacaatttcgttgagcaccgctacgcattgttggaattagctctgttaggtgatgaagaacaggacctgacggattcagatccacaatag

SEQ ID NO: 276617 - DNA, 1908 bp, Morganella morganii
atgaccactgagactgaaatctcttttgctgacattggtttatcagctgatattttgactgcactggacgacctgggctacgaaaagccgtccccgatccagcaacaatgtattccgcacctgcttgccggacgtgatgtcctgggtatggcacagacaggtagtggtaaaacggcggcattcggcctgccgttactgaacaatattgatccgaacctgagagcgccacagattctggtgctggcaccgacccgcgaattagcggtccaggttgcggaagcctgtactgatttctccaaacatatgcgtaacgtgaatgtggtcgccctgtacggcggtcagcgttatgacgtccagttacgtgctctgcgtcaggggccacaggtggttgtcgggactccgggccgtctgctggatcacttaaaacgcggcaccctggatttatccaacctgaaaggtctggtactggacgaagcagatgaaatgctgcgcatgggcttcatcgaagacgttgaaaccatcatgagccagatcccggcagagcatcagacagcactgttctctgcaactatgccggaagctatccgccgcattacccgtcgtttcatgaaagatccgcaggaagtgcgcattcagaccagcgttaccacccgtccggacatcagccagagctactggactgcttacggtgcacgtaagagcgaagcactggttcgtttcctggaagcggaagattttgatgcggcgatcatcttcgtccgtaccaaaaacgcgaccctggaagtggctgaaaccctggagcgtaacggctacaacagcgcagcactgaacggtgatatgaaccaggcactgcgtgagcagacgctggagcgcctgaaagatggtcgtctggatatcctgattgcaacagacgttgcagcccgtggtctggacgttgagcgtatcagcctggttgttaactacgatattccgatggatgcggaatcttatgttcaccgtatcggtcgtaccggtcgtgcgggccgcgcgggccgtgctctgctgttcgtcgaaaaccgcgaacgccgcctgctgcgcaacattgaacgcaccatgaaattgactatccctgaggtagaattaccggatgcagagatgatcagccagcgccgccaggaaaaatttgctgccactatccatgcagaaatggaaagcagcaacctggatcagtatcgtgcactgctgaaaaaactggttccggcagacagcgatgagtctgacgcagatatcgatatggaaactctggctgctgttctgctgaaaatggcagaaggtgagcgcaaactgatcctgccgcctgatgcaccgcgtcgtccgcgccgtgagttcaacgatcgtgatgatcgccgccgcaatgatcgcaacgaccgtttcggtgatcgtcctgagcgtggtgatcgtccgcgccgtgaacgccgtgacgtgggtgatatggaactgtatcgcattgaagtgggccgtagcgatggtgttgaagtccgtcacattgtgggcgcgattgctaacgaaggtgatatcaacagccgttacatcggtaacatcaaactgtttgatactcactcaactatcgaattaccgaaaggtatgccgacggatctgttacagcacttcacccgtacccgtgttatgaacaagccaatgaacatgacattagtcggtgatgcgaagccgttcaaccgtgaacgccgcagcggtggtaatgaccgtggtggtaacggtggccgcagtttcggtggtggtaaccgtcgtgacggtgagcgttctgatcgtggtaacagcgatcgccgtccgcagggcgagcgtcgcagcttccgccgcgaagaaggcggaaactccgcaccgcgccgtcgtaccaataatgatgcataa

SEQ ID NO: 276618 - DNA, 714 bp, Morganella morganii
atgaatgttttaattgttgatgatgagccactggcccgggaaaacctgcgattactgctcgatgcataccctgacatccatatcctgggtgaatgcaccaacgccattgatgccatcggaaaaattcaccgcctgaagccggacgtggtgtttctggatattcagatgccccgtgtcaccgggctggaaatggttggtatgctcgatcccggccaccggcctgcaattgtctttctcaccgcctttgaagagtacgccttacaggcttttgaggaggatgcgtttgattatctgctcaaaccggtggagaaagagcgcctggacaaaaccctgaaccggctgcgccaggggcagatccgccctgctgaaaccccggaacagacagaacagctgcgctacatcccgtgcagcgggcacaaccgtatctggctgatgccggttgaggatgtggtgtatgtcaattcccgtatcagcggcgtgtttgtgatgagcgcgcacggccaggaaggatttaccgagctgacactgcgtactctggaaacccgtaccccgctgctgcgctgccaccggcagtatctggtcaatctgacccgcctgcgggaaatcctgctgggcgataacggccaggcggaactgatcctgagtaacgacgaaaccattccggtcagccgccgctacctcaaacccctgaaggaagccctggggctgatttaa

SEQ ID NO: 276619 - DNA, 1710 bp, Morganella morganii
atgtatgactacaacctgattttcctgctgcttcagcagatgtgtgtgtacctggttatcgcctgggtgctcagcaaaacgccgctggtgctgccggtcttacaggtgactgtccgcctgccgcacaagctgatgtgctacctgattttctccgttttctgtgtcatgggcacctatttcggactgaatatcaatgattccatcgccaacacacgggctatcggctccgtactcggcgggttgctcggcgggccgtctgtcgggctgctggtcggttttaccggcggactgcaccgctattctctcggcgggatgacggcgttcagctgtatggtgtccactattgtcgaggggcttatcggaggcctggttcaccgctactatatgaagcgcgggcaaatcaataagctgtttaatccctggacagcagccggtgtgacctttgttgccgaactggcgcagatggcgattattctgttactggcacggccgtttaatgaagcgctgagtctggtgaaagatattgccgcaccgatgattatcgccaataccatcggtgccgctatgtttatccgtatcctgctggacagacgcgccatctttgaaaaatacaccagtgccttttccgcccaggctctgaaactggcgatcagtacagacggcgtgctgcgccagggatttaacgagaccaacagccgccaggtggcacaggtactgtatgatgagctgaatgtcgccgccgtggctatcacggacacagaaaaactgctggcgtttatcggtgtcggggcggatcaccatctgccgggcacgccgattgcctcgcgttactcccggcaggctattgcccataatgaggtggtctatgccgacggtaacgaaacgccgtactgctgttcgatcaacccgcactgtaaactcggctctacgctggttatcccgctgaccggagagaataagcaggtggtcggtaccatcaaactgtatgaggtgaagaaccgcctgttcagctccattaaccgcacgctgggagaagggattgccagcctgttgtcggcacaaatcctggccgggcagtttgagcgaagtaagcagtcactactggaaacagaggtaaaattgctgcatgcccaggtaaacccgcattttctgtttaatgccctcaataccttacaggcagtgatccgccgcgatgcggaacaggcacggcatctggtgcagaatctctccacctttttccgtaaaaatttaaaacggccgggggagatagccactctcgctgccgaaattgagcatgtgaatgcttacttacagattgaaaaagcccgcttccgtgaacaactcagtgtggatatcgccattccggatgcgctgaaacaagccagtctgccggtcttttcgttacagcccattgtggaaaatgcgataaaacatggtacatcacagatatttgagcagggaaaaattaccataagcgcacgggcggagggcaatacgcttgtcatcctgattgccgataacgccgggctgtatcagccgaccgggatgagtgacgggctcggtatggggctggtcgataaacgcatcaaagtccgctatggtaaacaatacggtctcagtgttcactgcgaaccggaagtaaaaacaaccattattctgaccttacccttcgactcaccggcaggtgcatcagcaccgcctgataactaa

SEQ ID NO: 276620 - DNA, 972 bp, Morganella morganii
atgaaaaaaagaacaatctatctgatcctgctgatgctggtcttaattgcgatggccgcactttttcgtgcccacaaccagtatcttttattacagggtgaagtcgatgcaccggaggtaattgtctcctcgaaagccaaaggacgtgttgttgagcgtctgattgagcgcggtgacgacgttaaacagggacaggcgctgattcgcctgaccagcccggagctggaagcacaggtcgcctcgctggtggctgcccgcgatcaggctcaggcgcagttaaccgagtccctgaacggcacgcgtgaagagagcgtgcgtaactatgctgcacagctggcgaagtctcaggctgagctggcgaatgcacagcgtgattttcagcgcatgagcagcatggccggaaaaggttatgtgtcaaaaaccgagcttgatcagtcccgccgtgcccgtgatgtggcgcagcagggcgtactggctgccagagcacagctcgaccaggcgaaaaacggcgaccgcaccgagcagcgtcagcgttacgaagcagcactgcgccaggcagaacagaaactggcggaattaaaagtccagcaggatgaactgacggttaccgcgccggtgaccggggagatcgggccggttccggctgaaatcggggaactgtttaatgcaggcagcccgctggtgacgattatccgcctgccggaagcgtattttgtctataacctgcgtgaggatattctcgcggatgtgaaaaaaggcgataaaatcacgctgacggtaccggcactgaaaaatcaggaaatagaggcagaagtccgctatatcgccccgatgggcgattacgccaccaaacgcgccacccgcgccaccggggattttgacctgaaaacctttgaggtgcgtctctatccggcacaacctgtggacgggttaagacccggcatgagtgcactgtggcgccgggataagtaa

SEQ ID NO: 276621 - DNA, 1086 bp, Morganella morganii
atggccatccgcagcccggtgttccactggctgagctggttatttccgctgatcttattcacactgatcagcgcgaacttttcagagggaacactgctgaatctgccggtctctgcggtggattatgaccacagcccgctgtcacggacgctggtgcgcaatctgaatgccgcttcacacgccagtatcacgccgcgggatgatccttcggcagcactggagcggatgggcagtgcggaagattacgcgatcctgatgatcccgaaacgttttgaaagtgatgtactggccggaaagcagccgacagtccggatgtattacaacgggttattttatgcctccggcagctatgcgattcaggatttcagcgggctgatagcggaactgaatgcacagtaccgcactgtcctcgcatcagaaacgggcaaaacgctgccgaaactggcacaggtcactatgtcatacgacagcctgtttaacgccagcggcagttatatttattatcagcagtttgccgccaccatccatatgctccagttatttgttgtcacgctgactatttacagtatgtcgcgcggtaccatgctgctgacgcttaaaccgctgttcagtggtgtgctggggaaactggcaccgtataccctgttttttaccgctctgctgatggtggaactggctgctctggtgacgttttccggcgccaaagtggcgggtaacccgctgtatatgctgtttatcggcttcttttatgtgatggcggcacagagtatcggcctgctgctctacaccttcaccagcaatgcgctgatggcttacagtatgattggtatgctggtcagtatcgccatggcgttttccggcatggcggtgccggagctgtctatgatcctgccggccaggattatctctaaccttgagccgctgactcacgcactcaatgcgatgtttgatatcttcctgcgcgaagtgtcgctgctgcatattctgtatgtctgtgcattattgctgatttatccggtagccaatgccttttttgtccgtaaccggttaccgaaacggctggcattgcagggaggtgcggtatga

SEQ ID NO: 276622 - DNA, 1164 bp, Morganella morganii
atgaaactctattttcagacgttcctgaaagtcctgctgggaatgctggcaaaaccgatgtggatgctgctggtggtttcattgtgtgtgatgagcctggtgtatgtccggccggtcttgtgggatctgcctgtcgccgtgattgaccaggatcactccgcagccagccgctcactgatccggcagctggatgcaaccgccaaagtggagctgcacggttatgacaacctggagacggcacggcgcgatatgattatgcgcgagttattcgccatcattattattccgactgattttgagcgaaatattctccggggtaaaaatatcactgtcccggtattcggggatgcgacgaaccgcctcgccagcgggcagatccagcaggagctgagcaaggcatatcaggaattgctggggggatataacacccgtattctgcaggatgcaggctatacaccggaacaggcgtcactgattatttcaccgatacagtcagaaacggtggctatgtataacccgggtgtcagctttgcggcgattgtgttccccggtctgctggtcatgttattacagcactccctgctgatagcctgtgtccgtgtcagtatcgcggtgcgcagtacgccgaaaggtaaaccgccgctggcggtgtatctgggggcactgagtgcgctgctgcctatctggctgtttctctcgacggtcttctttgccctgtggccgtgggtgctgggataccgccaggaagcgccgatgtatgaactatggctgctgacattcccgttcctgctgggagtactgggactgggcaaactggttactgaatgtctgcgcagtgtggagatgatttacctgacactggcctttgtcaccacaccggtcttttatatgtcaggcaccatctggccgttacaggctatgccggactgggtgcggtttattgcttccgcactgccgtccacctgggcgaccaaagcgattgcaggtatcaaccagatggatttaccgttcagcagcgtgcagaacgatattattatgatgctggtgctcgggattatttatacgcttctcggggtatttatcggtatgttgcgtgacggggaattacggcgtattacgcattccctgcgacggttattccggcggaaaaacagagcccgttaa

SEQ ID NO: 276623 - DNA, 459 bp, Morganella morganii
atgactgatgtttatgcccgtttaaaagcactgaatattgaactgccgccggtcgttgtaccggatgcaaaatttcagccgtacgtgatttttgataacaccattaccctctccggccatttatccaaaaccggggaacagttagacaccggtaagttcggggcggatctgaccattgagcagggtgagaaaattgcccgtcagctggctgttaacctgctcgggacactgcagggcgccgttggtgacctgaataagattaaaaagatcatcaacctgaactgtatgattaacggtacacaggattttaccgatccccatgtggtggcgaatgcctgttcacaggtttttcatgatgttttcggtgagaaaggctatcacagccgcaatgcactcactgtggcacaactgccgttcggcgcctgtatggaaatatccctgatcgcgggtattgagtaa

SEQ ID NO: 276624 - DNA, 879 bp, Morganella morganii
atgcaattttcattaggttcagtcctctattactggccgaaagcaacactggaacagttttatcagcaggcaatgcaaagcagtgcggatattatttatctcggcgaaaccgtgtgcagcaagcgccgggaaatgaaaccggatgactggataaatctcgctaaaacagttgccggaagcggcaagcaggtggttatctccacgctggcactgttacaggccccgtccgagctgaaagagatcgccaaactggtggataacggcgaatttatgatcgaagcccatgatttcggtgtgattaatatgctgcacgagcgcgggctgccgtttgtcgccggacacggcctgaactgttataacgccccggcgctgaaaattctgcaaaaacaggggatgacacgctggtgcatgccggtggagctgtcccgtgactggctggtgaacctgctgaagcaatgtgaagagctggggatccgcgacaaatttgaagtggaagtgatgagctacggccatctgccgctggcctattccgcccgctgcttcaccgcccgttcggaaaaccgcgccaaagatgactgcgaaacctgctgcatcaactatccgcaggggcgcaaagtcctctcgcaggaaaatcagcaggtctttgtccttaacgggatccagacccagagcggttactgctataacctcggcaatgatctgcgttccatgcatggactggtggatatcgtgcggatctccccggatgcaccggacgatctggcggtcattgaccatttccgtcagaatgaaaccggcgcacagccgctcgatctggcacaggcacaaaactgcaacggctactggcgtaaagtggcgggcctggaactggtggaataa

SEQ ID NO: 276625 - DNA, 996 bp, Morganella morganii
atggaactattgtgtcctgccggtaatttacccgcactgaaagccgccattgataatggcgcagatgcggtttatatcggcctgaaggatgatactaatgcccgtcacttcgccggtctgaattttactgaaaagaaactcgccgaggcggtggattatgttcacagccaccggcgtcacctgcatatcgcgattaacacttttgcccatccggacggtttcagccgctggcagcgggcggtggatatggccgcccaactgggggcggacgccctgatcctagcggatatcgccatgctggaatatgctgcggagcgttatccgcacattgagcgtcatgtctctgtacaggcatccgctaccaataccgaagctatccgtttctatcagcgcaactttgatgtgcaccgtattgtgctgccgcgtgtgctctctatccatcaggtaaaacagctggcacgcaccagcccggtgccgctggaagtctttgctttcggcagcctgtgcattatggcggaaggccgctgctacctctcctcctacctgaccggggaatccccgaataccgtcggtgcctgctctccggcacggtttgtccgctggcaggagaccccgcaggggctggaatcacgcctgaatgatgtgctgattgaccgctacggcgcggatgagaacgccggttacccgacactctgcaaaggccgttactgcgtggacagcaagccttaccatgccctggaagagccgaccagcctcaacaccctggaattgctgccggaactgatggcggcgaatatcgcctcagtgaaaattgaaggccgccagcgcagcccggcctatgtgactgatgtggcgaaagtatggcgtcaggcgattgaccgctgcaaagccgatccggacaactatacgccggatgccgcgtggatgcagaccctcggcggcatgtcagaaggacgccagaccacactcggtgcctatcaccgcaaatggcagtaa

SEQ ID NO: 276626 - DNA, 522 bp, Morganella morganii
gtgtttgccaaaattcgttcctcgctcgtacacaacgggccggcgttattgcggttcccgctgaaattaacgccgtttaccctgcaaaaacaggttcttcagcaggttctggcgcgtcagtttgaagaggcgctgacagaaggtgatctcgattttctggaaaataaatggctgaaggtggaagtccgtgacctggcgcttcactggtatatcagtaaccgtgacggccgtctggtggtcagtgcggatgaacaggaggatgtcagcttcagcggtaatgctaatgatctggtgctgatcgcggcccgcaaagaggacccggataccctgttcttccagcgccgtctgcgtattgaaggggataccgagctgggtctgtatgtcaaaaacctgatggactcgattgacctcgacggtatgccgccgctgctgcgcagcgcattaatgcagctggctgagtttattcaggccgggctggcggaagacggggataaatcgcaggcagtggtgacctcatgctga

SEQ ID NO: 276627 - DNA, 507 bp, Morganella morganii
atgctgatccgcacagaaattccggttgatgccgccggtatcgatgcactgctgcgcagcgcattcgggcgtgacaacgaagccgatcttctgcatgcactgcgggaagacggtctgctgaccctgggtgtggttgccactgatgatgaaggtcaggtggtcggttacgccggtttcacgcccgtggatgtggaaggcgaggattgtcagtgggtcggactggcaccgcttgcggtggcagaggcttaccggggtcagggcattgcgaagcagatggtttatgaggggctggacagcctcaatgagttcggttacggcgcggttgtggtgctgggcgatcctgagatctacggtaagtggggttttaaaccggcagcagagtttgatctgcactgcaaatggccggataccgcaccgtatttcctgatctatccgctggaaaatgatgccgcagaccgttatcacgggctggttaatttctcacatcattttgacagctgtgaataa

SEQ ID NO: 276628 - DNA, 321 bp, Morganella morganii
atgacgatatcatcagacaaaaacacgtggtttctttacataatcaggacagaatccggatatctttacacaggaatcacccgtgatgtcgcacagcgcgttgcgacacatcagtccggaaagggtgcgaaatatctgcgggggaaaacagggctgcatgtggtatatcaggccgctctggcggatcgctcaatcgcatcaaaagaagaataccgggtcaagcaactgacaaaacaaaaaaaagaaaggctggtcagtgaccaaccctccgatttgacgacataccttaacggtaatggttattcacagctgtcaaaatga

SEQ ID NO: 276629 - DNA, 252 bp, Morganella morganii
atgaaaatttctgcaatcatccctgcttttttagcgttaagtgctgtttcatttggttcttttgctgcaactgaagttcagcatagcacacaggcacctgtcggtgttgtttctgtcagtgacgttgataccctggctgacgtgactgctgctttatccaaaaaagctgatgaagctggtgcaacttctttccgtatcacctctgccggtggtgaaaacctgatgggcggtacagcagaactctataaataa

SEQ ID NO: 276630 - DNA, 444 bp, Morganella morganii
atggaattaccgcacgattcaatcctgtcttatctgaagaaaaatcatgtcgttacgctgtgtgccactgccggtgatgacctgtggtgcgcttcctgcttttatgtcgcggacaccggcgcaatgatgctttatttccttactgaacctcatacccggcacggcaccctgatgcagcagaacccgctggtggcgggaaccatttccgcacagacggttaccgtggcaaaaatccgcgggatccagttcagaggtgaggtgacagcgttgtcagcggaagaggaaaaacaggcgagagccgtttactgccgccgctttccggtggctgtcgccgccaaaaccccgttgtgggggttgcggctggatgagataaagatggtgaataatacgctggggttcggaaagaaactgcactggtcgcggttcagcgcagatagtgaataa

SEQ ID NO: 276631 - DNA, 468 bp, Morganella morganii
gtgaattatcatcagtattaccccgttgacgtggtcaacgggccgggtacacgctgcaccctgtttgtttccggctgtgttcatcagtgccgcggctgctataaccagagcacctggcgcactgattccggtgtgccgtacacccgggaactggaagatacgattatcgccgacctctgtgatacccgcgtaaaacgtcaggggatcacactgtccggcggtgatccgctgcatccgcacaatgtgccggagattctggcactggtgcagcgcatccgccgcgagtgcccgccggaaaaagatatctggatgtggacaggttataaactggatgaactgaatgatgcccagcgggaagtcactgagtatatcaatgtgttagtcgacgggaaatttgtgcaggatctgcatgacccgatgctgatctggcgcggcagtgcaaatcaggttattcactatctgcgctga

SEQ ID NO: 276632 - DNA, 2187 bp, Morganella morganii
atgacaggttttgccctgtggataaccaaactgccggagagaagcaaagtgcacactatcgtgattaagcgtgatggatgtcaggtaaattttgatgaatcacgcatccgggatgccattaaaagagccgccaaagccgcacgtgttaatgatgatgactactgctctcaggttgcctcccgggtagcctccctgctgggtgaccggaaaaaggtcgatatcggtgagatccaggacgctgtcgaaaaccagttaatgtccggtgattacaaagagttagccagaacctacatcgaataccgtcatgaccgtgacgtggcgcgtgaactgcgcggccgcctgaataacgagatccgcggactggttgaacagagtgatatgtccattctcaacgagaatgccaataaagacagcaaggtgatcccgacacagcgtgacctgctggcgggtatcgttgctaagcactacgcaaaacagcacattttaccgcgtgatgttgtaatttcgcacgaacgcggcgaaattcactatcacgatctggactacgcgccgttcttcccgatgtttaactgtatgctgatcgatttaaaaggcatgctgactcatggctttaaaatgggtaatgccgagatagaacagcctaagtccatctccaccgcaacggcggtaacagcacagattattgcccaggtggccagccatatttacggcggtaccaccattaaccgtatcgacgaaattctcgccccgtttgtcacggccagctataacaaacatctgaaaactgcaaaagaatggcagattccggatgcggaaggctacgccaatgcccgtacagaaaaagagtgttacgacgccttccagtcactggaatatgaagtcaacacactgcacaccgccaacgggcagacaccgtttgtcaccttcggcttcgggctgggcacctcaaaagaatcccgcatgatccagcaggcaattttacgtaaccgcattgccggtctgggtaaaaatcacaaaacagcggtattcccgaaactggttttcgccattaaaaaaggtctgaaccaccagtacggcgatccgaactatgacatcaaacagctcgcattagagtgcgccagcaagcggatgtatccggatatcctgaactacgaccaggtagtgaaagtgaccggctcctttaaaaccccgatgggctgccgcagcttcctcggtgtctatgaagagaacggtgaaatgatccacgacgggcgtaacaacctcggggttatcagtctgaacctgccacgcattgccattgaatcacagggcagtgaagcggatttctggtcactgctggatgagcgtctggtgcttgccaaaaaagccctgatgacccgtatcgcacggctggaaaatgtcaaagcccgtgtcgcgccgatcctgtatatggaaggtgcctgcggcgtgcgtctgaaagcggatgactccgtcaccgaaatctttaaaaacggccgcgcctcgatttcactgggttacatcggcatccatgaaactatcaatgccctgaccggcactgaaacgcacatgtatgacgacgaacagcgccgcgccctcggtgtcgccatcgtggaacgtctgcgtcgtgcaaccgacgaatggaaaaccgaaaccggctacggtttcagcctctacagcaccccgagtgaaaacctgtgtgaccgtttctgccgcctggataccgccgagttcggcattatcccgggtgtgactgacaaaggctactacaccaacagcttccacctggatgtggagaagaaggtcaatccgtacgataaactggatttcgaagcaccgtatccgccgctggcgaacggcggtttcatctgctacggcgaatacccgaacctccagcacaacctgaaagcactggaagatgtctgggattacagctacgaccgcgttccgtactacggaaccaacacaccgattgatgagtgttatgaatgcgggtttgccggtgaatttaactgtaccagcaaaggctttgtctgcccgaaatgcggcaaccacgatgcttcccgcgtctctgtcatccgccgtgtgtgcggttacctcggcagcccggatgcccgtccgtttaatgccgggaagcaggaagaagtgaaacgccgtgttaagcacctgaataacggacaattaggctga

SEQ ID NO: 276633 - DNA, 1200 bp, Morganella morganii
atgttcagctcttatcgcgtcatctttcagcatcccggcaccaaagccttttcaggggcgggatttatcgcgcggatgaccgtctccatgatggggattgggatcattactatgattgcccaattgcgtgattctttctttatggccggggtgactgcggctgtttataccttttcggcggcattctgcgccccgctgatcgcccggctggtggatcgctacggacagagccggatcctgccgaaaacgctggtgatcagtgttcctgcgactgccgccctgctgttatgtacggtttatgatgctcctgactgggcaatctggctgtctgctatttttgtcggggcgatcccgagcatgcctgccatgatccgctcccgctggacacatatctacaaaggtgacccgcgtttacagaccgcctactcctttgagtcggtgctggatgaaatcagctttattatcgggccgccgctgtcagtcacgctctgtatcgcgctgttcccgcaggccggtccgctggcggcaattatttttctggtaatcggtaccgcgctggtggtctgccagaaacgaactgaaccgccggtgcacaaacgcgacgggctggcaaaaggcaccgtgctgcgcctgcctgcgattcagctgctgatggtggtactgctcgcgctcggggtgattgtcgggacggtggatgtactggctgtcgctttcgccaatgcacaggggtatccggagggggccagctacgttctgtctgtctatgctgccggttcctgtatcgccgggtttatcttcggtgctatccggctgccgttcagctacacaaaacagttcgtctttaccgccgccgccacactgctgaccaccctgccgctgctgctggtcaccaacctgaccgggctggggctgaccatgtttgtcgccggtttcttcttctcaccgaccatgatcctcgctatcggctttgtcgagcgtgaagcaccgcctaatatgctgacagaaggctttacctggctcatcaccgggctggcggtcggtgtggcactcggctctgccggagtcggtatgatcattgatacttacggcattgatgccgggttcctgctggctatcgctgcggggatctgcgtactgctcaccgcctgcatcggttatgttttcgtcttcaaagacgataaaaacagcgctgataagtga

SEQ ID NO: 276634 - DNA, 588 bp, Morganella morganii
atgagccacaagccacgtgcagagatgatagaagaaacgcggaccaagcttatccgtgctgcacgccagcagtttggtaaggccgggtacgccgcgactgtgatggatgatctgacggctcaggcgggtctcacccggggggcgctgtatcatcactttggtgataaaaaagggctgtttctggcggtgctgcaggatctggatcgtgaactcgatgtgcgcctggataccgcagaaaaagatgaagctgatgagtggtccgcttttaaattccgctgtcagggctatctggcaatgagtctggagccggaagttcagcggattatgttccgtgatgcggcctcggtactggatttttccattctcaaatcccacgaactggcctgtgtgcaggggatcacccggcgtctgacacacctgatggaaaccggatggataaaacaggtggcaccggatgtgctggcactgtttattaatggcgggctgtatgaatgtgcgatgtggattgtgcacagtgatgatccgcaggccacttatgaaaaggtcagagtctcttttgatcagcttctggaaaatttacgggtataa

SEQ ID NO: 276635 - DNA, 387 bp, Morganella morganii
atgactaaagtaatcgcaacagaaaacgcaccagcagcaatcggcccgtatgtacaggcagtagacctgggtaacatggtaatgacttcaggtcagatccctgttgatccgaaaacaggtgcagttgctgacgatgttaaagctcaggcacgccagtcactgaacaacatcaaagctatcatcgaacaggctggtctgaaagttacggatatcgtgaaaacaactgttttcgttaaagatctgaacgactttgctactgtgaacgcagaatacgctgctttctttgatgagcacaaagcagtataccctgcacgttcttgcgttgaagttgcgcgtctgccaaaagacgttaaattagaaatcgaagcaatcgcagtccgtaaataa

SEQ ID NO: 276636 - DNA, 465 bp, Morganella morganii
atgactcaggatcataaattactggttgaagccatcaaatgcggcaccgttatcgaccatatcccggcaaatgtgggatttaaactgctctcctttttccgcctgactgagacggacagccgtattactatcgggctgaacctgccttccaacaatatgggccgtaaggatttgattaaactggaagataccttcctgacaccggagcaggccaaccagctcggtttttatgctcctaaagccacaattaatattatcgaagattatcaggtggttaaaaaactgccgattaacctgccggaacgcattgaaggggtgattgtctgcccgaacggcaactgcatcagtcacaatgagccggtggaaagcagctttactgttaagtccattgcacaggaaattgtgttaatctgtaagtactgtgagaaagaatttgatcaccacgcaatcattaataaccaataa

SEQ ID NO: 276637 - DNA, 936 bp, Morganella morganii
atggcaaatccgttatacctgcgcgatatcatctcgattaacgatctcagtcgtgatgagctggaactggtattaaacactgccgcggcgctgaaacaacgccctcagcctgaattactgaagcaaaaggtgatcgccagctgcttcttcgaggcctcaacccgcacgcggctctcttttgaaaccgccattcagcgcctgggcgcgtctgttgtcggtttttcagacagcagcaacacctcgctgggcaaaaaaggcgaaaccctggcggacaccatgagcgtgatcagtcagtacgcggatgccatcgtgatgcgccacccgcaggaaggggcagcgcgactggtgtctgagttttccggtaaggtgccggtgatcaacgccggtgacggtgcgaaccagcatccgacacaaaccctgctcgacctgtttaccattcaggaaacccagggtcgcctggaaaacctgcatatcgccatggtcggtgacctgaaatacggccgcactgtacattcactgtcacaggcactgtcaaaattcagcggcaaccacctgcattttattgccccgcaggcactggcaatgccgaatcacattctgcatatgctggatgaaaacggcgtggcgtacagcgaacatcattctattgatgaggtacttccgcagctggatgtgctgtatatgacccgcgtgcagaaagagcgcctcgacccgtcggaatacgccaatgtcaaagctcagtttgtgctgcgtgcggctgatctggccaatgtgaagacgaacctgaaagtgctgcacccgctgccgcgcatcgatgagataaccccggatgtggataaaacgccttacgcgtactacttccagcaggccggtaacgggatctttgcccgtcaggcactgttatctctggtgttaaacgaaactttcccggcttaa

SEQ ID NO: 276638 - DNA, 1014 bp, Morganella morganii
atgaacccattttatcaacagtcatttttgcggttgcttgactataaacctgccgacatcgaagaactgctcaatctttctgcttatctgaaacatgccaaaaaaaccggctcggaacagccgctgatgaaaggcaaaaatattgcgctgatttttgaaaaagactccacccggacccgctgtgcctttgaagtgggtgcttacgatcagggcgcacaggtgacatacctgggctcatccggcagccagataggccataaagagtcgatcaaggataccgccagagtactgggccggatgtatgacggcatacagtttcgcggctattcccagaaatccgccgaagcgctggcgcaatattccggtgttccggtctggaacgggctgactgatgagtttcatccgacacagctgattgcggatttactgaccattcaggaacatgtgaaaaaaccgctgtccgaagtgaaatttgcatatttaggcgatgcccgtaataacatgggcaataccatcgctgaaatggctgccgtaaccgggatggatgtccgcctggtcgcgccggccgggtgtcagccatcagaagcccttatcgcgcagtgccgcaaagccgctgaacttaccggcggtaaaatcaccctgaccgccgatgtggcagagggcgtgaaagatgcggatgtgctgtacaccgatgtgtgggtctccatgggcgaagcgaaagaagtctgggcagagcggattaaactgctgacgccgtatcaggtgaatcaggatgtggtggataaaacgggcaatccggatgttatctttatgcactgcctgccggcgtttcacgatacggaaaccaccatggggcaatccctcgcggaagagtatggttttacccgtggtattgaggtcaccaacgatgtgtttgaatcaaaacacagtgtggtatttgaccaggcagaaaaccggctgcactccatcaaagcagtgatggttgcatctctttcaaaaaacatacaattttag

SEQ ID NO: 276639 - DNA, 411 bp, Morganella morganii
atgtcagaattagatgcgtttttagaagaacagcgcgaagaaacccgtgcgattattgcagaactgctggaagacggcagcgatcctgatgcgcaatacaccattgaacaccatttttcgagtgagaattacgataagctggaaaaagcggcagttgaagctttcaaactgggttatgaagtgacagatgccgaggagctggaagtggaaggcggccaggtggtgttatgttgcgatatcatcagtgaatgcgggctgacggcggaacatatcgatgctcaggtagagcagctggcgcgtctggcagaaaaaatggatgtggattacgacggctggggcacctatttcgaagacccggatgccgaagatgaagatgatgacgacgatgctgatgaggcgccgttacactaa

SEQ ID NO: 276640 - DNA, 333 bp, Morganella morganii
atgatcactattattcagggaatgcatgacctgctgtataccgctgcaccacggcagacaccggccagagagccgatctgccgcgatgagcagaccgaaatacagcagcagggccggcagggagagagtcgcagcccgcaactcagaacacagcaaggcccggtactttatcagaccattgaggcgatgaaagaggcggaagatgatatcaatattcaggatattgaatttttgggctgtgcaccgctgcgtccggtgatacgcgacagtcagagcgacctgcggcgtgaacgcgctgccccgctgaagccccgcttttccgtcaccgcctga

SEQ ID NO: 276641 - DNA, 510 bp, Morganella morganii
atgacaagcagcacaacagaaaactacaccctccgtctgatccgtccggaagataaccccggtatcgcacaggttatccgtgaagtctctgccgaacacggcctgaccgcagacaaaggctttgcggtcgctgacccgattcttgattcgttatacgaggtttacagccagccgcgtgctgcatactgggtcattgagatggatggggagatcctcggcggcggcggcgtttccggccttgccggtggtgacgggaaaaccgctgaattacagaaaatgtatatctcttcccgcctgcgcggcaaaggtctggcgaaaaaaatcgcccttcaggcgctggaatttgccgaagcggaaggttacagccagtgctacctggaaaccaccgcagatcttcaggccgccattaagctgtatgaaaaactcgggtttatcttccttgatgccccgctgggtgacaccggccacagcgactgtgaagtccggatgctgaaagtctttactgcctga

SEQ ID NO: 276642 - DNA, 2898 bp, Morganella morganii
atggaaaagacaaccgacaaccaacagacctgcgagccgtccctggataaaacctataatccaacggaaatcgaaggtcctctttatacccactgggaaaaaagcggctatttcaaaccaaacggcagaacagacaaagaaagcttctgtatcgtgatcccgccgccgaacgtcaccggtaacctgcatatgggccatgctttccagcagaccattatggataccatgatccgctaccagcgcatgcagggtaaaaacaccctgtggcagtcagggactgaccacgccggtatcgcgacacagatggttgttgagcgcaaaatcgccgcagaagaaggcaaaacccgccacgattacggccgtgaaggctttatcgataaaatctgggaatggaaagcggaatccggcggtaatatctccaaccagatgcgccgtctgggtaactccgtggactgggagcgcgagcgcttcaccatggacgacggcctgtcagctgccgtaaaagaggcgtttgtccgcctgtataaagataacctgatttaccgtggtaaacgtctggtgaactgggatccgaaactgcacaccgcaatttctgacctggaagtggaaaaccgtgatgtcaaaggtttcatgtggcatatccgttatccgctggcggacggcgcgaaaaccgcagacggtaaagattacctggtggtcgccaccacgcgtccggaaaccatgctcggtgataccggcgtggccgttaacccggaagatccgcgttacaaagatctgatcggcaaagaaatcattctgccgatcgtcaaccgccgcattccgatcctcggtgatgaacacgcggatatggaaaaaggcaccggttgtgtgaaaatcaccccggcacatgacttcaacgactatgaagtcggtaaacgccaccagctgaccatgattaacatcatggacttcgacggcaacatccgtaccgaagccgaagtgtttgataccaacggcgaagtgactgacgcctgcagcagtgaaatcccggccgcataccgtggcatggagcgtttcgctgcccgtaaagcgatcgtcaaagagttcgaagagctcggcctgctggaagagatcaaaccgcacgacctgaccgtaccttacggcgatcgcggcggcgtggttatcgagccgatgctgaccgaccagtggtatgtgcgcactgccccgctggcaaaagaagccatcaaagcggtggaagacggtgatattcagttcgtgccgaagcagtacgaaaacatgtacttctcctggatgcgtgatattcaggactggtgtatctcccgtcagctgtggtggggtcaccgtatcccggcctggtatgacaatcagggtaacgtgtatgtcggccgcgacgaagacgaagtccgccgcgaaaacaatatcccggcaatggttgaactgcgccaggacgaagacgtgctggatacctggttctcctccggtctgtggacattctccaccctgggctggccggaaaataccccggaactgaaagcattccacccgaccagcgtgctggtcagcggcttcgacatcattttcttctggatcgcccgcatgatcatgatgaccatgcacttcatcaaagatgaaaacggcaaatcgcagatcccgttcaaaaccatctacatgacgggcctgatccgtgatgaggaaggtcagaagatgtcgaaatccaaagggaacgtcattgacccgctggatatgatcgacggtatctctctgcctgaactgctggaaaaacgcaccggtaatatgatgcagccgcagatggcggagaaaatcgccaaacggactgaaaaacagttcccggaagggattgaagcccacggtaccgatgccctgcgctttaccctggcggcgctggcctctaccggccgcgatatcaactgggatatgaaacgtctgtccggctaccgcaacttctgtaacaagctgtggaacgccagccgtttcgtgctgatgaataccgaagagaaagactgcggtcagaacggcggtgagatggaattctccctggccgaccgctggatactcgcagaatacaacaataccgtgaaagcataccgcgaagcgctggatacttaccgctttgatattgcatccaatattctgtatgaattcacctggaaccaattctgtgactggtatcttgagctgtccaaaccggccgttcataaagggaccgatgcacagaaacgtgcggcgcgtcataccctgatcaccgtgctggaatccctgctgcgtctcgcacacccgattattccgtttatcacggaaactatctggcagcgcgtgaaagttgtcaccggcgcggaaggcgataccatcatgctgcagccgttcccggaatatgatgcctctctgaacgacgaacaggcactgcgtgacctggagtggatcaaagagacaatcgttgcggtacgtaatattcgtgctgaaatgaatatcgcaccaagcaagccgctggaagtgatgctgcgcggggcaagtgctgatgcacagcgccgtgttgcggaaaacagcaacttcctgaaagcaatggcgcgtctggaatccgtccgtgtgatgaccgaaggcgaaatcgcaccggtttgtgtgaccaagctggtggaaggcgcagaaatcctgatcccgatggctgatcttatcaataaagacgacgaactggcgcgtctggataaagagctggaaaaaacggagaaagagatcgcggctatcgaaggcaaactggcgaatgacggctttgtcagccgtgcgccggaagccgttgtggccaaagagcgcgagcgtcttgcggcaaaccgcgaagcgaaagaaaaactgattgctcagaaagcgacgatcgctgcattgtga

SEQ ID NO: 276643 - DNA, 450 bp, Morganella morganii
atgaaaaacgccaccttctacctgatggaacagccatccccttttgatgaccttgaggcccacgagtggctgacctgtcatctggcgggtgaagcctggcgcagcgggaaacgggtgcttatcgcctgtgagtcacaacagcaggcggagaaactggacgaagccctctgggcgcgggagcccgatgcctttgttccgcataatctggccggagaaggcccgcgttacggcgcaccggttgaactgtgctggccgcagaaacgcggaaattccccgcgtgatttgctgatagccctgctgccgcagttcacagattttgcgacaaccttccgtgaagtgatagactttgtgcctatcgatgaacacttaaaacagttggcgcgcgagcgatataaaatctatcgcagcgtcggctttacgatgaccatggccacgccgccagcttactga

SEQ ID NO: 276644 - DNA, 1512 bp, Morganella morganii
atggagtttagtgtaaaaagcggcagcccggaaaagcagcgcagtgcttgtattgtggtcggggttttcgaaccgcgtcgtctgtctcctgtggtggagcagctcgataaaatcagcgacggctacatcagtgctctgctgcgccgcggcgagctggagggcaaggtcgggcagtctctgcttctgcaccatgtccctaatgtcctgtccgagcgtatcctgttaatcggctgcgggaaagaacgtgaactggatgaacgccagtacaaacagattatccggacgaccatcaataccctgaatgaaaccgggtcaatggaagccgtctgttttctgaccgagttacatgtcaaaggccgcaataactactggaaagtccggcaggcggttgaaacagccaaagaatctctctatgtctttgatcagctgaagagtaacaaaaccgaattacgccgtccgctgcgcaagctggtcttcaatgtaccgacccgccgcgaactgccgaccggcgagaaagctatcagccacggtctggcgattgccgccggtatcaaagctgcgaaagatctggccaatatgccgccgaacatctgtaatgccgcttatctggcatctcaggcacgtcagctggcagacagcaactctccggtgctcagtacccgtgtcatcggcgaagagcaaatgaaagagctgggcatgctggcgtatctggccgtcggccaggggtcacgcaatgaatccctgatgtcggtgattgaatataaaggtaatccggatccggaagcacgtccgatcgtgttagtcggcaaaggcctgacctttgactccggcggtatttccatcaaaccggctgacagcatggatgagatgaaatacgacatgtgcggcgcggcaaccgtttacggcgtgatgcgcgtggtggctgagctgggtctgccgctcaatgtgatcgggattctcgcgggctgtgaaaacatgccgggcggcaatgcctatcgtcccggggatatcctcaccaccatgtccggccagacggtggaagtgctcaataccgatgcggaaggccgcctggtactgtgtgacaccctgacctacgccgagcgttttgatccggaaaccgtgatcgacatcgccacactgaccggtgcctgcatggttgcactcggtaaccacttcagcggcctgatggcaaaccacaatccgctggcacacgagttactgaatgcctctgaacaggcgggtgaccgcgcatggcgtctgccgctggcagaagagttctacgagcagatcgagtccaattttgcggatctggcaaacaccggcggccgtctcggcggcgctatcaccgcgggctgcttcctgtcccgttttgccacccgttataactgggcgcatctggatatcgccggaaccgcatggcgctccggaaaaaacaaaggtgcgacaggtcgtccggttgcactgctgtcacaattcctgttaaatcgtgcgggtatcagcaccgacgactga

SEQ ID NO: 276645 - DNA, 1104 bp, Morganella morganii
gtgatcattattagatatctggtaagagaaacattaaaagcacagattgcgattctgtttatcctgttgcttatcttcttttgtcaaaaattggttgaagtcctgggtgccgccgttgaaggcagcatcccggccggactcgtcgtgtcactgctggggctgggtatcccggagatggcgcagctcattctgccgctgagtctcttcctcgggttgctgatgacctacagcaagctctataccgaaagcgaaatcaccgtgatgcatgcctgtggtctgggtaataatgtgctggtgaaagccgctatgatcctggcgttctttaccgctgttgtggctgctgtcaacgtggtctggctgatgccgtggtcatcccagtatcaggaaaaggtcctggaggaagtcagagctaaccctggtgtgaccgcgatggtcggcgggcagtttaaagtctctgatgacggcagtatggtgctctatctcggggatgttgacggcaataagttcagtaatgtctttattgcccagctctgggcgagaaacgaacagcgtccgtccattgtggtggcggacggcggtcatatgaccgaaaaagagaacggtaatcaggtggtgatactggataaaggcacccgttatgagggaaccgcatatctgcgtgatttccgtatcacggattttaccgattatcaggcgattgttgatcaccgtgatgcaaaaaccggtgacagtaactaccagcagatgacgctgtctgaactgtggaaagagacagataaaggtgcccgcgcggaattccactggcgtctgactctgattttctccgtggtggtgatggcgctgatggtagtaccgctctccgaggtaaacccgcgtcaggggcgcgtactgagtatgctgccggcgatgctgctgtatctgattttcttcctgctgcaaagctcgctgcgttcaagcggcgagaagggcaagctggatccgatggtctggccgtgggtggttaatctcagttatctggctctcgcggtggtactgaatctgtggaataccacagccgtccgccgtctgcgctttggctctgcccgtgttcagggggttgcctga

SEQ ID NO: 276646 - DNA, 1083 bp, Morganella morganii
atgtttaaagtacttgttcttgaccgctacatcgggcggacgattctgcaatccatcatgatgaccctgtttatgctggtgtcattatccgggattatcaaatttgtcgatcagctgcgcagagtcggccagggggaatactccacctgggatgccgggctgtataccatcatgagtatcccgaaggatattcagattttcttcccgatggcagcactgctcggggcactgatgggactgggcgcactggcgacccgcagtgagctggtggtcatgcaggcttccggttacagccgcctccaggtggcgggttcggtgatgaaaaccgctatccctctggtgatcctgaccatgattgtcggtgaatggctcgcgccgtccggtgagcagtgggcacgtaactaccgtgcacagaaaacaagcggcgcgtctctgctggcaaccaaccgtggtatgtgggccaaagacggcagtgattttatctatatccagcgcgttgacagcgaaacccagcttaagggcatcacactgtaccggatgaacgacgaccacaaactgaaatccatcctcagtgcggcggcggcggattacaattctgattctgatacctggacactgagtcaggtgcaggagtccattctgcaggatacctatgtgattgccggtgagcagaaactgtcgatgacctggcagacgcagatgactccggaaaaactgagtgtggccgcactggacccggaagcattgtcaataagcgggctgtatcagtatgttgattacttacagcagagcgggcaggattcgggacgttatcagctgaacctgtggaaaaaagtattcgcaccgctttctgtggcagtcatgatgctgatggcgctgtcgtttatcttcgggccgctgcgttcggtagcgatgggcgtgcgggttgtgacggggattgcctgcggattcgtgttctacgtttccaatgagattttcggctctctcagcctgacctacaagttcccgccgttgctgggtgcactgctgccgagcctgctgttcctggcgatcagtttatatatgctgatcaaacgtaagtaa

SEQ ID NO: 276647 - DNA, 1587 bp, Morganella morganii
atgtcatccgcaaagaaaaacgttgtgattggtgttctcggcacggtactcgaccggcgcggcaagaaagccaaccgctggcataaatggcggccgagtatcgggctgtgtcagcagccggatctgcatattgaccgcttcgagctggtttatcagccgggtgatatgcagaccgcaggccgggtaaaagaggatatagagcaggcctccccgcagactgaagtgatactgcgagaggtggatattgccgacccgtgggattttgagcaggtatataccgcattgctggattttgccactcactacccgtttgatactgaaaatgaagagtatctggtgcatatcaccaccggcacccatgtggtgcagatttgctggttcctgctgaccgaagccagctatctgcccgcgcgtcttatccagactgccccgcgccatgatgcgcgggataaagatcctgccggggtatataccattattgatctcgatctcagccgctatacacagatcaccggacgctttcagaaagaacagcaggcacaggtcgcgtttctgaaatccggcatcgccacacgtaatgccgggtttaataccatgatcgataaaatcgagcgtgttgctctgcgctccgccgcccctgttctgctgaccgggccgaccggtgccgggaaatcattcctggcacggcggatttatgaactgcggcgcagccgccatcaggtaaaagggcgttttgtggaggtcaactgcgccacactgcgcggtgataacgctatgtccgccctgttcggccatgtgaaaggggcatttaccggagcggttcaggcgcgcggcggactgctgaaagaggccgacggcgggatcttgtttctggatgagattgccgagctgggtgccgacgaacaggcaatgctgctgaaagccattgaggataaacgctttttcccttacggctctgatcatgaaacagagagtgatttttccctgatcgccggtacacaccgcaatctggcacagcgggtcagcgaagggctgttccgtgaggatttatacgcccgcatcaatatgtggacctttgccctgccggggctggcgcaacggcgcgaggatattgagccgaacgtggattatgagctggcaaaatacagccgcaaccagcagacccgtgtccgctttgatactgacgccaggcagcactatcttgcctttgcctgttcatcacaagctttgtggcgcggtaattttcgtgaactgagtgcctctgtcacgcggatggcaacctttgcagagaacgggcggatcaccaccgcgctggtgcaggaagaaaccgaacggctgaagaatcagtggcacagcgcggaaacagcggtgacgttgcctgccggggtgagtgaaattgatttatttgatcgtcagcagctggaaacagtaattgccgtctgccgccgttcacagacactttctgatgccgggcgcacactgtttgctgtttcccgtcagcagaagaaacaacccaatgatgccgaccggctgcggaagtatctggcccgttttaatctcagctgggaacagattaccggctgctga

SEQ ID NO: 276648 - DNA, 1227 bp, Morganella morganii
atgataaatcgtgattttaatgaactgattcaggaaaacagcgcgccggtaaagttgtggacaaacggtgtgccggttgatccgaaggcagtgctgcaattgcagaatacagcaaaaatgccctttatttttaaacacctggcggtaatgccggatgtgcatgtcggtaagggatcgactatcggcagtgttatcccgaccaaaggcgcgattatcccggccgctgtcggggtggatatcggctgcggaatgattgcggtgaaaacctcgctgactacgtctgatctgccggacagcctgcaaaatatccgctttgccattgaggcggctgtaccacacggacgaactactgaacgccacggacgggataagggaacctggaaaaatgtcccggatattgttgataaccactggatgcagctggacgagcagttccgccgtatctgtgataaatacccgaaactgcgtaacaccaacaactataaacatctgggaacactgggaaccgggaaccactttattgaactgtgtctggatgaggcggactttgtctgggtgatgctgcacagcgggtcacgcggggtaggtaatgccatcggcaacctgtttatctcgctggcacaaaaagatatgcagacgcacattgccaatctgccggatcgcgacctggcatatttcgaagaaggaagcgtgcattttaacgattatatggaagcagtcggctgggcgcaggattttgcccgtcataaccgtgaagtgatgatgcaccgcgtgctggaagccctgtcccgcgaaattaccaaaccgttcaccacacagcaggaagccgtaaactgccaccataactatgtacagaaagaacagcattttggtgaggaagtgctggtaacacgaaaaggggctgtatcggcacaaaaagggcagatggggatcatcccgggctctatgggggcgaaaagctacattgtgcgcggatgcggaaacgaagaaagcttctgctcgtgcagccacggcgcaggccgcgtgatgagccgtaccgaagcaaaaaaacgcttctcagtagcagaccagcagcgcgccaccgctcatgtggagtgccgtaaggacagcgatgtgattgatgagattccgatggcgtacaaagatattgatgcggtgatgaccgcacagtcatcgctggtggaaattgtgcatacactgcgtcaggtggtgtgtgtgaaggggtaa

SEQ ID NO: 276649 - DNA, 1224 bp, Morganella morganii
atgagtaaattacaccgtcatattgtgcgcctgatgccgttatcgctgctggctattgcgctgtccgcctgttcttcgcagccggagaaacacagtacagcgtctgccgaacgtccgccgcttgactggtctattgttgaaagcaatccggaagcactgaagctggcaccacaactggtcgatgagatcggtgagaagattttctccgaaaccgatgcccgcggtatgtttatggtggtgattgataataacgaagtttttcaccgcagctacggcgagacccgtcccggaaatggtattaagccacggacggattcgctgatccgcattgcgtccgtcagtaagctgatgaccagtgaagtgatggtaaagatggcggatgatggcctggtgaatctcaatgatccgctgcagaaatacagttataaacagtcctccgtgccgtcctataacggcaagccgatccgcctgttccacctggcaagtcataccagtattctgccgcgtgagcagcccggcgggaaatggggtcgtccggtatttacctggccgagccgcgatcagcgctggacctggctgaaaactgccaaactgacggcccagccgggaacagaagctgcgtattccaatctggcctatgatttactggcagatgccctggaaaaagccgggaatcgtccgtataccgagctgttccgccactatgtgacacaaccggcgggtatgaaagatacgacctataatccgtctgccgcgcagtgtaagcggctgatggtcgggtttaaaccgagtgattgttacagcacgctggcggctatcggcagcggcggtgtgtattccaccccggcggatatgcagaagtggatgcagcgcttcctctcttccggcaatacacagcgcaaagcgacagccaccaaagagcagaccatctattttaaacgtgggcacctgaatgagatcaaagggatggatgttgccggtgaggccgatggtctgggtctcggctgggtgtatctggcaccggtcggggatattccggcgatttatcagaaaaccggcggcggcggcggatttaatacctatatggcgatgataccggagaaaaatatcggtgtgttcgtggtgatgacccgcaaagacggcagtaaattcagtccgttaccaaatggtgtcaatgacctggtccgctcactggcagatctgcatacccgtaattacctgtga

SEQ ID NO: 276650 - DNA, 525 bp, Morganella morganii
atgtcgtacttgttgctttattccggccatgacgggcagacaaaaaaaatcattactgaaattgccctgcatttacgaaaagcaggggcggagtgtgatgtccgctctttgcaggataatcagccgctgaatctggcgccgtatgagaaggtgctggtcggggcatctatccgctacggtcactttaaccgggcgctggataaattcgcgaagttgcacgcggtgcagctgaatcagatgaaaaccgcattctttggtgtgaacctgactgcccgtaaaccggaaaaacggacaccagagacaaatgtgtatgtccggaaatttctggccgcgacaccctggaagccgaccgcctgtactgtattcgccggggcattgctgtatccgcgttacggttggtttgaccggatgatgatccgtctgattatgaagatgacaaagggtgagacagataccaccaaagaagtggaatacacggattggcaacaggttgaggcatttgctgcagagtttgttcagatttaa

SEQ ID NO: 276651 - DNA, 1452 bp, Morganella morganii
atgcattttcgcgccataacccgtattgtcgggttacttgtcattattttttctgtcaccatgatcattcccgggattgtggcgcttatctataaagacggtgcaggtaaagcattcagtcagacattcctggcagcactgattatcggcatgctgctctggataccgaaccgcaataaaaaaagtgagttaaaaccgaaagaaggttttctgattgtggtgctgttctggacagtgctgggcagtgtcggggcattaccttttattttttctgagcgcccgaacctgtcggtgacagatgcgttttttgaatcattctccgggttaaccacaacgggtgccaccacactggtcgggctggatacgctgcccaaagcgattttattttaccggcagatgttgcagtggctgggtgggatggggatcattgtattagccgtcgctatcctgccgctgctgggtgtcgggggtatgcagctgtaccgggcggaaatgccggggccgctgaaagataataaaatgcgcccgaggattgcggaaacagcaaaaaccctctggctgatttatgtgttcctcaccatcgtctgtgcaattgctctctggtttgcggggatggatgtttttgatgcgatatcccacagcttttccactatcgctatcggcgggttttccactcatgatgccagtatcggttactttaacagtccggcaattaacaccatcattgccattttcctgctgatctcgggctgtaactatggcctgcactttgcagtactgaccggacgcagcctgggtgtctactggcgtgatctggaattcaggatgtttatttccctccagcttgtgctggtcgtgatctgtgcgttggttttgtggaagtttgatgtctatgctacggagggacaaactctcaaccaggcatttttccaggttgtctcgatggcgacaactgcggggttctccactgacagtttctataaatggccgctgtttctgccgatgctgctgctgtgtgcggcatttgtcggcggatgtgcggggtcaaccggcggtggtctgaaggttatccgcattatgctgctgttccttcagggcgctcgtgaactgaaacgccttgtgcatccgaatgcggtttacaccatcaagctgggccgcagggcattaccggaacgaatcatcgaagctgtctggggattcttctccgcctatgcactggtctttgtggtcagtatgctgttactgatagcgacaggtgttgatgaattttccgctttctctgcgatagccaccacactgaataacctggggccggggctgggaacgctgggggagaactttacaaccctgaatccgggcgggaaatggatccttgtcgtgacgatgttatttggtcgtctggaagtctttactttgctggtattgctgacgccgacgttctggcgtgattaa

SEQ ID NO: 276652 - DNA, 594 bp, Morganella morganii
atgtttactgaagagataaaaaaaagccgtttcatcaccctgttgcagcatacggacggggtggatgaagcaaagcaatttattcagtctgtcaaagatgaatatcccgatgcccggcaccattgctgggcatttgttgcggggcgtccggatgattctcagcaactgggattttctgatgacggtgagccgaccggaacagcaggtaaaccgatgattgcaccgctgctcggcagcggaatcggggaaattacggcggtggttgtccgctatttcggcggaataaaattaggcaccggcgggctggttcgtgcatacggcagcggggttcagcaggcactgaaactgctggtgacgaaaaccaaaatcccgcaggtgatctgtgaaataacctgtgattacagctttatcagccaggcagaattagtggtccggcaggtggatggtacgataatcaacagtgatttcggtgcggatgtgacgttgcgtatttcgattcctgctaccttactgagtgaggttagtgataaattacgtgacctgagccgggggatgtttgagcttaaatgccctgatgacaccaccggaaactga

SEQ ID NO: 276653 - DNA, 1335 bp, Morganella morganii
atggaaaaaatggcatccctctaccgtgagcacatcgcaacattattacagcggacccgagatattcttgcgcgcgagaaactggattcgttactgatccactccggtgaaccgatacgcatttttctcgatgatcgtgattatccctttaaaagtaacgtgcattttaaagcatgggtgccggtaactgatgtaccgcattgctggttgtggactgacggcgtgaacaaaccgaaattatggttctattccccggttgattactggcacagtgttgaggcgttaccttcttcttactggacaaacgatgttgaggttattcatctgaagaatgccggtgacattgcttccatgctggcatcacaggataaaacccgcactgcgtatatcgggccgaataccgatcgcgccgcagcgctggggatcagcagcaatcatattaacccgaaagcggtgctggatttctttgcgtttcatcgttcatataaaacagattatgaactggcctgcatgcgtgaagcacaaaaaatggcggttaacgggcatcttgccgcacatgaggcttttttatccggcctgagtgaattcgatatcaatatggcgtacctgatggcaaccggtcatcgtgatactgatgtgccttatgacaacattgttgctattaatgaaaacgccgctgttctgcactacaccaaactgaataaaaacgcaccgcatacacggcacagcttcctgatcgatgccggtgcggaattcaatggttatgccgcagatttaacccggacgtatgctgctgatgctgacagcgatttcgcacagctggtctctgatctgaatgatgaacagcagtcactgatcagtaatattaaagccggggtccgctataccgattaccatattcagatgcatcaccgcatcgcgaaactgctgaaaaaacataaaataatcaccggaatgtctgaggaagcgatggtcagtgaaggggtaaccacaccgttcctgccgcatgggcttggccatccgctgggtcttcaggttcatgatgctgccgggtttatgcaggatgatcagggtgagcatctggcagcaccggcaatgtatccgttcctgcgctgcacccgtattctggagccgcgtatggtgctgaccatcgagccggggctgtattttattgagtctctgctggcaccgtggcgtgaaggtaaattcagtcagtactttgactggaaacgtattgaacagtttaaaccttgtggcggtatccgtattgaggataacattattatccatgacaacagtgtggaaaatatgacgcgggatctgaatctgccgtaa

SEQ ID NO: 276654 - DNA, 2178 bp, Morganella morganii
atgctttatcacagtgaatcaattaaggtcagttgggaaaaagaaggaattgcaaaacttgtttttgatgcgcagggagcgataaacaaactggatacccggacaattgcctcactggatgaagccgttgtctgccttgaaaaaataccacagctgaaaggcctgattattacctccgccaaagagagctttattctgggggcggatattaccgaatttctgactctgtttaatgcaccgtcggaacagttgaccgaatggctgaatttcgccaaccggttgtttaaccggattgaagatctgccggtacccactgttgccgcactgcggaaattcacactcggcggtgggtgcgagtgcgcactgacaacagactaccgcctcgccactgacgatctgcgtatcggcctgccggaaaccaaactcgggataatgccgggcttcggtggctcagtccgtctgccccgcctgattggttgcgacaatgcccttgaacttatcacacaggggaaaattgtgactgccggtgaagcgctgaaactctgcctgactgacggcattgtacagcatgatgaattgattaacggttcactgatgctgctggagcaggcgatcagtggccggattaactggcaggctcgacggcagcagaaaaaagcggcgttacagctgcaccctgcagaattacagatgagccttatcacggccaaagcccttgtccggcaaaaggcaggaaaacattacccggcgccgatggcggcagtaaacggaattgaagccggagcggaactcccgcgcgatgaagcactgcgctgcgaaaccgctcattttgtaccactgacccggacactcaccgccggggctctggtttcacttttcctgaatgagcaatatgttaaaggcctcacccgccggcagacagccttacgtgatgcaccggaacaggccgctgttatcggtgccggtattatgggtggcggtattgcttaccagtcagcttacagcggtattccggtatatctgaaagatattcagcccgccgcattacaggccggtattgatgaagccgtaaaattgctggaaaagcagtgtcagtcaggaaaaatgaccgtggttcaggccgcagggatacgcgccgctatccaccctgtccgccatgataatgaactcagtgactgtgatattgtggttgaagcagttgttgaaaacaaagccatcaaacaaaaagtgctggcagatattgaacaacaggtcagtgaacactgcattctgacatcaaacacttcttcgatccctgtcagtgaactggctcaggcgctgaaacgcccgcacaatttttgcggaatgcattttttcaatcccgtacctaaaatgccgctggttgaagtgatccggggggagaaaacctcagacgacacaatcgccgctgtggtgcactacgcccacaaaatgggaaaaacaccggttgtggtgggagattgcccgggattctttatcaaccgggtactgtttccgtatctgaacgccttttctctgctggtctccggcggagcagatgttaaagcggttgaccgcgtgatggaacaggaattcggctggccgatgggaccggcgctgttgctcgatgttgtcggactggatacggctaatcatgtacagcatgtgatggctgagggctatccgggacggatggtcgtcgaagagcacaatgtcatcagtctgtttgccgggctgaaacgactggggcaaaaaagccgtctcgggttttaccgacatactgatgacggcaaaggccgcctgcagaaacagcccgatgaaaagctcgaagaagtgcttgcaccactgggacgcacaccccgtgattttactgcagacgaaattatcgaccgcctgatgattccgatggtgaatgaagttatccgctgctacgaggaaggcattatcagcagcccggcagaagcagacctggcactggtctacggccttggctttccgccattccggggcggtatattccgctatctggacgataccggcacccgtgctttctgtgaaaaagcagagcaatacagcgcacttggtccgctttataccattcctgacagtctgcgggcacatgctgttaataacactccttattatccgcaaccggatagtcaccctgttactgcacagtga

SEQ ID NO: 276655 - DNA, 1167 bp, Morganella morganii
atggaaaaagtcatgataattgatggtctccgcacctcaatgggacgctcaaagaacggtgtattccggcatgtccgtgcggacacactctcagcagaagtgatgagcgcagtgataaagcgtaacaatatcaatgcagctgatattgatgacattatctgggggtgtgtgcagcagaccggcgaacaagggtttaacatggcccgtcatgccgccctgctgacagagatcccgcacactgtgccagccgtcactgtgaaccgcctgtgcggttcatcaatgcaggccctgcatgattccgcccgcctgattcagaccggagacggtaaactggcacttgcagggggcgttgaacatatgggtcatatccctatgacacagggtatcgatatcaatccggctgccgcactgcacacagccaaagcgtccagcatgatggggctgacagccgaagcactggcacgacagttttctgtcagccgtgagtcacaggatgaatttgctctgcgttcacatcagcgggccgcacaggcattccgtgataacagattcagccgtgaaatccatccggttcagggacataaccaggccggggtacctgtcattgccacccgggatgaaaccgtacgcgataacggcagtcttgctgaactttcggcattgcgtccggtatttgatccggtcagcggtacagtcaccgctggtaattcctcagcaatttcagatggtgcatccgtaactctgctggccggggagcactatgcgcgtgagtatggtttatctccgcgggcggtgattcgggcgatgagtgttaccggctgtgaaccggcactgatgggatacggcccggtacaggcaacacaggcagttctgaaaaaggccgggctgacgctggcagatattgatgttatcgaactgaacgaagcatttgcggcacaggcactggcctgcctgaaaggtatgggattatctgactgttatgatgacaaagtgaatctgcatggcggcgcgattgcactcgggcatccgctcggctgttccggtacccggatcatcaattcattgctgacggtcatggaacagcgggatgcgcagttcggtctggcaacaatgtgtattggtttcggtcaggggatagcaaccgtgattgaacgtgtccgcggctga

SEQ ID NO: 276656 - DNA, 702 bp, Morganella morganii
atggcaacgttaaactgcaaagttacctctgttgaatctataacggatacggtataccgcataaaattattaccggatggtgatttttcattcaaagccggacaatacctgatggtggtgatggatgaacgggataagcgcccgttctcaatggcatccgcgccgtcatcccggcaggaaattgagctgcacatcggagcatccgaatttaatctttatgcgatggcggtgatggaccggatcctggataaccgccgggtgaccattgatatcccgcacggcaacgcctggttccgggaaaacagtgacgcaccgatgctcctgattgccggaggaaccggtttttcttacacccgttctgttctgctggcggcactggaagaaaatccgcagcgtgatatcacgttttactggggtgccagagagcatgtttatctctatgacctcggtgaattgcaggctctcgccgaaacacacccgaacctgaaaattatccctgttgttgaacagccggatgatacctggcgcgggcgcaccggtactgtgctcagtgcggttctggatgattttggttcattggccggaaaagatatctatattgccggtcgttttgaaatggccaaaattgcccgtgaacgtttctgccaggagcgcggtgctgatgccggccgcctgtttggtgatgcattcgagtttatttaa

SEQ ID NO: 276657 - DNA, 1473 bp, Morganella morganii
atgaaatatcgggacctgagagattttctcaccattctggaaagtcagggcgagcttaaacggatcaaaactgaagtcgatccttacctcgaaatgacggaaattgctgatcgcacactgcgtgctggcggccctgcattgctgtttgaaaatccgaaaggttattcaatgccggtgctctgtaatctgttcggcacaaccaaacgggttgcgatgggaatggggcaggaggatgtcaaagcactgcatgatgtcggtaaactgctggctttcctgaaagaaccggatccgccgaaagggttccgtgatcttatcgataagctgccgaagtttaagcaggttctcaatatgccgaccaaacggctgagctccgcgccgtgtcagacgcatgttttcaccgacgatgacgtggatctgacaaaaatcccggttatgcactgctggccggatgatgcggcaccgctgattacctggggactgaccgtcacccgggggccgtttaaagatcgccagaatttaggtatttaccgccagcaggttctggggaaaaacaaactgattatgcgctggttatcgcatcgcggtggtgcactcgattttcaggaatggtgtcaggcacatccgggggaacgtttcccggttgcagtggctctgggcgctgatcctgcgacaattctcggtgcggtgacgccggttccggataccttgtccgaatacgcctttgccggattactgcgtggtaataagtcagaggtggtgaaatgcatctctaatgacctggaagttcctgccggtgctgaaattatccttgaagggtatattgaaccgggcgaaaccgcaccggaagggccgtacggggaccataccggttattataatgaagtggatgatttccctgtctttacggtcacacatattacccagcgtgatgaacctatctatcattcaacctataccggccgtccgccggatgaaccggcaacactgggtgtggcactcaatgaagtgctggtgccgattctgcagaaacagttccctgaaattgtcgacttttatctgccgccggaagggtgttcataccgtctggccgttgtcaccatgaaaaagcagtatgcgggacatgcaaagcgggtcatgatgggagtctggtcgtatttacggcaatttatgtacactaaatttgtcattgtctgcgatgatgatatcaatgcccgtgactggaatgatgtaatctgggcgatcaccacccggatggatccggcccgggacactgtcatgatggaaaataccccgattgactatctcgactttgcatctccggtatcggggctggggtcgaagatggggctggatgcaacaaataaatggcccggcgaaacctcgcgcgaatggggcaaaccgattgttatgaccgatgaagtcagacagcgtgttgacgccatatgggacgaattaaatattctcgataattga

SEQ ID NO: 276658 - DNA, 726 bp, Morganella morganii
atggacatttttttactcagtaacggcaaactttccggtaacccgcaatggctcagctatgcacaggatcgcatccggacaatgataaaaacccgcgggatccgctctgcagtgctgattgcatatgccgttatccgtgctgatcacgaccagcgtgccagtgaactttccgaagcgctgggcattgatgttacctgcatcgaacattttgattccccggttcaggctgtcgaaaatgcggaatgtattcttgtcagcggcggaaatacctggctgctgaatcagttactgcatgaaaatggcctggttgtgccaatccagcgcgcggttcgtgagcggaatattccgtatatcggctggagtgccgggtgtaacgttgccacgccgagcatccggaccaccaatgatatgccggtacgtaactgtgtggtgatgccgtctctggggctgtttcctgttcagattaaccctcactatattgacgtggtcatcagtggccatatgggtgaaacccgtgatgagcggattgcggaattctgtgccatcaatccggatgagattgttgtggcgctgcgtgaaggcagtggctttcatatcatcggaaatgagctgcactacttcagcggcaaaaatgaaggattcaaactctttcagcacaacaaaacattcccggaacaatttgatacaagcgccctggcagaccgggttccgttccgctgctgctga

SEQ ID NO: 276659 - DNA, 492 bp, Morganella morganii
atgaaggattggtatttattgtactgcaaacgcggacaacttccgcgggcaatggaacatttgcagcggcagcaggtggaatgcctgacaccgatggcgaatattgaaaaagtggttcgcggcaaacgtgtgacggtcaatgagcccctgttcccgaattacctgtttatttcttttgatcccgagactattcatacaaccacgattaactcaacgcgcggcgtcaatcatttcgtccgtttcggaccactgcctgccgttgttcccgcatcattgattgaagagctgaaaaatgccgaatgtgtcagcctgtcagagcaaaatgttccgcagcccggagatattgtggaaatcactgaagggatgtttaaaggcctggaagcgatttatcaggagccggacggcgacacccgctccgtgctgctgctgacgctgatcagtaaagagctgaccaaaaaagtggataacaccagctttatccggaaactctga

SEQ ID NO: 276660 - DNA, 756 bp, Morganella morganii
atggctgttgaagacacgcaaccgctgatcactcatttaatcgaattacgaaaacgcattctcaacagcctgattgcagtctttgttgtgtttgttgcgctggcgtatttctcaaatgatatctatcagctggtatcctcgccgctggtgagcaaactgccgcagggctcgaacatgattgcaacggatgttgcatcaccgttcctggcaccgatcaagctgaccattatggtctccatttttatttcggcaccgtatatcctgtatcaagtctgggcttttattgcaccggcgctgtataagcatgaacgccggttattaatgccgctgctgtttttcagcactgtgctgttttatatggggatggcatttgcgtattttgttgtcttcccgctggcgttcgggttctttacctcgacagcaccgcaggatgtggtcattgcgacagatattaataactatctcagctttgtcatggcgctgtttatggcgtttggtatctccttcgaggtgccgattgccattattctgttgtgctggagcggtgcgacgaccgttgcctcactgaagcagaaacggccgtatattctggtcggggcttttgtggtggggatgctgctgacaccaccggatgtgttctcgcagacgctgctggctatcccgatgtatctgttgtttgaaatcggtgtgttctttgcccgtttctatgtaccgcgcagtaaagcacaaccgcaggatgaagaagccgaagagtaa

SEQ ID NO: 276661 - DNA, 531 bp, Morganella morganii
gtgtttgacatcggttttggtgaactgatcttagtattggttatcggacttgtggttctgggacctgaacgccttccggttgctgtgaaaacagtagccggctggatccgtgtcatgcgttcaatggctgccaatgtgcagaatgagctgacccaggaactcaaacttcaggagttgcaggataacctgaaaaagatggaagagcaggccggtaaagccatttcacctgaattgaaggcgtcgatggatgaactgaaagaagcagcggatacattacgccgctcttatcaggaaccggtggatacgctgaaaaagcagctcgacccggaagcgctggctgaccaggaacttgacatcccgtccgcccgtccggcatcagccggctctccggcggcggaaaatccggctccggcagcaccatccccggttgttgcagaagaaatcccggcccggccatcaccgggaatcagtgacacagaacctgtaccgtcaccggtaactgctgctgcgtcagattcacagaaacattaa

SEQ ID NO: 276662 - DNA, 261 bp, Morganella morganii
atggccggtattaatatttggcaattgttaattattgctgtgattgttgtactcctgttcggaacaaacaagctccgtaccctgggatctgatttaggcgcatccatcaaaggctttaaaaaagccatcggtgatgacgatcagaacaaagcagatacaacaacagccggaaaagatgcggattttgaacaaaaaaatatcgcagaaaagaaagctgattcagctgagcagccagagaataaaaacaaagagcaggtataa

SEQ ID NO: 276663 - DNA, 1638 bp, Morganella morganii
atgagaccgagtgaaataaaacgcctctattttatcatccgcactctcctgaattacgggctggatgaactgatccctaaaaaccgcctgagctgggctatccgcctctggcgacgttcactgttctggatgccgaacaagcataaagataaagtactgggtgagcgtctgcgtctggcgcttcaggaactggggccggtatggataaagttcggtcagatgctttccacccgcagggatctgttcccgccggccattgctgaccaactggcactgttgcaggatcgcgtttcatcatttgacggcaatctggcaaagaaaaccattgaagatgctctggaagggccggtggaaacctggtttgatgattttgatatcacaccgctggcatccgcctcgattgctcaggttcatactgcagttctgaaagaaaacggacaggcggttgtactgaaagtgatccgtccggatattttgccggtgatccaggctgatattcatctgatgtaccggctggcgaacatggttcccctgttaccggacggcagacgtctgcggccgaaagaagtcgtccgcgagtatgaaaaaacactgctggatgagctgaatctgcaacgcgaagcggctaatgccattcagctgcggcgtaattttgaaaacagcccgatgctctatgtgccggaggtttatccggatctctgccgtgaaaatgtgctgatcatggagcgtatctacggcattccggtttctgatattgcggctctgcatgagcagggcacaaacatgaagctgctggccgagcgtggcgtgcaggtcttcttcactcaggttttccgtgacagtttctttcatgcggatatgcatccgggtaatatttttgtcagccgcgagcatccggacgatcctcagtatatcggtatcgactgcggtattgtcggttcactgaataaagaagataagcgctatctcgcggaaaactttattgccttctttaaccgtgattaccgcaaagtggctgaactgcatgtggattccggctgggtgccgccggataccaatgtggaagattttgaatttgctatccgtacggtgtgtgaaccgatttttgaaaaaccgctggcagaaatctctttcggtcatgtgttgctgaacctgtttaataccgcccggcgctttaatatggaagttcagcctcagctggttttattacaaaaaactctgctgtatgttgagggactggggcgccagctctatccgcagctggatctgtggaaaaccgcgaaaccattccttgaatcgtggctgaaaagtcagattggtgtgaaagccgtgatccgcagtatcaaagaaaaagcaccgttctgggcggaaaaactaccggaattaccggaactggtgtatgacagtcttaaacagcagcgtcgtcttcagtccggtgttgagcggctggcagagcagatgaaacagcagcaggctgctcagcggaaagcaaatttctcgctgggtatcggcgcgacattgtttgtctgtgcgagcttattctatctggccggcgcacctgttgccccctgggttctgatgttttttggtatgcttatctgggtaacaggatggtggcaatccggtaaaatgaagtaa

SEQ ID NO: 276664 - DNA, 675 bp, Morganella morganii
atggctgatacgtttgcagaaaatatcccgtctcctgtcagtccgcaggcactttaccctgtggttgccggatttctggaaacggtactcaaccggctgttgtacagtgaaaatgtactgaaaccggcccgcgcccgtctgaccggcaaaacactaacactccggctgacagagccggatatgcagttcacactgatcttcagtgaaaaacagctggatgtgatttcccgctgggaagacccggctgactgtgtactgcaaacccgttttctcacactgctgaaactgaaagacaaacaacagctttccgcacttatccggcagggtgatgtcattattgacggcgatatgcaggtcattcagcacttttcagcactgctggatatggcggaatgggatccggcacattatctggcaccgtataccggtgatattgccgcgcagacactgacacagatcgccgtaaaaggcgggcagtttgtccgtcgtgcggtatgccgccggcaggaatatctgaccggtgcggtcacccgtgagtgggcgcttgctccttccgcgctggaagccgctcatttctgtgatgaagtcgcggatgctgcacaaaccgcagatgaacttgaggtgcgcctcgcccgtctggaaaaaaaagcaggaaccgggtatgagaccgagtga

SEQ ID NO: 276665 - DNA, 756 bp, Morganella morganii
atggaagagcaatcccgggatacaatcgattttggttttcgcactgttaacagaaacgaaaaagcaggtatggtggcaaacgtctttcattctgttgccgcaaaatacgatctgatgaatgacctgatgtctttcggcatccatcgtgtctggaaacgttttactattgatgccagtggtgtccgccgtggtcagcgggtgctggatcttgccgggggaaccggtgatttcactgcaaaattctcccgcatggtcggcgaaaatggtcaggtgatcctcgcggatatcaacgattccatgctgaaaatgggccgggaaaagctgcgtaaccacggggttgtcggcaatgtgaattatgttcaggcgaatgccgaagaactgccgttcccggatgactacttcaactgcatcatcatctctttcgggctgcgtaatgtcaccgataaagacaaagcactccgctctatgttccgtgtgttaaaaccgggcggccgcctgctggtgctggaattctccaaaccggtgattgaaccgctgagtaaagtatatgacgcatattctttccacgtgctgccgcgtatcgggcaggcggttgtgaatgatgcggacagctaccgctatcttgccgaatctatccgtatgcatccggatcaggaaaccctgaaaggcatgatggaaaatgccggatttgagcatgtttcctacaccaatatgaccggcggcattgtggcgctgcataaaggattcaaattctga

SEQ ID NO: 276666 - DNA, 1425 bp, Morganella morganii
gtggatattcagtggctttatggttttatcggcattctgagcggtattctgctgggcggcggtgtggtctggttcagcctgcaacagcggctggcggacaaaaaccggctgttacaggataatattgcgcaactggccctgctggatgaaacccggcgtcaggctgcatactggcagcaggccagggagcagagtgaacagtcactggaaaatgcccgtcatatcagtgcacaacaggaagcggaaatccgtgagctgaccacccggctggaagaaagccgcctggctgctgaagaaaaacagcggttgctgcttaacagtgagcagcggctgaatacccagtttgaaaatctggctgcccgtatttttgaacacagtggccgccggacagatgaactcaaccgccagagtctgtccatgctgctgcgcccgttccgtgaacagctggataactttaaccggcaggtgcaggaaagctacagccaggaaagccgcgaacgtcataccctgacacatgaaattcagcgcctgcagcagctcaatctgcggatggcgcaggaagctgtcaatctcaccaatgccctgaaaggcgacaacaaaatgcagggtaactggggagaaaccattcttgcccgtatcctggaagcctccggcctgcgcgaaggccatgaattcgccacccaggtcagtctgaaaaatgaacaacaaagtcgttatcagcccgatgtggtgatttatctgccgcagaacaagcaggtgattgtggatgccaaagtgtcgctggtggcttatgaacgttatttcaacagcgacactccggaaacccgtcagtcggcactgacggaacacatcaactcagtgcgtcagcatatccgcagtctgagccgcaaagaatatcagaatctcagcgggattaactcactggactatgtactgatgtttatcccggttgaaccggcgtttctggcagcagtcgggcaggaaagtgtattactggacgaagccctcagaagcaatatcatgctggtcagcccgtcaacattgctggtggcgctgcggacaatcgccaatctctggcgttatgaacatcagcatgaaaacagtcaggcaattgcacaacgggcagcgcgtctgtatgacaaactccgcctgtttaccgaggaaatggacggtatcggccaggcgctggataaagcccagagcacgtaccacggggcgatgaaaaaactgaccaccggccggggaaacctgctgtcacaggcagaaagcttccgtgagctgggcgttgaggtaaaacgcccgctggatgaaattctggtgcagaaagcccgtctcagtgaacagcaggacaccactgcggatgaactgccggaggagacggctaatttcgcagaacaacacaatgggcatagggttttgcggtaa

SEQ ID NO: 276667 - DNA, 456 bp, Morganella morganii
gtgctggcattcggtgaatctctcgcatttctttccctgttgtttccggcaacagtaattctgctcggagtcggggcgctgatcggggaaggcgggctgcattttctgcctgtcttcctggctgctgccaccggtggctttttcggcgactggatctcctattacatcggcttctactacaaggacaatgtccgtcatatgtggccgatttcccgctccccgcaaaccctggtcagagggcatcagttctttgaaaaatggggaatatggggtgtctttttcgggcgcttcttcgggccgttccgcgccgtggtaccgctggtggccgggatctgtgcgatgccgcagcgccattttcagctggcgaacctgtcttctgccgtgatctgggcattcggcctgctggcccccggcgcgttcgggctgaaatggatggccgggctgatgggcggatag

SEQ ID NO: 276668 - DNA, 783 bp, Morganella morganii
atgaccagacagccattaccgcatccttccgtactgccgctcgacggcgggatcaatttccgtgacctgggaaacaaagtgctgccggacggcagtaaaatcaaacccggcctgctgttccgtgccggggcgctggatcgcctgagtgacaacgacttaacccggctgacagagcagaatctgtttcagatcctggattaccgcgacagcggcgaaattgctgataaaccggatcgtctgtggaatggcgcgctgtacacgaacgcaccggcaaatccgatgtcaaaggaagtggatgctaaccttgagaagctcggcaatgaggtgctgacggagtttgatccgaaagcctttatgctgcgtctctatgaactgctgccgctgggcaacactgcatatcatgcactcggtgatatgctgcgcaacccggaaaaaggcggcattgtgcagcactgtgcggttggtaaagaccggaccggtgtgggttcggcactggtgctgtttgcactcggcgcggataccgatatggtgatggaagattacctgctgaccaatgacacgctggcaccttaccgccatgaattgctggcggaacacgcgaaaaccatgccggaagcggtggtggagaaattcgcctatgtgtactccgtacagcctgatttcctgaataccgcactgaaaagtattcactcgcattatggcagtattgatacctggctggcgaaagatatcgggctgacaacagcagtccgcgacaaaatccgcaaccatttccttgagtaa

SEQ ID NO: 276669 - DNA, 756 bp, Morganella morganii
atggctgatgtatttcatttaggtttgactaaagcagatttacagggtgcgacgctggctatcgtaccgggcgatccgaaccgggtcgaaaaaattgcccgcctgatggacaatcctgttcatctcgcatctctgcgtgaattcacctcatggcgcggtgaactggacggtaaagcggtaatcgtctgttcaaccggtatcggtggcccgtccacctctatcgcggtggaagaactggcccaactggggatccgcacgttcctgcgtatcggtaccaccggtgcgattcaggaaaacatcaatgtcggtgatgtccttgtgaccacagcggctgtgcgcctggatggtgcaagcctgcatttcgcgccgatggaattcccggccgtggctgactttgaatgtaccaccgcgctggtaaatgcggcgaaagcagccaaagccaccgttcatattggtgtgaccgcttcttctgatactttctatccgggccaggagcgttatgataccttcagcggccgtgtgacccgccggttcagaggatcaatgaaagagtggcaggaaatgggcgtgatgaactttgaaatggaatccgccacgctgctgaccatgtgtgccagtcagggactgcgtgccgggatggttgcgggtgttatcgttaaccgcacccagcaggaaattcctgatgaagcgaagatgaagaaaaccgaatccaacactctggatattgtggtggaagccgcccgtcatctcatctga

SEQ ID NO: 276670 - DNA, 2286 bp, Morganella morganii
atgacgacacataatcacactctgggttttccgcgtatcggtctgaaaagagaactgaaaaaagcgcttgaaggttactgggcaggacagatttcacaggatgagctgcgcgataccggccgtgaattacgccgccgtcactggcagctgcaaaaagaggccggggttgaattattaccggtcggggatttcgcctggtacgatcatgttctcggcaccagcctgctgttcggtaatgtaccgccgcgccatgccggtgcggacgggaaaattgacctcgataccctgttccgtattgcccgcggccgtgcgccttccggtgaaccggcggctgcggcggaaatgaccaaatggtttaataccaactatcactacattgtgccggagtttcagcgcggtcaaaccttcaccgtgagctggccgcagctgtttgacgaggtggatgaggcgctggagcagggctttgcggttaaaccggtgctgctcggcccggtgacctatctgtggctcggcaaagtgaaaggggctcagtttgaccgcttatcattactgccgtcactgttagaagcctataaaaacgtgctggaaaaactggcgcagcgcggtattgagtggattcagattgatgaaccggctctggtgctggatctgccgccggagtggcaggatgcttaccgcacggcatatgatgctttgcagggacatgcaaaactgctgctgaccacctattttgacggagtaagccatcacttaccgctgatccgtgagttaccggtgcaggggctgcacgtcgatttcgtcgcgggcggtgatgatattcaggccatccacgacgcattaccggcggactggctgctctctgccggtctgattaacgggcgcaatgtctggcgtgccgatctgcggcaaaaatatgatgtcatcgccccgctggccgggaaacgcgacctgtggatcgggacatcctgctcactgctgcacagcccgattgacctgcgtgatgaaaccaaactggatgaagaagttaaaagctggtttgccttcgcacagcagaaatgtgaggaactggcattgctgacccgtgcggtcaacagcggctcggcagatgatatcgccgcgctggcggaatacagtgccccgattacccgccgccgtgattcttcccgcgtgcacaatgctgcggtggctgcccggctggcggcggtaaccgcccgcgacagcgaacgtgccgcaccgtatgccgaacgtacagaggaacagcgccgccgttttaacctgccactgtggccgaccaccacaatcggatctttcccgcaaaccacggaaatccgcggcctgcgtctgaacttcaaaaaagggaatatcgataaagcattctaccgcactaatatctctgaacatattaagcaggcgattaatgagcaggaacggctcggactggatgtgctggttcacggcgaagcggaacgtaatgatatggtggagtatttcggcgagcatctcgacggctatgtctttacgcagaacggctgggtacagagctacggctcgcgctgtgtaaaaccgccggtgattatcggggacatcagccgtccggaaccgatcaccgttgattgggcgacttacgcgcaatccctcaccagcaagccggtgaaaggcatgctgaccgggccggtgaccattctctgctggtcattcccgcgcgaggatgtcagccgtgaaactattgccaaacagattgctctggcactgcgtgatgaagtgaacgatttgcagaaagccgggatcggtattatccagatcgatgaaccggcactgcgcgaagggctgccgctgcgccgggcagaatgggcggagtatctcacctgggcggtggatgccttccggctgaatgcggcggtagcagataatgacactcagatccacactcatatgtgttactgcgaattcaatgacatcatggattctattgcggcgctggatgcggatgtgatcaccattgaaacatcacgctcggatatggaactgctggaagcatttgaggatttcgactatccgaatgaaatcgggccgggtgtttatgatattcactcgccgaatgtgccggaagtggagtggattgaagccctgctgcgcaaagcggcggataagatagcggtggagcgtctgtgggttaacccggactgcggcctgaaaacacgcggctgggatgaaacccgcaaagccctggcgaacatggtggaagcggcacgccgcctgcgggaaaatccgctgacatcccgctga

SEQ ID NO: 276671 - DNA, 963 bp, Morganella morganii
atgatagaaataaaacatttaaaaacgattcaggcactgaatcagtcagggtcactcgcgggagcagcaggtgcgttgcatcagacacaatccgccctttcccatcagttcagtgaactggaacaccggctcggctaccggatttttatccgcaaaacccagccgctgcaattcaccccgcagggacaggtactgttacagctggcggagcaggtactgccgctggtgaaagatgccatccgtgaatgcaatgagccgggactgaccgcgctgcgcgtggcgattgagtgccacagctgcattcagtggctgacccccgctctggcgcatttccgcgagagctggccgcagattaatgtcgatttcacttccggggtcagttttgatccgcaaccggaactgctgaaacgcgaactcgatgtggtgctgacatccgatattgatgagcagcacaacgggaagctgacatacacgccgctgtttgattatgaggtgaagctggtggtggcaccggatcatccgctggcccgccgtctgcatattcagccgcaggatctgaccgcagaaaccctgctgatttatccggtacagcgtcagcgctttgatatctggcggcgtttcctgcaaccggccggtgtttccccgcagataaaaaccgtggataacaccctgctgatgatccagatggtcgccgcccgcatggggatcgccgcactgccgcactgggcggtggagaattttgaaagacagggaatggtggtgaccaagactttaggcgagggattatggagccggctgtatgccgcaaaccgcagcggggaacagcgtcagccggctgttgagtcgtttattcgcgcgacgcgtcagcacgcggtggacaatctgccttttgtaaagacggcttcagtatccatacccggtgcacccacagggatgccacaatcagagttgcgccaatgctga

SEQ ID NO: 276672 - DNA, 900 bp, Morganella morganii
atgccgttactgattattaccacaattctgtgggccgcatcgttcagcctgattggcgagtatctcgccggtcaggtggacagctggttctctgtgttagtccgagtgtcgctggcggcactggtttttctgccgtttctgcgctggcgcgggatcgccccgaaagtcattctgatgtatatggcggtgggcgcctgtcagctcggcattatgtatctctttgttttccatgcctacaactacctgaccgtcgcggaattcctgctgtttaccgtgctgacacccctgtatgtgacactgatttatgacctgctggagcggcgtggtctgcgctggggttatgtgttcagttcactgctggcggtgattggtgcggcggtgatccgctatgatcatctcagtgactctttctggacagggctgattctggtgcagctggcgaatatcttctttgccatcggccaggtcggttacaaacggctgatggaagtgcatccgctggtgcagcgcacggcgttttcctggttctacctcggtgcctgtgtggtggcgctggcgggctggctgctgttcggtaattttgccaaaatgccgtccacgcagttacagtggggtgtcctgctgtggctggggataggggcttccgggatcggctactttatgtggaactacggcgccacgcaggtggacgccggaacactcgcgatcatgaacaacatgatggttccggcggggttactggtgaactttgccatctggcagcagcatccggactggctcacgttcagcattggcgcaactctgattgtggcatccctgtgggtgcaccgggtatggatactgaagccgtctttacaaaaggcagattgtccaccgcgtgctgacgcgtcgcgcgaataa

SEQ ID NO: 276673 - DNA, 1650 bp, Morganella morganii
atggaaatattctttacgattcttattttgattctggtcgtgtcggtgtccggtgttctcaccaaaatgatcccgtatcgtattccgttacccatcattcagatcgcgatgggggctctgcttgccttcccgcagtttggtctgcatgtcacgttcgatcctgaactgtttctcgtcctgctgataccgccgttgctgtttgttgacggctggaaaaccccgacccgggaatttatgcagaaagggcgggaaatcttcatcctggtgctgttcctggtgctggtcaccgttatcggcatcgggtatctgatctactggctgatgccggggattgagctgatcccggcctttgcccttgcggcggtgttgtctccgacagatgccgtggcgctgtcgtcgattgtcggcaaagggcgcattccgaaacagatgatgggcattctggaaggggaggcgctgatgaatgacgcctccggcctggtcgcgctgaaatttgccgtggcgattgtcatgggtacgatgattttctccgtcaccggtgtcacgctggaattcttcaaagtcgcaatcggcggcctgctggcgggggtggcagttacctggctgtacagtaagtcgctgcgcctgatgagccgctggagcggggatgacccggccacgcaaatcgtctttatgttactgctgccattcgcctcttatctgattgcggaacatatcggtgtgtccggtatcctggcggccgtggcggcggggatgaccatcagtaaatccggggttatccgcaatgcgccgctggcgatgcgtttgcgggcggataatgtctgggggatgctggagttcgtctttaacggcctggtctttattatgctcggcctgcaactgccggggatctggcaggtgtcggtgattgaggcggagctggatccgaccgtcgaaacctggatgctgtttaccgccgttatcgttatttattttgctttgctggtattacgtttctgctggctgtggatgatgaaaaccgtcagccgcctgaccttaaaacgcaagccgctggatttcaccttctacactacccgtgaactgtggctggcatcatttgccggggtgcgcggggcgataaccctggcgggtgtgctctctatcccgctgttcctgccggacggcacaccgttcccggcgcgttatcagatggtgtttatcgccgccggggtgattatcttctctctctttatgggggtggtatcgctgccgttcctgctcaaagggatgcatgtcggggataaacaggcggatgccaatgaaatccgtgcggcgaaagcggcgatggcagaagtggcgattgtcagtatcggcaagatggaagagcgtctgtccgccagttcggatgaggcgctggatgcggaagccatcagtgaagtggcctccagggtggccgggcatctcaggcggcgtactgccggtgatgatgagatggaatataaccttcaggtggaagatctggagcgccgtttccgtctgactgcactgcgtgccgagcgcggggagctgtatcatcagcgtgcgacccgtaatatcagcaatgaaaccctgcaactgctgctgcatgacctggatctgctggaagccctgctggttgagaaagaaacataa

SEQ ID NO: 276674 - DNA, 1347 bp, Morganella morganii
atgtctgcgacacagccgcaaagcgggtgcaaattagaccaattttttaaactgactgagcgcggcaccactgtccgccgtgaagttctggccgggctgaccacatttctggcgatggtgtactccgtgattgttgtgccgggtatgctcggccaggcgggtttcccgcatacggcggtctttatcgccacctgtctggtggccgggttcggctccctgctgatggggttgtgggcaaatctgccgatggctatcggctgtgcgatttccctgaccgcctttaccgcattcagcatggtacttggtcagaatatcccgattccggttgtgctgggggcggtcttcctgatgggggtgctgtttaccctgatctctgtcaccggtatccgcacatggattctgcgcaatatcccgatgggtattgcccacggcacggggattggtatcggcctgttcctgctgctgatcgccgccaccaatattgaccttgtggtcaaaaacccgggggcgggtatgccggtgttgctgggggatttcacctctttcccggtgatgattgcactggctggcctggcggtgattttcggcctggaacgtctgaaagtgccgggtgcagtactgctggtgattattgcgatttccgttatcgggctgatttttgacccgaatgtgaaatatcagggcttcttcaaactgccatccctcggtgatgacgggctgtcactcttcttcagcatggatatcatgggggcactgaaaccagtggttctgccgacggtactggcgctggtcatgacggcggtgtttgatgcgacaggcactatccgcgcggttgccggccaggcgaatctgctggataaagataatcagatcattaacggcggcaaagccctgacgacagactcggtcagcagcattgtagccggtgttgtcggcgcggcgcctgcggcggtgtatatcgaatctgcggccggtgccgctgcgggtggccgtaccgggctgaccgcaaccgtggtcggggtgctgttcctgctgatcctgttcctttctccgctctcttatctggttccggcctatgccacggcaccggcgctgatgtatgtcggcctgctgatgctgagcaatgtcagcaaactggatttcggtgactttgtcggctccatgtccggcctgctgtgtgcggtgtttattgttctgaccagtaacattgtgaccgggattatgctgggctttgcctcgctggttatcggccgtatcgccgggggggaatggcgtaagctgaatatcggcactgttcttatcgcagcggcactggtggcgttttatgctggcggctgggcaatttaa

SEQ ID NO: 276675 - DNA, 792 bp, Morganella morganii
atgaaactgaccgcttttctcctccctgtaagcctgctctgttctgcattaccggcagcacaggcggcgatcaccccgctcagccccgacacctgccgtgccatgacggcgctgggtattatcacaccggaaaacccggtgccctgcgaacggctggtcaatgtggatgtccggtttatcacctttgagggcgaaacccgcaccggcaccattactgtcgctgatattatcgcccctgaaacgaaagcgctgtttgatgagttgtaccggctgaaattcccgctgcacagtgtgcagccgatagaggccttcggcggcgatgatgaggcctccatggctgccaataatacgtcagcatttaacggccgccgtcaggcaagtcagaaggcctggtcaaaacacgcttacggcatggcgatcgacattaatccgcagcaaaacccttaccgtttccgcgacaaaaacggccgtgtgaccatcagtccgccgcaatccgccgcagcgctgaccaacagagaaaatattcgtaacggaaaaatagaaaccgtgctgccgctggttttcagtcacggttttctccgctggggcggggaatggaaaaatccggtggattatcagcatgcggagatcggcagttttacctttatcaatcatctgctgtcactgccgctggcggaggcacaggcgcaatacagtgcctatgctgcccgctaccgcgactgtttcagtaaaagtaaaactaaagacgagcaactgcgcgcccggcaatgtgctaaaaaagtgctgcgctga

SEQ ID NO: 276676 - DNA, 750 bp, Morganella morganii
atgatctataccctgccatgggcagattttttcatctgttttacggttctcttcttcggttacctggtcttcggcatggtcggctttggctctgcgctgatcgcaagtccggtactggccttttttattcctgtctcacacattgtgccgatgctggcgctgatggatctgggcgcagcggtaattaacgtcacccgcgacgggcgtaaagccgattttgccgagctgaagtggatggtgccgctgatgataggcggcagcctgattggtgcggcgatccttctgaaaacacatccggatttgctggccgtgttcctcggtgcttttatcgttctctatgcactctattcccttttcattaagaaagctgtgcggcattacccgcagaaatacattattccgttcgggatcggcggcggtattctgagtgcgctgttcggggcgggcgggtttgtttatgccatctattttgccgggcggattgaggataaaaaccgcttccgcatcacgcagactaccctgatcggcttcagtacattaacccgcgtgattattttcctgatcatggggatttactggaacagcgaaatagccattaccgcgctgctgtttttgccagctatggtggcgggaatagtcctcgggcggcatatcactatgcgcatcccgaaagaggcatttttccgttttctgaatatggtgatcctgctggccgggctgaccctgcttatcagcaacctggtgcactga

SEQ ID NO: 276677 - DNA, 558 bp, Morganella morganii
atgctaaaaaccagtgcccacatcggccagaaggtcaaactgctgcgtcaggcgcgtaacctgtcgctcaatgacctttcaaaactctccggcatctcgaaagccgcgctgtccaaactggaatccggtgattccaatccgcgtatcgatacactggaagccattgccgtcgcactgcgttttccgctgggggatctgtttaccgccagtaatgaaggttatccccgttacgaaaaaaataaagtctttaaaggggaatatgcggaagattttaaattccgtgtcggcatggggaatatttcggagatctggcacctgaagatgatccgcggtgcgattattaacagccccgcacacagcaccggcacccatgagcatattcttatccatcagggtacgctgatgatgcgctttaatgaagatcagactgtgctgctggaaccaggagatttctatgcgttctcctgtgatattccccactcttatatctgcatggaaggcgagctgagcggcacgctgattatgtcctattcccatatcggccagacatcgccgtaa

SEQ ID NO: 276678 - DNA, 285 bp, Morganella morganii
atggaaaaaaataatcagcctatcgctctggaactggtggtccgcaaccaccccggtgttatgacgcacatttgtggtctgtttgcccgccgggcgtttaacgtggacggcattctgtgtctgccgctgccgggacaggatcacagccatatctggctgctggtgaaatcggatgatcgactaagccagatggtcagtcaggtggaaaaactggaagacgtgcaggacgtgaaatacaacgaagatatcagtatctttgagcaactgaataaatatattcagtag

SEQ ID NO: 276679 - DNA, 1692 bp, Morganella morganii
atgggagcttcacagcagactcaggcaaaaacccggatgacgggggcggaattaattatccgcatgttagaacagcacgggatcacctcggtgtccggtattccgggcggggcggcactgccgctgtatgatgcattgggcaacagccggatccggcatatcctcgcccgccatgagcagggcgccgggtttatcgcacagggtatcgcccgcaccaccggcaaagcggcggtgtgtatctcctccagcgggccgggtgcgaccaacctgatgaccgccattgcggatgccaaactggattccgttccgctggtctgtatcaccgcccaggtgtcttcgccgatgatcggtaccgatgccttccaggaagtggacacttacggcatgtctatccctatcaccaaacacaactacctggtgcgcaatgttctggatttgccgggcattatcgccgatgcattccgtattgcggaatccggccgtccgggcccggtctgggtggatgtgccgaaagatgttcaggcagccatcattgagattgatgaattaccgccaattatgccgaaagatccgttaccgctgtttgatgcggaaaaagtcactgaagctgccgcgatgattaatcaggcaaaacgcccgattctgtatatcggcggcggtattgtcgcttcgcagtcccagcagctggtgcagagcttcgccgagcgtgccgggttgccgaccaccatgacactgatgggattaggcaccatcccgcagcagcatccgctctatctgggcatgctgggcatgcacggggcgcgttataccaatatgattttgcaggaatcggatttgctgattgtggtcggggcgcgctttgatgatcgcgcgatcggcaaggcggaacagttctgcccggatgccaaaattattcatgtggatatcgaccgcgcggagatcagcaagatcaaacaaccggatattgcgatcaacgcggatgccggacaggttctcgccatgctgctgccgcagattgaggtgaatacccgtcaggcgtggaatgatcatatcgcgcagatcaaacaggagttcccgctggagcagattaataaatccgatccgttaagtcatttcggattgatcgccgctgtggcggatgcggtggataatgatgccatcatcaccaccgatgtcggtcagcatcagatgtgggtggcacaggcgtatccgttatgccgtccgcgtcagtggctgacctccggcggactcggaacgatgggctttgggttaccggcagcgattggtgccgcactggcagagccgtcacgtaagatcgtctgcttcaccggggacggcagtattatgatgaatattcaggagatggcgaccgccgccgagcataacctggatatcaaaattattctgatgaataaccaggcgctggggatggttcaccagcagcagacactgatgttcaacgagcacattgtggcatctgcctatccgtatcagactgattttgtgacaattgccaaaggcttcggattacacacctgtgatctgaataaagagagtgatccgcatgctgcattgcaggcggcgattgatcgccccgggccgtgtctgatccacgcattaatcgatgtcagtgaaaaagtgtggccgatggtattgccgggtgatgccaatatcgatatggtcacagcctga

SEQ ID NO: 276680 - DNA, 522 bp, Morganella morganii
atggccagcagaggcgtcaacaaagtcattcttatcgggaacctgggtcaggatccggaagtgcgttacatgcctaacggcggtgcggttaccaacatcacactggcgacatcagaatcatggcgtgataaacaaaccggcgaaatgaaagagaagaccgaatggcaccgtgtggtgatcttcggcaaactggcagaaattgccggtgaatatctgaaaaaaggttcacaggtttatatcgaaggttcactccagacccgcaaatggcaggatcagagcggccaggagcgttacaccacggaagtcgtggtgaatatcggcggcagcatgcagatgctgggcggccgcagcggcggtggcgacaatatgtctcagggcggcggctggggtcagccacagcagccacaacaatcccagcagttcagcggcggcggcaacccgcgcccggcacagcagccggcagcagcagcgccgcaaagcaatgaaccgccaatggattttgatgacgatattccgttctga

SEQ ID NO: 276681 - DNA, 2835 bp, Morganella morganii
atggataatatcgatatacggggcgcccgcacccacaatctgaagaatatcaacctcattattccgcgtgataaactgattgttatcacggggttatccggctccgggaagtcgtcccttgcctttgatacactctatgccgaggggcagcgccgctatgtggaatccctgtccgcctatgcgcgtcagttcctgtcgctgatggaaaaaccggatgtggatcatattgaagggctttccccggcaatttccatcgagcagaaatccacttcccataacccgcgttccaccgtgggaacaattactgaaattcatgattatctgcgtctgctgtttgcccgtgtgggcgagccgcgctgtccggatcacgatattccgctgacggcacaaacaatcagtcagatggtggacaatgtgctgactctgccggaaggcaaacgcctgatgctgctggcgccggtcgtcaaagaacgcaaaggcgagcacaccaaactgcttgataacctggcggcacagggctatatccgtgcacggatcgacggggaaatctgtgatctctctgatccgccgaaactggaactgcagatcaaacataccatcgaagtggtggttgaccgtttcaaagtccgggatgatctgacacaacgcctggcagaatcctttgaaactgcactgacactgtccggcgggactgccattatcgccgatatggaagataacagcgccgaagaactggtattttcagcgaactttgcctgcccggtctgcggatacagcatgagtgagctggagccgcgcctgttctccttcaacaacccggcaggtgcctgcccgacctgtgacggtctgggtgttcagcagtttttcgatccggatcgcgtggtacagaacccgaatctgtcactcggcggcggggctatccgcggctgggatcgccgtaatttctattattatcagatgctgatgtccctggcggatcattataagtttgatattgaatccccgtattcagagttaccggccaaaattcagaaagtgatcctcaatggttcaggccgtgaatccattgagtttaaatattccaatgaccggggtgatgtgacagtccgtcatcatccgttcgaaggtgtgctgcacaatatggagcgccgttataaagaaacggaatccatggcggtgcgcgaggaactggccaaatatatcagcaaccgtccgtgtatttcctgtggcggcacccgtctgaaaaaagaagcccgctttgtgtttgttgataacaccacgctgccgcagatttctgatttcagcatcgggcatgcgatggatttctttaataacctgaaattcagcggccagcgcgcgaaaatcgccgaaaaagtcctgaaagagattcaggatcgcctgaaattcctggttaacgtcggcctgaattacctgacactctcccgctcggcagaaactctgtccggcggcgaggcacagcgtatccgtcttgccagccagatcggtgccggcctggtcggtgtgatgtatgtgctggatgagccgtctatcgggctgcatcagcgtgataatgaccgcctgctggaaaccctgattcatctgcgcaatctcggcaataccgtgattgtggtggagcatgatgaggatgctatccgcgccgctgatcatattatcgatatcggcccgggcgcaggtgttcacggcggggaaattgttgcccaggggtcactggaggatattatcagcacgccggattccctgaccgggaagttcctcagcggtgaacgccggatcagtatcccggaaaaacgcaatgcggcagatccggccaaaatgctgaccatcaccggtgccagcggcaacaacctgaaagatgtgacactgaatctgccggtcggactgtttacctgtatcaccggggtttccggttcagggaaatccaccctgatcaatgacaccctgttcccgatcgcccagacacagctcaacggcgcgaccaccattacgcctgcaccgtataagtctgtcgaaggtctggagcatttcgataaagtgatcgatatcgaccagagcccgatcggccggacaccgcgttcaaacccggcgacctataccggtgtgttcacccctgtccgcgaactgttcgccggcgtaccggaatcccgttcgcgcggctacacgccgggccggttcagctttaacgtcaagggcggccgctgcgaagcctgtcagggtgacggcgtactgaaagtggaaatgcacttcctgccggatgtgtatgtgccgtgcgaccagtgcaaaggcaaacgctataaccgcgaaaccctggaagtaaaatacaaagggaaaaatatccacgaagtgctggatatgactatcgaggaagcccgtgaattctttgatgccgtcccggcgctggcgcgtaaattacagactctgatggatgtcggactgtcttacatccgcctcgggcaatcggcaacaaccctctccggcggtgaggcacagcgggtgaaactggcgaaggaactctccaaacgcggcaccgggcagacactctatatcctcgatgagccgaccaccggcctgcacttcgcggatatcgaacaactgctggcggtactgcatcagctgcgcgaccagggtaacagtattgtggttatcgaacacaacctggatgtgattaaaaccgcagactggattgtcgatctgggcccggaaggcggcagcggcggcggggaaatcctgatcgccggtaccccggaagaggtggctgcatgtgaacgctcacacaccgcccgcttcctgaagccgatcctgaaaagagggtattaa

SEQ ID NO: 276682 - DNA, 267 bp, Morganella morganii
atggcaagcggatgggcaagtgattctgctgttcaggagcagattgatgccacactggatgatgcggtcgcgcgggtgcgcagccagctggcgacaggggaaagcgcgctgttttgtgaagagtgcggtgacccgatcccgcaggcacggcgtgaagcaatacccggtgtgcagttgtgtgtgaattgccaggcagaagcagataaaaagcaggccgcattcagcggctataaccggcgcggcagtaaagacagtcagttgcgctga

SEQ ID NO: 276683 - DNA, 1197 bp, Morganella morganii
gtgttcgaacatgtagacgcctacggcggcgacccgatcttaacgctcgttgagcatttcaaacaggatccccggaaggagaaggtcaatctcagtattggcctctattacgacgattccggggtgactccgcaactgaacagtatcgcacaggcgaaacagcgctataacgcgcaggataccggggcctccctgtatctgccgatggaaggtttttccccttaccgcagcgcggtacagacgctgctgctgggcgatgacagcgggcttatccgcgaaggccgcgtggcgacgatccagactctgggcggatccggtgcactgaagatcggcgcggatttcctgcaccgttatttcccggaatcggatgtctggctcagtgatccgacatgggaaaatcatcaggcgatctttgccggtgccggatttaaaactcattattatccgtattttgatccgcagaccaaaggcgtgaagtttgacgagatgctggcaacatttgagatgttaccggcaaaaagcgtcattttactgcatccgtgctgccataatccgaccggttctgatctgacaccggaacaatgggacaaagttgtcgcggtggtgaaaaagcgggagctgatcccgttcctggatattgcgtatcagggcttcggcggcggtatggaagaggatgcttatgctatccgtgccatggcggcggcagaggtaccgtgtttcgtcagtaactcattctcaaaaatcttctcgctgtacggtgagcgtgtgggcgggctgtctgttctctgcccgacacagcaggaagcagagcgggtgctgggtcagctgaaagcaggtgtgcgccgtgtctattccagcgcaccgtcttacggggcaaaactggtttctgaagtgctgaatgatactgcgctgaaagcacagtggctggcggaagtggagacaatgcgcagccggatcgcagagatgcggacagtgctggtggataccctgaaaaatacactgccggagaaaaactttgaccatctgctgcatcagcgcggaatgttcagttacaccgggttcagtccggtgcaggttactgcactgcgtgagcagcatgcggtgtacctggtcggttccgggcgtgtctgtatggcgggggtgaaccgtcataatgtggatgtgattgcgcgggcttttgcggcggtcagccgttaa

SEQ ID NO: 276684 - DNA, 1080 bp, Morganella morganii
atgaaagcggcaacagccgtcattgaccgtggtgcgctgcgccacaactggcagcggatccgggaacttgcaccggacagccgtcatgttgcggtggtcaaagcaaacgcctacggccacggattagtcgaaattgcccgtgaactcaatgaggcggacgcgtttgcggtggcgcgtctgagtgaagcgcacgcgttgcgcgccggtggtattgttaaacctatcatcttactggaaggttttttcgatgcggcggatttgccggtgattgttgccagccgtctggaagtggcggttcattttgaagagcagttagtggcgctggagcaggcgcagttatcggatccggtgaaagtctggatgaaaattgataccggtatgcaccgtctcggcgtgcgtccggaagaagcggaagcgttttatcagcggctgtgccaatgcagaaacgtacagcagccggtgaatatcatcagccatttcagccgcgctgatgaagatgacgcacagccgacagaagcacaaatcacccgctttatggcatttgctgccggcaaaccgggggaaaaatcgatttccgcgtccggcggcattctttactggccgcaggcacacctcgactgggtgcgccccgggatcattctgtacggcgtgtcaccgaaaagtggtaccgaagccggtgattacggcctgaaaccggtgatgaccctcaaatcccgcctgattgccgtgcgtaaacataaagccggggaagcggtcggttacggcggtacctgggtcagtgatcgtgacacctgcctgggtgtgattgccgtcggttacggtgacggctatccgcgcagtgcgccgtccggcacaccggtggtgattaacgggcgtcgtgttcccattgccgggcgtgtttccatggacatgataactatcgacctggggccggattgcagtgataaagcgggtgatgaagtcattttatggggggattcactgccggtggagcaaattgcagaagccagtggtatcagtgcctatgaactgatcaccaagctgacctcccgtgtggcaatggaatatctggacgaataa

SEQ ID NO: 276685 - DNA, 1407 bp, Morganella morganii
atggccagatatcccaaggacaccaagaccgacaaaccccgtgaccatcagatggaagggctgaaattaccgccacattccctggaagccgaacaatccgttctcggcggactgatgctggacaacgagcgttgggataatgtctctgaacgtgtgaccggcgaggactttttcagccgcccgcaccggacgattttcagtcagatgcagcgcctgctcgagcagggacgaccgattgacctgatcaccctgtctgaagcgctggaaaccggcggcgagctggaaaatgtcggtggttttgcctatctggcagaactttcgaaaaatacgccaagtgcggcgaacattaatgcttatgctgatatcgtccgtgaacgtgcggtgatccgcgatatgatttctgtcgccaatgagatcgccgatgccggttacgatccgcaggggcgttccagtgaggatctgctcgatctggcggaatcccgcgtgttccagatcgccgaaaaccgtgccaataaagatgaaggtccgaaggggatcgaggcgattctggaagaaaccgttgagaagatcgaaaaactttatgcccagccgcatgacggcgtgaccggggtgtcgtccgggtatcaggatctggataaaaagaccgccggtctgcaaccgtctgatttaattattgttgcggcgcgtccgtccatggggaaaaccaccttcgccatgaacctgtgtgaaaacgccgccatgaccgaagaaaaaccggttctgattttcagcctcgagatgcccggcaaccagatcatgatgcgtatgctggcttccctttcccgtgttgaccagacccgtatccgtaccgggcagctcgatgatgaggattgggcgcggatctccagcaccatgggtattctgctggaaaagcgcaatatgtatattgatgactcttccggcctgaccccgaccgaagtccgctcccgcgcacggcggattttccgtgagcacggcggcttaagcctgattatgatcgactacctgcaattaatgcgcgtaccgtctctctctgataaccgtaccctggaaatcgctgagatttcccgttccctgaaagcactggccaaagaattgcaggtgccggtggttgcgctgtcccagctgaaccgtagtctggaacaacgtgccgataaacgtccggtaaactccgatctgcgtgaatccggctctatcgagcaggatgccgaccttatcatgtttatctaccgagatgaggtgtatcacgaaagcagtgatctgaaaggcgtggctgaaattattatcggtaagcagcgtaacggccctatcggaaccgtccgtctgaccttcaacggccagtggtcgcgttttgataactatgcagggccgagttatgacgatgaataa

SEQ ID NO: 276686 - DNA, 984 bp, Morganella morganii
atggctaaacgtattgaatttgatgcccccggcggcaccgatgtgctggtttatcgtgactttacgccggcagatccggcaccgggtgaagttcaggtggaaaacaaagcaatcggtgtgaactatattgatacctatttccgcagcggcctgtaccctgcgccggtatccccttccggtgtcggctctgaagccgccggtgtggtggtaaaaaccggtgcaaacgtaaaacatattaaagtcggtgaccgcgtggtttatggacagtctccgctgggcgcatacagcgaaatccataacgtgccggaagaaaagctcgccattctgccggacggtatcagctttgaaacggctgccgcctgctttatgaaaggtctgaccgcgttttatctgctgcgcaaaacctatgaggtaaaagccggggaagttttcctgttccacgctgctgccggtggtgtcggacaaatcgcctgccagtgggccaaagcgctgggcgcgaagatgatcggtaccgtgggttctgatgaaaaggcgcagaaagccaaagccgccggagcctgggaaaccatcaactacaataaagaagacattgttgagcgggtgctggcactcactgacggtgaaaaagtcggtgtggtatatgactctgtcggtaaagacacctggctgccgtcactggactgcctcaagcgccgcggtctgatggtcagctacggcaacgcctccggcccggtcaccggtgttgacctggggatcttaaataagaaaggctcactgtatgtgacccgcccttctgtctttggttacatcaccaaccgtgaagaacttaacgaagccagcaaggcaatttttgatctgatcctgagcggtaaactgactatttccatccctgcggatcaggtttatccgctgaaagatgccgccctggcacacaaacgcctggaaggccgtgcaacgaccggatccagcattctgatcccgtaa

SEQ ID NO: 276687 - DNA, 1047 bp, Morganella morganii
atgcaccaaaacacaccaacagaaaaaaccactgaaaaccagcagttacgcaccaccggcggctataagaaccttaaccgtttctccgtggcaccgatgctggactggactgatcgccattgccgttatttccaccgtaaactcagccgccacgcgctgctgtataccgaaatggtgaccaccggggcaattctgttcgggaaaggggactatctggcgtataacgaggcggagcacccggtggcattgcagctcggcggcagtgacccggcggcactggctcagtgtgcgaaaattgcacaggaacgcggttatgatgaaatcaacctgaatgtcggctgtccgtctgaccgtgtgcagaacggaatgttcggtgcctgtctgatggggaatgcctcactggtggcggattgtgtggcagcgatgcgggatgtgacagatattcccgtcaccgttaaaacccggatcgggattgatgatcaggacagttatgaatttctgtgtgattttgtcggtacggtggcggatcgcggcggttgtgagatgtttattattcatggccgtaaagcctggctctccggcctgagcccgaaagagaaccgggaaattccgccgctggattatccgcgtgtgtatcagctgaaaaaagattttccgcatctgaccatggcgcttaacggtgggataaaaactttggaagaggcgaagatccatctgcagtatatggacggtgtgatggtcggacgtgaggcatatcagaacccgtcaatcctggcgcaggtcgataatgccctgtttgatgctgccctgccggtgaccgatacggtcgcggcggtggaagctatgtatccgtatattgaggctgaactggcgacagggacttatctcggccatatcacccgtcatatgctgggaattttccaggggatcccgggggcgcgtcagtggcggcgtcatctgagtgagaatgcccataaagccggagcagatctcagtgtgattgaagcggcactggaatttgtcacgcggaaaaatatcgcggaataa

SEQ ID NO: 276688 - DNA, 1182 bp, Morganella morganii
atgcggaatttattgcttttattgttagttatcgtgttattgggaccattgggtattgatctttatttaccggctattccggcaattgcaaaaggcctgggcagcagtgagtcattgattcagtcaactatctcgttgtttattcttgtattaggtgcaggtcagctgatttccggatacctggtggataaattcggccgcagaccgatggcgatggcgggtatggttttgtatatcgccggttccctgacagcggcctttgcggtgactccggggatgtttatcgcttcccggttaattcagggagcgggtgtctgctgtacctctgtggttgcttttacctgtgtccgcgattgctttaatggtaacgaagcagcgcgtgctttcggttttttaaacgggacattaaatattgttccggcgctggcgccgctgctgggcggtattatggcggaatattacggctggcggctgccttttggtttcctggcgctgtatgcctttattctgctgattctgacggcaaaatatctgccggaaacccgcccggaaagcagtgttcagcataaagagaacccgctgaagagcttggtttctgtgttgttcaataagcggtttttgatcttttccctggtgaacgcggggacgatgggaatggtattaacgtatgtttccctggctccggcggtactgatgggcgatgcggcgctcagcccgttacagttttcagttgtgttcggcgctaacgggttctggatcatggggatcagtatgatcgccaaccgggtgatccgcagagccgggcgacctgtttgtctggtttccggtggtgtactgatggcgctggggtgcattgcgctggcactgagcccggtgctgttctccgcacaaatacagaatcactggctgatctatatgctgccggtggccgctgcctgtgccgggctggcctttattatgggaccggcaaccagctatgccctggagccttattctgataacgccggtgttgcctctgcactggtggggtttatgcagatggcgggcggtgcagtgctgaccctggttgctatcgcatcacccttaccgccgaaaactgcactggctgtcactatgctgtgcggcgccctgctggcatggaatgcgtaccgggtgagtaaaaacgaacagcggcaggcgtga

SEQ ID NO: 276689 - DNA, 213 bp, Morganella morganii
atgtttattggcggcaaaataaaatgtcagcgactgaaaaactgtctgacaggtaaagagctatcaataaaaattaatatctcacaacagcaattatcccgttatgaaacgggagcaagcttaattcctctggataaactgttaatgcttgcagacgtcctgaatattagtgttagttatttttttgatgaaatgggttgtgatgaagaataa

SEQ ID NO: 276690 - DNA, 354 bp, Morganella morganii
atgagtaataaaacagataataacctgaacaccagcattaacgagatgtacaagctcattggcggacaaattcgcaaaatgcgcaggatcaccggtgtcacatcaacagaactgggcaatctgattggtgtatcacaacagcaaatctcccgctacgaaatcggcagcacaaaaatttcactggaaatcattctgaggatctcccaggtcttcggcgtctccccttactactttatagaagacagtctgctgttctttacccgccagcacctgccggatgatgataacgttatcccccgcagtaccgacgccggtgtgaatacggagccggagacccggccaccggaacactga

SEQ ID NO: 276691 - DNA, 471 bp, Morganella morganii
atgagtatcgaaacggttcgtgcctggttcggcacgcatgccccggatgtcacgattattgagaccacacagccgactgccactgtcactcaggcagcagaagttcatggtgtccgccccggtcagatctgcaaaacactctcttttaagctgacggatgacagcgcgattctgattgtgatggcaggggacgcccggctggataacaaaaaattcaaaacacagttcggctgcaaagccaaaatgctgaatgcagaggaagtggtgcatttcaccggccatccggtcgggggagtctgtccgttcgggctgccggtaccgctgaccgtttatgcggatcattcactccgtgagtatgacacggtattacctgcggcggggtcggctaattccgctgtccggctgacacctgagcggctggcggaactgacaaacgcacagtggctggatatcaccacgcagccggtataa

SEQ ID NO: 276692 - DNA, 519 bp, Morganella morganii
atgcaacctgttgatattcagactttattaaaaaaagcagaagcactgtgtctgtcacgcagtgtgcgcatgacgtctcagcgaaagtcgattctgcagctgattgccggccagcccggagccatcagtgcttatgagctgctggatctgctgcgcgaaaccgagccgcaggcaaagccgccgacaatctaccgcggcctggagtttctgctcgagcagggatttatccacaaaattgaatccaccaacagctttgtgatgtgtccgcactttgataaacccagccatacttccgtgctgtttatctgtgatcgctgtaacagtgtgacagagcgggacggagagacgattgattcacaaatcagtcagctggcggacgctgcacaatttcatatccgccacagtgtgattgaggcgcacggatactgccgcccttgttatgatattgaatcctgcacccgcagagataaatgtttgcatgaccatgaacatgacgaaccgcgtaaacgcggacgctga

SEQ ID NO: 276693 - DNA, 615 bp, Morganella morganii
atgaaagcactgacggcacggcagcaacaggtttatgaccttgttcgtgaccatatttcgcagacgggcatgccaccgacgcgtgcagaaattgcggcacgcctgggttttcgctctccgaatgcggcggaagagcacctgaaagccctggcgcgtaaaggcgtcattgagattgtctccggggcatcccgggggatccgtctgcttctggaagaagaagaggatgaaggtttaccactaataggccgtgtggccgctggtgagcctttattagcacaggaacatatcgaaagccgttatcagattgacccgatgctgtttaaaccaagtgcagatttcctgctgcgggtaaatggtatgtcaatgaaagatattggtattatggacggtgacttacttgcggtgcataaaacccaggacgtgcataacggccaggtggtggttgcccgtatcgaagatgaagtgacggtcaaacggtttaagaaagtgggcagcaagattgagctgcacgctgaaaacgaagaattcagcccgatcgtggtggatttacgggaacagaactttactgttgaaggtctggcagtgggtgtgatccgtaataacgactggcactga

SEQ ID NO: 276694 - DNA, 372 bp, Morganella morganii
atgaaaaaaaataccggatttatacgattaattaaagcggcaggttattcaaagaaaggacttatcgcggcatggaaaaatgaagccgctatccgtcaggaattgctggcgctgatcccggccgtcattattgcctttgctttctcttttacggcggttgaacgggtgctgctgattggttctgtggtgctggtagtggtgattgagcttatcaacagcgcgattgaggcagtggttgaccgtatcggtacggaataccatgaactgtccggccgggccaaagatatggggtctgctgcagtatttatcgccacattactggggttgtttgtctggataatgctgtttatcagctggttccagcgtctttaa

SEQ ID NO: 276695 - DNA, 2475 bp, Morganella morganii
atgtcactttggcgtaaaatatactataacgtattgaatttaccattaaaactattggtaaaaagcaagccgatcccgacggatccggtcaatgagctggggctggatacacaacgtccgacactctatgttcttccttatcactctaaggcggacctgctgacactgcgccgtcagtgtctcgcacagggcatgccggatccgctggaagataatgtcatcggtaataccacattaccgggctatgtctttatcgatgacggcccgcgtgtgttccgttattacgccctgaatccgcgtaaggattccgtccatattttccacgcctatctggatctgcaccgcaataatccggcgctggatattcagatgctgccggtctctgtgatgttcggtcgttcaccgggccgcgagggacaccacggtgtgccgcatctgcgtctgttaaacgggatccagaaatttttcgccgtgctctggctgggacgcgacagttttgtccgtttctcacagccggtgtccatgggcgcaatggcctctgaacacggcactgacactattattgctaataaactggcccgtgtcgcccgtattcacttctcgcgccagcgtatggccgctatcggcccgaaactgccggtgcgtcaggagctgttcaataagctgctgaaatccaaagcgattgaaaaagccgttgaagatgaagcgaaagccaaaaaaatcaccattgaaaaagcgcgtcagaatgccgtttccatgatgaacgaagtggccgctaacttcacctatgacgccctgcgcgtggctgatcgcgttctcggctggacctggaaccgcctctatcagggactgaatgtccataatgcagagcgggtgcgccagctggcacaggacggccatgagatagtgtatgtgccctgccaccgcagccacatggactacctgctgctctcctatgtgctctatcatcaggggctggtgccgccgcatatcgccgccgggattaacctcaatttctggccggcaggaccgattttccgccgcctcggtgctttctttatccgccgcagcttcaagggcaacaaactgtactccaccgttttccgtgaatacctgagtgagctcttctcacgcggttattccatcgagtactttgtcgaaggcggccgttcccgtaccgggcgtctgctggagccgaaaaccggcacattatcgatgacgcttcaggctatgctgcgcggtgactcgcgacctatcaccctggtgccggtctatatcggctatgagcatgtgatggaagtgggtacttacgccaaagagctgcgcggtgccaccaagcaaaaagaaggttttatgcagatggtgcgcggcctgcgcaaactgcgtaacctcggccagggttatgtgaacttcgggcagccgattccgctgtcacaatacctgacaaaacaggtaccggaatggcgtgaggcgatcgacccggtcgagccgcagcgtccgtcctggctgacaccaaccgcaacatctctggctgataacattatggtgagcatcaataatgccgccgccgcgaatgctatcaacctgtgtaccacggctctgctggcttcccgtcagcgcgcactgacccgcgaacagctgatcgaacagctcgactgctatctccagctgctgcgcaatgtgccgtattccccggacagcaccaccccggcgaagagtgcggaagaactgctggaacacgcattgcagatgaacaagttcgaggttgagaaagacagcctcggggatatcatcattctgccgcgtgaaaatgcggtactgatgacctactaccggaataacattctgcatatgctggtattaccgtctctggtgaccagtatcctgatccatcaccgccgcgtcagcaccgatacgctgcgtgaacatgtcgggatgatctatccgctgctgaaagccgaactgtttatgcgttacagtcaggaagagctgccggcgatcctcgataccatcattgatgaactgtgtcgtcagcaattaatctgccgccgtgatgataatatgctggtcattaacccggcccgtatccgtccgttacagctgctggcagccgggatccgcgagacattacagcgttatgcgatcaccctgtcgctgctgaatgccaccccggaaatcagccgttcggcactggaaaaagagagccggatgctggcacagcgtctgtcagttctgcacggtatcaacgcaccggaattcttcgacaaagccgtgtttgccaccttggtcggcacactgcgtgaagaaggctatatcaatgacaatgatgatgtgattgaagctaacgccggagagttctacaacgtgctggcagagctgatgtcaccggaagtccgtctgactatcgaaagtgtcagcctcgagccggaagaagccgtaccggcggaaagtgatgacagtaatccgtctgactga

SEQ ID NO: 276696 - DNA, 189 bp, Morganella morganii
atgggtattgccgttctgtttaccgtaataatgcttgcattactgttgattctgctttgtgtagctgctatccaatacaggacgaataaaagtgatctttgttttctgctcctgttgctctccggcacagtatcagttgctgtattgggttatttattatatctgcttaatctggcacgtattttttag

SEQ ID NO: 276697 - DNA, 855 bp, Morganella morganii
atggtacgcagcaagtggcaggcatacagccgtctgatgcggacagaccgcccgattggctcactgttactgctctggccgacctactgggcgttatggatagcggcccggggtgtcccggactggcatattctgatcatctttaccattggtgtgttcagtatgcgagccgccggctgtgtgattaatgatttcgccgaccggaaatttgacggctcggtggaacgcaccaaaaaccgtccgctgccgcgcggtgatgtcacggaaaaagaagccaaaattctgtttgcggtactggtgctggtgtcattcggactggtactgacgctcaatacgatgaccatctggctgtcagtcgccgggctggcgctggcctgggtgtatccgtttgtgaagcgggtcagccatctgccgcaggtggtgctcggggcggccttcggctggtcgattccgatggcgtttgcggcggtcagtgaatcgctgccggcagagtgctggctgctgtttgcggtcaatattgtctggtctgtgatttatgatacccagtacgcgatggtggatcgcaatgatgacctgaaaatcggcgtgaaatccacggctatcctgttcgggcgctttgataagatgattatcggcatattgcagctgatgatgattctgatgctgttatggatagggctgatggttaatctgtccgggattttctactggtccctgctgctggccggggcgttatttgtctatcagcagcggctgatggccgatcgtgaacgcgacccgtgttttcaggcctttatgaataataactatgtcgggtttattctgtttctcggcatgctggtcagttatctgtaa

SEQ ID NO: 276698 - DNA, 501 bp, Morganella morganii
atgacacaaacagtgataacaccccccatccgctggtttgataatgcggaaacgatccccgccggggtgctggactggttatcagaattagggtcaatgacgcggcgctttgaacagcactgcaatgaagtgacggtaaaaccgtattgtgaaaaatatatctcccgtgaagcgctgactgaagaagagcagatgcatctgcccggcagtgcacgctactggttacgggaggtggtgttatatggtgacggggttccctggctgaccggccggacagtggtgccggaggagacgctgacaggggaagaacagcagttactgaaaatgggaaatgtgccgctcgggcgctatctctttaccagcggttgtctgacgcgggattatatccgtttcggactctcagaaacgcactgggcccgctgttcgcggctgtgcctggccggtaaaccgcttctgctgactgaagtttttctgccggcctctccggcataccccgcataa

SEQ ID NO: 276699 - DNA, 1653 bp, Morganella morganii
atgaaaaatattaaccccactgatactgcggcctggaaggcgctggaacagcattacgacacaatgaaaactgtgcatctccgcgacttatttgcgcaggataacgaccggttcagccgtttttctgccacgttcggcgaagaaatgctggtggattattccaaaaaccgtatcacacaggaaacccttgataagctgctggcactggctgaagagtgtgatgtgcgtggggctgtctgcagtatgttttccggtgagaagatcaaccggacagaaaaccgtgcggttctgcacaccgcgctgcgccaccgtgacaatactccggtgatgactgacgggcaggatgtgatgccggaggttcgcgccgtgctggaaaaaatgcgcgtgttcagtgagcggatcatcagcggggagtggaaaggttgtaccggcaggccgattaccgatgtggtgaatatcggtatcggcggctctgatctcggcccttatatggtgacagaggcgctgcgtccgtataaaaatcatctgggcatgcattttgtctctaatgttgacggtactcatatcgccgaaaccctgaaagcgctggatccggaaaccacactgtttctgatcgcctccaaaacttttaccacccaggaaaccatgaccaacgcccattccgcgcgtgactggttcctggcggcggccaaagacccggcgcatgtggcgaagcactttgctgcgctgtccactaatgcggatgcagtagctgagtttggtattgataccgccaatatgtttgagttctgggactgggtcggcgggcgctattccctgtggtcggcgattggtctgtctatcgtgctctctgtcggttatgacaatttcacgcagctgctcgatggcgcgtatgccatggacaagcatttcaccgaaactgaattttcacagaatatcccggtgctgctggcgctgatcggcctgtggtacaacaatttcttcggtgcggaaaccgaggcgattctgccttatgatcagtatatgcaccgttttgcggcctatttccagcagggcaatatggagtccaacgggaagtatgtggatcgtaacggtaaggtggtttctcatcagaccggtccggttatctggggtgagccgggcaccaacgggcagcacgcgttttatcagctgatccatcagggcaccaaactgatcccgtgtgattttatcgcaccggcacagagccataatccgctgggggatcatcacagcaagctgctgtcgaattttttcgcacagaccgaagcactggccttcggcaaaacccgtgaacaggtggatgcggagtttgccgcacagggcaaaaatccggctgaaatggattatgtcgcgccgtttaaagtctttgagggtaaccgcccgaccaactccatcctgctgaaatccatcactccgttcagcctcggggctctgatcgctatgtacgaacataagatttttgttcagggcgtgattatgaatatttatacgtttgatcagtggggtgtcgaactgggcaaacagctggcaaaccgtattctgccggaactggcgggcgacaagccggttgagagccatgacagctcaaccaacggcctgattaaccggtttaaaaactggcgtcagtgctga

SEQ ID NO: 276700 - DNA, 1368 bp, Morganella morganii
atggcgtcagtatcttccgcacctgctcagcaggtcattgcaaaattcggtggtaccagtgtggcaaattatgacgccatgcagaaaagtgccggggtcgttctgcagacccccggtgtggcactggtggtgttatccgcctccgccgggatcaccaatgcattaatcgaattagctcagggatgcccgcgcgcgcaacgtgaaaaatgtctgaaacaggttcgtgacacacaatatgaaatcctgtcccgtctgccggagaacgcagctgtgcacaatgagattgaccgcctgctgggcaatatcaccaccttatcggatgctgcggcactggcaacctccagcgctctggtggatgaaattgtcagtcatggtgagattatgtcgacgctgctgtttaccgaagtgctccgggagcagggcgcacaggcgcaatggtttgatgtccgtgaggtcatgcagacagatgactgcttcggccgggctgagccggataccgctgtgctgcgcacgcgctgtgatcagctccttgccccgcgcctgtcacagggcccggtgatcacccagggatttatcggccgcgaagccgcaggacgcaccaccacactcggacgcggcggcagtgattacactgcagcactgctggcggaggcactcggctgccagcgtgtggatatctggacggatgtgcctgggatctacaccacggatccgcgcattgtcccggatgcctatccgattgatcatattacctttgatgaagcggcggaaatggcgaacttcggggcgaaaatcctgcatccggctactttgctgcctgccgtgcgcagcgggatcccggtgtttgtcggctccagcaaagagagcggcgcgggcggcacactggtgtgtgataatgacccgaatccgccgctgttccgcgccctgacattacgccgccagcaaaccctgctgacactgcacagcctgaaaatgctgcatgcacgcggctttctggcggaaatcttcactattctctcccgccataatatttccgtggatgtgatcaccacgtcagaagtcagtatcgccctgacactggataccgtcggttccacacacactaacggaacattgctcagtgatgaactgaccgccgagttgtccgcactgtgccgtattgaagtggaacagaatctggcgctggtcgcggttatcggtaatgaactgacccgtgcacacgggctgggtaaaacgattttcagcgcccttgagccgtttaacatccgcatgatcagctatggtgcaagcggacacaacatgtgcctgctggttcccggcaatgatgccgaagatatcatccgcgcccttcaccacgatctgttctga

SEQ ID NO: 276701 - DNA, 585 bp, Morganella morganii
atgtaccgtttctatattcaggatgctttacctgccgggtgcctgcccgcgtattcgctgccgaaagcagatcagcctcactattatgaattggatgagagtatcctcaacgctgcactgaatattatgcagatcacggatattctggataccgatgatgtgctggacgatgactgctttaaccgtatctggttgaaaagcgagctgacacccgcccgggcgtcagaggtttatcacttcttatatcagcagcaactgccggaaccggtaccgtcaccggatgaaatcgccgcctttaaacaggcgagagtcgacgaactggcgttgctgagccggcgcagtccgaaagagggatatgtaccagtccataaatttgccacacaggatgcctggcggatcatgccggaagaatgcctgcttattgccggtgttctgactgatcacatgctggaagataacaatatggtggtcagtaacatcgcatcattgtgcaaaatcagccacaaaacactggaatatgccctgagaggctggcgtgagtttaatttattcgcggcagaacacggcggttatcaggtttgctga

SEQ ID NO: 276702 - DNA, 144 bp, Morganella morganii
atggtcgtgtttgtttcagcaggcggccgttacctgactgccctgcattgtgtcatccgtcagaaagtgtggaaaaaaagacagagtttcgttgtttccgccctgataacccgttatctgataccggagctgatatcattctga

SEQ ID NO: 276703 - DNA, 3681 bp, Morganella morganii
atggataataaaatcagtgtattaaaaaaagcgcttaatcaacggatcctgattcttgatggtgcgatgggaacaatgatccagcgctatgcactgaacgaaatggaataccgcggtgagcgttttgctgactggccggtggatctgaaaggaaataacgatctgttatccattacgcagccggatattatccgcgaaattcatcacgcctatctggaagccggtgcggatattattgaaaccaacagctttaactccacggttatttccatggcggattatcagatggaatccctgtctgatgagatcaatgaggccgccgcgaaactggcgcgggaatgtgccgatgaatggacgtgcaaaacgccggagaaaccccggtatgtggccgggattctgggtccgaccaaccggacggcatcaatctctcccgatgtgaatgatccggcttaccgcaatgtatcctatgatgcgctggttgaggcttaccgcagctctgtgcgggcactgatccgcggcggcgctgacatcattatgatcgaaacaattttcgataccctgaatgccaaggcggcgatttatgccgttgaaactgaatttgaggcgttggggactaaattgccggtaatgctttccggtacgattacggatgcctccggccgcacactgaccggccagacaactgaagccttttataactctatgcgccacatccgtccgatctctttcgggcttaactgtgcgctggggcctgctgaactgcgccagtatgtggccgaactgtcccgtatcgcggattgttatgtcagtactcacccgaatgccggtctgccgaatgcgttcggcggttatgacctggatgccgccaatatggcgggctatatcagtgagtgggcgcagtccggtttgctgaatattgtcggtggctgctgcggcaccacgcccgatcatatccgtgcaattgcacaggcggtggcggatattccgccgcgtgttattcctgatcgtcctgtggcctgccgtctggcgggactggagccgctgaccatcaatgaaaattccctgttcgtcaacgtgggggagagaaccaatattaccggctccgcacggtttaagcggctgattaaagaaggtaattaccaggaagcactggatattgcccgtaatcaggtggagaacggcgcacagattattgatatcaacatggatgagggcatgctggattcacaggctgccatggtgcgtttcctgaatatgatttccggtgagccggatatcgcccgcgtaccgattatgatcgactcctcaaaatgggaggtgatcgaggccgggctgaaatgtatccagggtaaaggcattgtgaactcgatttccctgaaagagggagaggcagcctttattgatcatgccaaaaaagtgctgcgttacggtgctgccgtgattgtgatggcctttgatgaaaccggccaggcggatacccggcagcgcaagacagaaatctgtcagcgggcttaccgcattctgactgagcaggtgggattcccgccggaagatattatttttgacccgaatatttttgcggtggcaaccggtattcctgagcataacaattatgccgttgattttattgaagcctgtaaggatatcaaagcaacactgccccatgcactgatctccggcggggtctccaacgtctctttctcgttccgcggaaatgatccggtacgggaagcgattcacgccgttttcctctattacgctatccgtaacggcatggacatggggattgtgaatgccgggcaactggccatttatgatgatttgccggctgcactgcgtgatgcggtggaagatgtgatcctgaaccgccgcgaggatggtacagaccggctgctggcgctggcagaagaatatcgcggcagcaaaggggaaaatgatcagccgcagcttgcggaatggcgcgggtgggatgtggaaaagcgtctggaatatgcgctggtgaaagggatcaccgaatttattgttgaggataccgaagctgcccgtctgcgtgctgacagcccgattgaagtgatcgaaggtccgctgatgaacggcatgaatgtggtcggtgatctgttcagtgagggaaaaatgtttctgccgcaggtggtgaaatccgcacgggtgatgaaacaggcggtggcgtatctggaaccttatattcaggcagcgaaaaccagcggttccagtgccgggaaagtcctgctggcgacagtcaaaggtgatgtgcatgatatcggtaagaatatcgtcggcgtggtattgcagtgtaataactatgaaattattgacctcggggtgatggtgccctgtgaaacaatcctccgcacggctattgaggaaaaagtcgacatcatcgggctgtccgggcttatcacaccctcactggatgaaatggtgcatgtggcgaaagagatggagcgtcaggggttttccctgccgctgctgatcggcggcgccaccacatccaaagcccatacagcggtaaaaattgagccgaattacagcgggccggtaacctatgtgcagaatgcctcacggacggtcggggtcgtggcggcattattgtcagataaacaacgggatgaatttgttgcccgtacccgcaaagaatatgagattgtccgtgaccagtatgcccgccgtcagccgcgctctgcaccggtgacactcgcacaggcgcgggcaaatgcgtttgcagcggactgggataattatacgccgccgcgcccggcagttaccggcgtgaaaactgtcactgcaccgatttcggtactgcgccgttatattgactggacacctttctttatgacctggtcgctggccggaaaatacccgcgtattctggaagatgatgtcgttggtgaagaagcccgccgcctgtttaaagaggcaaacgcgatgctggatgagctggacagaactggtgcactgacaccgcgtggggtggcggggattttcccggctaaccggatcggcgatgatatcgcggtttactgtgacgaatcccgcgaagaggttctgttatacagctgtcatctgcgtcagcagacacagaagaaagatgatttcccgaatgcctgcctggcggattttgtcgcaccaccgggaattccggattatctcggagcctttgctgtcaccggcgggctggaggaggatacactggcagctcagtttgatgcggcacacgatgattacaataaaatcatggtgaaagccctcgctgaccggctggcggaagggtttgcggagtatctgcatgagcaggtgcgtaaaactatctggggctacagtccggatgaaaacctggataatgactcgctgatccgcgaaaactaccaggggatccgccccgcacccggctacccggcctgtccggaacatacggagaaaagcaaaatctgggaactgctggatgttgaaagccataccggcatgcggctgacggaatcttatgctatgtggccgggggcatcggtatccggctggtatttcagtcatccgcagagccgctattttgcggtggctcagatccagagagatcagattgaggattatgccgcccgcaaaggtatgccggtgaaagagcttgagcgctggctggccccgaacctggggtatgatccggaagactga

SEQ ID NO: 276704 - DNA, 1860 bp, Morganella morganii
atgacacattctgcgtacccgccggttcatccacgactttcagaaattaccgcccgtattacggcgcgttcccgtgtatcccgagcccggtatctggaaaaaatcagcgccgcacgcagtaaaactgttcatcgtgcccagcttgcctgcggtaatctggcacacggctttgccgcctgccagccggatgagaaacaacagttacgcaatatggcgcataacgatattgcaatcatcactgcttacaatgatatgttgtcagcacataagccgtatgaattttatccggaacaaatcaaagctgcactgcacagtgtgggggctatcggccaggttgccggcggggttcccgccatgtgtgacggcgtgacccaggggcaggatggtatggagttatcccttctgagtcgtgatgtgattgcaatgtctgccgctgtcggactttcccacaatatgtttgatggcgcactttacctcgggatctgcgataaaatcgtcccgggaatgatgatggcggcactctctttcgggcatctgccgtccgtatttattccggcgggtcccatgaccagcggtctgccgaataaagaaaaagtgcatgtccgtcagttatttgctgaaggtaaagttgatcgccgggcactgctggatgcagaagcagcctcttatcattcagccggaacctgtaccttttacggcaccgctaattccaatcagatggtgatggaaatcatggggctgcatctgccgggcgcgtcctttgttcatcctgataccccgctgcgcaccgcactgacggatgccgctgcccgccaggttgtccgctttactgaaaacagcggcaattatctgccggtcgggcaactggtggatgaaaaagtcatcgttaacggcatcgttggtttgctggcaacaggggggtccaccaatctgaccatgcaccttatcgcaatggccgctgcagccgggattatcatcaactgggatgatttttctgagctgtcggacattatcccgctgctcagccggatctacccgaatggcccggcggatatcaaccagttccatgccgcaggcgggttacagctgattatccgtgagctgctaagcctggggctgctgcatgaagatgttcatactgtcgccggtttcggcctatcccgttatacacaggagccgtggctggataacggcgaactgaaatggcgggaaggcgcgctcagttcgcttgatgacagtgtgattgcatccggaaatgcaccgttttcgtctcacggcggtaccaaagtgctgaccggaaatctcggacgtgcggtaatgaaaacctcggcagtgcctgccgataaccagattattgaagccccggccatcgtgtttaacagccagcatgatattgtgcccgcgtttgaggccggaaaactgaacaaagattgtgtggtggtggtgcgtttccaggggccgcaggccaacgggatgccggaactgcacaaactgatgccgccgctgggcgtgctgatggataaaggctaccgggtggccctggtaaccgacggccgtttgtccggcgcatccggtaaggtaccttccgctattcacgttactccggaagcatataccggcgggctgctgaccaaagtccgcgacggcgatatgatccgggtgaacggacagaccggcgagctggtgctgcttgttgatgaggctgttctggcagaacgtgagagtgtcatccctgacctcagcgcagagcgggacggctcaggccgtgaattattcagtgcattacgcacgcaactctcaggtgcggaagaaggcgcctgctgtattcgtttttataaaagtgagaatgacgatgaatga

SEQ ID NO: 276705 - DNA, 642 bp, Morganella morganii
atgaatgatcagatgttaagtgcgcaatccgttttaaatgcaggaccggttgtgcctgtcattgttatccgtgatctgcatcaggcagtaccgctggcccgcgcactggtcgcaggcgggatccgcgttctggaagtcacactgcgtacagagtgtgcaattgaagctatccgcgccattgcggaagaagtgccggaggcgattgtcggtgcgggtaccgtgattaatccggagcaactgaaagccgtcactgacgccggtgcacagtttgctatcagccccggtctgacagaatctctgttgcaggcagccgatcagggctccattccgctgatcccggggatcgccacggtttccgagctgatggcgggtatggcttacggactaaaaaattttaaattcttcccggcagaagcaaacggcggagtgaaagcgctgaaagctatctccggccccttcccggatatccgtttctgcccgaccggcgggatctccctgaataactaccgggattatctcgcgctcagcagtgtggcctgtgtcggcggttcatggctggtacctgaagatgcactccgcgacggagactatgatcgtattaccgcactggcggcacaagccgttgccggtaccgctgcataa

SEQ ID NO: 276706 - DNA, 930 bp, Morganella morganii
atgccaatccgtatccctgatgaacttcctgctgtcaccgatttgcgtgatgaaaatatctttgtgatgacatcatcacgggcacaatttcaggatatacggccactgaaagtgctgtttttaaatctgatgcccaagaagattgaaacagaactgcaatttctgcgtctgctctccaacacaccgcttcaggttgatattcagctgctgcgtatcagccaccatgaatcaaagaacacacccaaggcgcatctggatgccttttattgtgactttgatgatataaaagaacagaattttgatggtctggtgatcaccggtgcaccactcggtctggttgaatttcaggatgtggattactggccggaactggacgagattatccgctggtcacagacacatgtcacatcaacactttttgtctgctgggccgtacaggcggggctgaacacgctttacaatatcccgaaacaaacactgccggaaaaaatttccggggtgtatacccacaccacactgatgccgcatgcgctgctgaccagaggatttgacgggcagttttctgcgcctcactcccgctatgcggcatttcctgaagcaatgatccgtgaaaataccgatctcgatatcctggcttcctctgaagaagccggagcctatctgtttgccagtaaagacaagcgtcaggtctatgtgaccggccatgcggaatatgatgcggatacattggcgggagaatatcagcgtgactcggatgcggggttggatcctgctatcccggtgaactattttccggataatgacccgtcgaaaacaccggtatccagctggcgcggacacggccatctgctttatgctaactggctgaattattgtgtttatcagataacaccgtatgacctgagtgtgatgaatccgacggcggactga

SEQ ID NO: 276707 - DNA, 813 bp, Morganella morganii
gtggatacagaattactgaaaacctttctggaggtcagtaaaacccgtcacttcgggcgtgcggctgaatccttataccttacacaatctgcagtcagctttaggatcaggcagttagagacaaatctcggggcaaatctttttacccgccaccggaataatatccgtctgacagccgccggcgagcggttagtgccttatgctgaagcgctgatcaatacctggcagctggcaaaacaggaaattaatcatgcctctgtacacaacccgctttccatcggagcgactgcatcattgtgggaagcttgtctgaccccctggctcggacagatctaccaatcacacgcagatctgcgcctggagaccagaatcgcatcccgccagtctctggtaaaacaattacatgcacgggagctggatttactgatctctactgagcaaccaaaaatggatgaactgaaaagtgagattgtcggagaaatcacacttcagctgttcagcatacaaccgctgtcggcagaaaatcccccgggccttatccgcctggaatggagtgccgattttcagcagcatgatgaggctgttttcacccgctgccagtctccggttctgacaacatcgtctgcttttcaggcaaaacaattactgtcagtgacatcatctgtcgcttatttaccggcacactggaaaaaaatatatcccgagctgaaccccgtggataatgacctgattacaaagcctctgtacgctgtctggctgcagaatagtgatcagcagggacttatcgggcaattaatcgcaataccggtataa

SEQ ID NO: 276708 - DNA, 339 bp, Morganella morganii
atggcagaaagctttatcacgactaatcgtttttttgataataaacattatcctcgtggtttttcacgccatggtcatttcaccataaaagaagctcagttacttgagcgccatggttttgctttcaacgaactggatatgggtaaacgcgccccccagacggacgaagaaaaacagtttgtttctgtatgccgtggtgagcgtatgccggaaacagcagaagaaaaagtgtggattaagtatctggagcgtattcgcaaaccaaaacgcttccacacgctgtccggtggtaaacctcagatcgatccgtcggaagactataccgacacagatgattaa

SEQ ID NO: 276709 - DNA, 1533 bp, Morganella morganii
atgtcatttgctattgtttatacccgtgccatgatcgggacagaagcaccgctggtcaccgtcgaggcacatatcagcgccgggttgcccggattaacactggtgggattaccggaaaccgctgttaaagagtcaagagatcgggtccgcagtgccctgatcaacggcggatttgaatttccggcaaagcgggtcactatcaatcttgccccggctgatttacccaaagaaggcgggcgatatgacttgcctatcgctgttgccatactctcagcttcagagcaaatagacgcaaaattggcagagaattatgaattttcgggggaattaggtctttcgggagaactccggttctgccgcggcatattaccggcagtactggccgcccgtcagtcaggaaggctggctgtagtatcaaaacagcatcatgatgaattatgtattctgcccgccggttcggcgctgatggcggataatttactgcagattgccgcattttttcatcagcagcaggaactgaatgaaaacagccaccaggcggggaaaacagaaaatgataacggtaccagtattgatgatattaccggccagcaacacgccaaacgggttctggaaataagtgctgccggcgggcataatttgctcctgctcggcccgcccggtaccggaaaaaccatgctggccagccggctgggaacactgctcccgccgttaaccgcgcaggaagctcttgacgtggcgataatccggagcctgacccaaacctcatcagaacaaaataaatggccccagcgtccgttcagggcaccacatcataccgcatcctctgcggcactcaccggtggcggcagtattccgctgccgggagagatatcgctggcacatcacggcattctgtttcttgatgaactccctgaattctcccgtaaatcactcgactccctgcgtgaaccacttgaatccggagagatcattatttccagagcaaaagcaaaagtgtgttttcctgcccgtatacagctcattgctgcaatgaatcccagcccgacgggccattatcagggcatacataaccgcagcggtcctcagcagcttctgcgctatctttcccgcatctcgggaccgtttctggaccggtttgatttatcaattgaagtgccgatgctgccgcccggaacactgagccggacagaaaaagatccgccggttcatgagcaggtaaaagcacgggtacagtccgcacgccaacaacaataccgccgtaacggccagggaaaactgaactcgggactgtcgggcaaagaaacagaggaggtgtgtgcattatcagcacaggatgcccgttttcttgaggatgcactgacgcaacttaatctgtctgtacgggcatggcaccgtatactgcgtgtcagcagaactattgccgatctgcgggatgaaggaggacaggtgtcacgaaaagatatactggaagcactcagttaccgggtaatggacagattaatccataaattgcagcaggcggtctcttaa

SEQ ID NO: 276710 - DNA, 258 bp, Morganella morganii
atgatggtgatttttttcatcatttcgcagcgaaattccgttttttacgatgtatatcgacagattttatgtatgttgcataaaagtgatttctgctctgcgtgttgcatggaaaaaccgggcggcggggaattaatttccgggtttcagaataaaaaatctgccacgctttccatcgtgctcccgggaatagtgttcagaggaaaagtaagttgtaccggagaatgccccgttttttcggtgttattccggaagtga

SEQ ID NO: 276711 - DNA, 1647 bp, Morganella morganii
atgaacggggcacagtggttagtgcaggcactacgaacacagggcgttgacactgtgttcggctacccgggcggggcgatcatgccggtctatgacgcgctgtatgacggtggtgtggagcatgtgctctgccgtcatgaacagggggcggttatggcggcaatcggctatgcacgggcagggcagagaacgggtgtatgtatcgcaacatcagggccgggagcaacaaaccttatcaccgggctggcggatgcactgcttgattcagtaccggttgttgccatcaccggacaagtaggttcatcactgattggtacggatgcctttcaggagatcgatgtgctggggctgtctttgtcatgcacaaaacacagcttcctggttgaatcaattactgatttgccgcgaattattaccgaggctttcgcgattgctgcaggcgggcgtccggggccggtactcattgatatcccgaaagacattcaattacagattagtgaatttaccccgtattttctgccggtaaataatgcagaacctctgtcgcagacggctctctcccgtgcccggcaactgatgcgggaaagccggaagccggtgctgtatgccggtggtggtgtcggaatgtcaggtgccgttgcacagctgcgggcgtttctggatgaaaccggtatgccggcagtgagcaccctgaaaggactgggggcggtctctccggattatccgtattacctcgggatgctcgggatgcacggggcaaaagcagcgaaccttgcggttcaggaggcggatctgctgattgcggtcggcgcccgttttgatgaccgggtaaccggcaagctgaacgcatttgccccgcgcgcaaaggtgatccatgtggatatcgacccggctgagctcgataaattacggcagacacatgtttctcttgcctgcgatgcgaagcaggctctgccgctgctgtcacagccgctgtcattatctgcctggcagcatcacgtgaagaaactgaaagcagagcacgcgcctgattattcacatgccggtgacagtatttatgcaccgctgctgttatctcaggtatctgcggccaaaccggcagattgtgtggtgacaacggatgtcgggcagcaccagatgtggacggcacagcatatgacctttgacggcccggagaattttctgacatccggtggtctgggtacgatggggtttggtttaccggcagcgatcggggcacagattgcccgcccggaagcaaccgtgctgtgtgtttccggtgatggttctttcatgatgaatgtgcaggaactgaccactatcaaacgcaaacgtctgccggtcaaaatcctgctgctggataatcagcgtctcggtatggtgcgtcagtggcaggaactgttttttgataagcgttacagcgagacggtactggatgacaatcctgattttgttgccctggcgcgctcgtttgatatcccgggacagctggtgactgaaaaatcagcgctgccgtccgcgattaataccctgttacaccatcagggcccgtatttattacatgtcgccatccgtgaagaagataacgtctggccattagtaccgccgggagcgggtaacgaacatatgttggagagctcattatga

SEQ ID NO: 276712 - DNA, 279 bp, Morganella morganii
atgatacagcatcagttagcaattcaggcacgttcatgcccggaaatcctggaacgggttctgcgtgttgtgcgccaccgcggatttaacgtctgtgccatgaaaatggatctggcgaaaggttccgaaggtgataatgtaaacattgagttaacagtttcaagcctgcggccgcctgccctgctctgtacacagttagttaagctggcggatgtggaggatgtcgaagttctcacaaaaaatacacaaaattatcaacacattagctgtgcagtataa

SEQ ID NO: 276713 - DNA, 927 bp, Morganella morganii
atgacaaaaaaagctgattttatttggttcaatgatgagatggttccgtgggcagaggcaaaagtgcatgttatgtgtcatgccatgcactacgggacatctgtttttgaagggatccgctgttatgaatctcataagggccctgtcgttttccgtcatcgcgaacatatgcagcgcctgcatgactccgccaaaatctatcgtatgccggtggaatattctgttgatgaattaatggaagcctgccgcgccacgctgcgcaaaaataatttatccagtggttatatccgtccgctggtctttatcggtgatgtcggtatgggtgttaacccgccgcagggctataaaaccgatgtcatcatcgcggcattcccgtggggtgcttacctgggtgaggaagcgctggatgcagggattgacgcgatggtgtcatcctggaaccgcgcagcccctaacaccattccgacagcggccaaagcaggcggtaactacctgtcctcgttactggtcggcagtgaagcccgccgtcacggttatcaggaagggattgcgctggatgtgaacggttatatctctgaaggggcgggtgaaaacctgtttgaagtgaaaaataacattatcttcactccgccatttacctcttctgcactgccgggtattacccgtgatgcgattctgaccctggcaaaagagctgggttatgaaatccgtgagcagacgctatcccgcgaatcactctatctggcggatgaagtctttatgaccggtactgcggcggaagttacgccggtacgcagtgttgacggtattcaggtgggtatcggccgctgcggaccggttaccaaagagatccagcaggcattctttggcctgttcaccgggaaaacagaagacaaatggggctggttagatccggtaaatccataa

SEQ ID NO: 276714 - DNA, 1851 bp, Morganella morganii
atgcctcagtaccgttcggcgacaacaacgcatggccgcaatatggcgggtgcgcgcgcattatggcgtgcgacaggaatgacagatgccgatttcggcaaaccgattatcgcggttgttaactcattcacacaatttgttccgggtcatgttcacctgcgggatctgggtaaactggtggcagaggaaattgaggtcgccggtggcgtggccaaagaattcaataccattgctgtggatgacgggatcgccatggggcacggcgggatgctttattctctgccgtcacgcgaactcattgccgattctgtggaatacatggtgaatgcacactgtgcggatgccatggtttgtatctccaactgcgacaaaattactccgggaatgctgatggcctcactgcgcctgaatatcccggttatttttgtatccggtggcccgatggaagccggtaaaaccaaactgtctgatcagataatcaagctggatctggtggatgctatgatccagggtgcaaatcctgatgtttccgatgcggacagtgaacaaatcgaacgatcggcctgcccgacctgcggctcctgctccggtatgtttaccgcgaactcgatgaactgcctgaccgaagcgctgggcttatctcagccggggaacggctcgctgctggcaactcatgctgaccgcaaaaatctgttccttaatgccggacgccggattgtggaaatcaccaaaaaatattacgaacaggatgatatccgttttctgccgcgcaatatcgccaccaaagcagcgtttgagaatgcgatgaccctggatatcgccatgggcggttcaaccaacacagttctgcatctgctggcggcggcacaggaaggggaagttgatttcacaatgacggatattgaccgcctttcccgtgcggtgccgcatttatgtaaagtcgcgccaagcacgcagaaataccatatggaagatgtacatcgcgccggtggagtaattggtatcctgggcgagctggatcgcgccgggttactgcaccgggaagtcagtaacgtgctggggatgaccctgccggagttactggcggcgtatgatattacactgacgaaagatgatgcggtgaaacggatgtattccgccggtcctgccgggatccgtacaacaaaagcattctcacaggattgccgctggccgtccctggatgacgaccgtgaaaacggctgtatccgcagcaaaacccatgcctacagccaggatggcgggctggcggtactgtccggcaatattgccgaagatggctgtattgtgaaaactgccggggtggatgaggggagcttaacctttaccggaccggcaaaagtgtatgaaagtcaggatgatgcggtaagagcgattctcggcggagaagttgttgccggggatgtggtggtgatccgctacgaagggccgaaaggcgggccgggtatgcaggagatgctgtatccgaccacctacctgaaatcaatgggcctgggaaaaagttgtgcacttattactgacggacgtttctccggcggcacttccgggttatccatcggccacgtttcgccggaagcggccaacggcgggctgatcgggctggttcagaccggggacactatcgccattgatattccgtcacggcagatttcactgaaagtagatgagcaaactctggcagcccgccgcacagaggaagaggcacgaggtgaaaaagcctggtcaccgcagaaccgtgaacgtcaggtctcttttgcgctgcgtgcatatgcactgctggcgaccagtgccgataaaggcgcggtacgggataaaagtaaactcgggggttaa

SEQ ID NO: 276715 - DNA, 1569 bp, Morganella morganii
atgaccgcaaaacaaccattgtctgctcagccgtcagcggctgagtacgtgagagcggccttcagtgcctccgtttatgatgtcgctcaggttacgccgctgcaactgatgccgaaactgtcggcacgactcggcaataccatttcagtgaaacgggaagacaggcagcccgtgcacagttttaagctgcgcggcgcgtatgccatgattgcggagctgacagaagaacagaaacggcggggcgtagtgacggcatcagccggaaaccatgcacagggtgtggcactgtctgccgggaaaaccggggtgaaagccctgattgtgatgccggtggcgacggcggatatcaaagtggatgcggttcgcgggttcggcggcgaagtggttctccacggcgctaattttgatgaagcaaaagcacatgcactggagctggccgcatccctcgggatgacgtttattccgccgttcgatcacccgtcggtgatcgccggtcaggccactatcgctcttgaactgttacagcagaatgccaggctcgacagagtctttgtgccggtcggcggtggcggactggccgccggggtggcggtgtttattaaacacctgatgccggacattaaagtaattggtgtcgaggcagaagaggcggcctgtctgaaagcggcgctggatgccgggcatccggtcgaattaccgaaagtcgggctgtttgccgagggtgtggcggtgaaacggattggtgatgagaccttccgtttgtgtcagcagtatctggatgatgtgataaccgtagacagtgatgccatctgcgcagctatgaaagatctgtttgatgatgtgcgggcagtggcggagccttcaggagccctggcgctggcggggatgaaaaaatacattcagcagcacaatattcagggggaaaacctggcgcatgtgctttccggtgccaatgtgaatttccatgtgctccgttatgtgtcagagcggtgcgagctgggagagcagcgtgaaggcgtgttcgcggtgacgatcccggaagagaaaggcagtttcctgcggttttgtcaggcgcttggcccgcatgtggtgacggaatttaattaccgctacagcggttcagatgaagcttcagtatttgtcagtgtccgtgccgatgagggcgcgggcgcacggaaaaccattctggacggtctttccgccgctggttttagtgcgacagatttgtcggatgacgaaatggcgaaactgcatgtccgctacatggtgggtggccgtccgtcaacaccgttgcaggagcggctgttcagttttgaattcccggaagcgcccggcgcattgctgaaattcctggaaacacttggtacacactggaatatcaccctgttccattaccgcagtcacggcacggattatggccgcgtactggcggcttttgaaatacaggcaggggatgtgcagtttgagcagtatctgaatgcactcggctacgatttccgcgatgaaactggcaatgccgcatttgtccgtttcctggctccgcagttatccggggtggcgcggcagtaa

SEQ ID NO: 276716 - DNA, 897 bp, Morganella morganii
atggatatccgggaactcagactgtttttacatcttgcggagagctgccatttcggcaaaaccgcggctgccatgtatatcagcccgtcgacactctcacggcagatccagcggctggaagaatctctcgggcatccgctgtttctgcgggataaccgcactgttcagctgacagccgccggtgaacagctgaaaaaatttgcgcaggaaacagtgctgcaataccagcaactgcaacatgcgcttaatcatcagagcccgtcactgaccggtgaattacgtctgttttgttccgtcactgccgcatacagccatctgccgcagatcctcgatcagttccgggcagaacatccgcaggtggaaatcaagctgaccaccggggacgcggcggatgcagtggaaaaagtacagtcacaggaagcggatctcggtatcgccggaaaaccggaaaaactgccggataatgtccgctttcaccagataggcgaaatcccgctgtcactgatagcgccggcactgccgtgcccggtcagacaacaggcggtacagccggtgcctgactgggaaaatatcccgtttatcattccggagcatggcccgtcacgtaaacggattgatttatggtttaaaacacaccagattcaggatccgcagatttatgccacggtgtccggccatgaagcgattgtatcgatggtggcactgggctgcggtatcgctctgatccctaatgtggtggtggagaacagcccggacgcaatccgcagccggatcctgcaactcgataatatttcgatggtcgcgccgttcaaactgggcgtctgtacactgaacaagcggctgcatgagccgcttatccgcgctttctggcaattactgccgcgccaccccggataa

SEQ ID NO: 276717 - DNA, 1476 bp, Morganella morganii
atggcgaattattttaatacactgaatttgcgccagcagctggcgcagttaggcaaatgccggtttatggcacgcgaagaatttgcggacgaggcagggtatctcaaaggcaaaaaagtggtgattgtcggctgtggtgcacaggggctgaaccagggactgaacatgcgcgattccgggctggatatcgcctatgcactgcgtcaggaagcgatcgatgagaagcgcacctcatggcgtcgtgccaccgaaaacggttttaccgtcggcacgtatgaagagctgatcccgcaggctgacctggtggttaacctgacaccggacaaacagcattctgcggtggttaaggcggttcagccgctgatgaaatccggcgcagcgctgggctactcacacggcttcaatattgttgaagtcggcgaaaccatccgccctgatatcacggttgtgatggtggcaccgaaatgcccgggcacggaagtgcgtgaagagtacaagcgcggctttggtgttccgacactgattgcagtccatccggaaaatgatgccaaaggtgaaggcctggcgatagccaaagcctgggctgcggcaaccggcggtcaccgtgcgggtgttctggaatcgtcctttgttgcggaagttaaatctgacctgatgggtgagcagactatcctctgcggtatgctgcaggccggttctctgctttgttatgacaaaatggttgctgacggcgcggatcctgcgtatgcaggcaaactgatccagtacggctgggaaaccatcactgaagcgctgaaacagggcgggatcacactgatgatggacagattgtccaacccggcaaaagtccgtgcttatcagctgtctgaaaccctgaaagcacagatgaagaccctgtttgaaaaacatatggatgacatcatttccggccatttctcctcaacgatgatggcggactgggcgaatgatgataaaaatctgctgacctggcgtgaagagacaggaaagacggcatttgaaaactatccggattctgagcagaaaatcagtgagcaggaatattttgaccacggtgttgtcatggtcgcaatggtgaaagccggtgttgagcttgcatttgaaaccatgattgacgcggggattattgcagaatccgcctattatgaatcactgcatgaactgccgctgattgccaacaccattgcccgtaagcgtctgtatgaaatgaacgtggttatctccgataccgcagaatacggcaattacctgttctcctttgcagcagtgccattactgaaagactttatggcatcactgcagccgggtgacctgggtaaatccggcgcggaccacggtacggataatgcgcagctgcgtgatatcaatgaagcaattcgtcagcatccgattgagaccgtgggtaaaaccctgcgcggctatatgacggatatgaaacgtatcgcggtcggcggctga

SEQ ID NO: 276718 - DNA, 480 bp, Morganella morganii
atggcaaacagaatttacttacggctggaaggtaataaacaaggttttatttcaaaaggatgttcatcaccagaatcaatagggaataagtatcagcggggacatgaagaccagatttttgtttactcattcagtcatgatatatttcgtgagaaaaataaaattcatcatccggtcattataagcaaacctattgataaatcatcaccattactgggtgtcagtattactgaaaacgaaatgccaacctgtgaattaatattttaccgcacaggtatctccggccttcaggagaagtattatacagtaagattgacaaaagctgcgattgtcaatatctcatcacattatccgaatgcactaacccataatgatgttcagccgcatgaaagcatcatacttagctatcagagtatcacctggcggcactgctctgccggaacgtccggttacagtatcagcgggcaacacccgttttaa

SEQ ID NO: 276719 - DNA, 600 bp, Morganella morganii
atggcatcacgacttgatattgaaaaatccagattaatatatacacaggacattggctggatagatcgcaatcatgcattaggcggggatgcgcgcaacctgtgggcgcaactgctcacagagaataccacaccctattacaaagattattttctggtcagttacgatcagtttatgggaaaatttttcattaaaatgggcgttacttcctgctggcttgtgaaaaaaggactcagagaagaagacaaaaaatcaattgctctttcaatgatgttttatatctccacgctatttgaaactcatcaggggcgatttttattttccggcctgttagacagcgacagcggattcagcggggaagatcttatttccaaccttcttggtttttattccgtgattgaaccccgtgattactggtcactgataaaaccggttcccactgaaaccgcactgcgtatctgggatcattatatgaataccattcagccttttaattcctatgaaagtgatattgtaattaaactaaatgttactgatggctgggcgggtgaccggggcttcagaaaatggaatccatttgcagataaatatgataactaa

SEQ ID NO: 276720 - DNA, 2031 bp, Morganella morganii
atgaaattaaatcccggtcagcagcaggccgttgagtatgttcagggcccgtgccttgtgcttgcgggtgccggttccggcaaaacccgtgtgatcaccaataaaattgcgcatctgatccgcaataccggctatcagccgcgccagatcgcggcggtgacctttaccaataaagccgcgcgggaaatgaaagagcgtgttgcacaaaccctggggcgcaaagaggccaaagggctgatgatctccacattccataccctggggctggagattatcaagcgggaatacaaagcgctggggatgaaaagtaatttctccctgttcgacgatcaggatcaactcgcgctgctcaaagagctgacgtttgatcatctggaagaagataaagagttactgcaacagctggtcagtcagatttcgaactggaagaacgcactgctgacaccggaacaggcaaaagggctggcgcgatcagagcgcgaacatacgtttgctgagtgttaccgccgctacgaactgcatctgaacagctgtaatgtgcttgattttgatgaccttatcaccaaaccgactctgctgtttgcccgtgacgaacaggcgcgggagcgctggcagcagcgtatccgttatctgctggtggatgagtatcaggataccaacaccagtcagtatcagctggtgaaattactggttggtaaacgtgcgtattttacggtcgtgggtgatgatgatcagtcaatttattcgtggcgcggtgcacagccgaaaaacctggtgcaactgagcaaagattttccggagttgcgggtgatcaagctggagcagaattaccgttcgtccggctgtattctgaatgcagcgaatattctgatcgccaataacccgcatgtgtttgaaaaacagcttttttcaaacctcggttatggtgatccgatgaaagtgatcaccgcgaataatgaagatcatgaagcggagcgggtggtcggggagctgatcgcccatcactttatcaataagacagattataaagattacgcgatcttataccgtggtaaccatcagtcacggatctttgaaaaaatgctgatgcaaaaccggatcccgtaccggatttccggcggaacctctttcttttcccgtccggaaattaaggatttgctggcgtatctgcgtgtgctgaccaatccggaagatgacagtgctttcctgcgcatcgtgaatacgccgcgccggggaataggaccggcgactatccagaagttgggtgagtgggccaatacgcgggacaaaagtttgtatcaggccagttttgacctcgggctggggcagacactttccggtcagggactggcggcgctgacaaatttcaccggctggctggctgaggtggaaaaattggttgagcgtgagccgctgatcgcggtgcgtgatttactgcacggcctggattatcagagctggctctttgaaacgtctgccagtccgaaagccgctgagatgcggatgaaaaacgtcgatcagctgttcaactggatggctgaaatgctggaaggggatgatctcaacgagccgatgacgctggctcaggtggttacccgctttacgctgcgcgacatgatggagcgcggtgaggaagcggaggagttggatcaggtgcagctgatgacactgcatgcttccaaggggctggaatttccgtatgttttcctggtgggcatggaagagggaattttgccgcatcagtccagtatcgatgaggataacgtggatgaagagcggcgtctggcctatgtggggatcacccgcgctcagaaatccctcttttttaccctgtgccgtgagcgccgccagtacggcgagctgatccgccccgaaccgagccggtttctctatgaactgccgcaggatgatctgcactgggatgacggcaaaaaagtggtgaaaaccgccgaagagaaacaacaggccgggctgcgcggtgtggccggactgaaggcgatgctggcaaagaaaaaggaagaaaacggatga

SEQ ID NO: 276721 - DNA, 1509 bp, Morganella morganii
atgctgagatcgtcctcgctttatgctgccatcgatctgggttccaacagctttcatatgctggtggtacgggagatcgctggcagtattcaggtactgtcacggataaaacgcaaggttcgtctggcggccggtctggataaagataatatcctgtctccggcagccatggcccgcggctggcagtgtctgcgtctgttttccgaacatctgcaggatatcccggactcccagatccgcgtggtggcgacagccaccctgcgcctggccagaaatgccggtgaatttctggaaacagcagcggagatcctcggtcatccggttacggtaatccgtggcgaggaagaagcacgtctgatttatcagggtgttgctcacaccaccggcgggtcagacaaacgcctggtggtcgatatcggcggtggcagcaccgaactggtgaccggcagcggtacccggaccaccgccctcttcagcctggagatgggctgcgtcacctggctggagcgctattttaccgatcgctccctgaccacagagaatttcgccggtgccgaacaggctgcccgcgacattatcgccccggttgctcccgcgcttctggagcagggttggcaggtgtgtgtcggcgcatccggcaccgttcaggcacttcaggaaatcatgattgcccagggcatggatgaacaaatcaccctgccgaaactgcagcagctcaaacgcaaagcgattgagtgcggcaagctggaagagctggaaattgaagggctgacactggaacgggcactggtattccctagcgggctggccattcttatcgcgatttttgaaacactcggcattgatggcatgacactcgccgggggtgcactgcgtgaagggctggtctacggcatgctggaattgccggtagagcaggacatccgcacccggacactgaaaaatattcagaagcgttttcagatagatgccgaccagggcaaacgtgtccgccagttagcggatcacttttttcagcaggtggcaaccgcctggcagctggatatccgctgtcgtgaactgctcagcagtgctgcgctgatccatgaaatcggcctgagtgttgatttccgcaaaggccctgaacatgccggttatctggtcagtaatctggatttacccggtttcacaccggcacagcgccgcctgttagcggtgctgctgcgcaatcagagtggtccgctggatatccattctctcaatcagcaaaatgcgctgacaccgcgtgaagccggttgtctgtgtcgtctgctgcgtctggcgattatttttgccagccgccgccgtgatgacacgctgccgtcgctgcgcatccgggcgtctgcggaagggctgattatcacactgccggtcggctggcagcaattgcatccgctgcgcgcggaagcattacagcaggaaattcagtggcagagttatgtgcaatggtcactgatgctggaagaacagaagccgtccactctcggctga

SEQ ID NO: 276722 - DNA, 1296 bp, Morganella morganii
atgagcaaaacacatttaacagacaagaagttttctgacttcgccttgcatactaaagtggtagaagcgcttgattctaagggcttttataactgcacgcctattcaggcgctgacacttcccctgacgatcaacggccgggatgttgcaggacaggcacaaacaggaacagggaagacgctggcatttctgacgtcaacgtttcatcatttacttacccatccggcaccggaaggccgcaaaatcaatcagccgcgtgcactgattatggccccgacccgcgaactcgcggtacagatccattctgacgccgaaccactgtctcagcttaccggactgaaaaccggcctggcttacggcggtgacggctacgacaaacaaatcaaagtgctggatgaaggcgtcgatgtgattatcggcaccaccgggcgcttaatcgacttcgccaaacagggccgtctcgacctgagtgccattcaggttgtcgttctcgatgaagctgaccgtatgtacgatctcggctttatcaaagatatccgctggctgttccgccatatgccgccatgtgcggagcgtatgaacctgctgttctccgcgacactctcctaccgcgtccgtgagctcgcgtttgagcagatgaacaacccggaatacattgaaattgaaccggaacagcgtaccggtcaccggatcaaagaagagttattctatccgtccaacgaagaaaaaatgcgccttctccagacactgctggaagaagagtggccggatcgctgcattattttcgctaataccaaacaccgctgtgaagatatctgggcacacctggcggctgacggccaccgtgtcggcctgctgaccggcgatgtggcgcagaaaaaacgtctgcgtatcctcgaggatttcactcacggtaatctggatattctggtggcaacggatgttgcggcccgtggtctgcatatcccgtccgtgactcacgtctttaactatgatctgccggatgactgtgaagattatgttcaccgtatcggccgtaccgggcgtgccggggaaagtggtcactctatcagcctggcctgtgaagagtacgctctgaacctgcctgcgattgaagaatataccggccatccgatcccggtcagtaaatacaacagcgatgcactgctgactgatctgccggtgccgaagcgccgtcgtcgtccgccgcgcaccgggggggggcagaaccgccgcaatatgccgcgccgcagcagcaacgggccgcgtcataacaataaccgcaccaaacgctga

SEQ ID NO: 276723 - DNA, 327 bp, Morganella morganii
atgagcgataaaattattcacctgactgattccgttttcgaacaaagcgtattaaaagcaaacggccctgtgctcgttgatttttgggcagcctggtgtggcccgtgtaaaatgattgcccctattctagacgaaatcgccgacgaatatgcagggaaaatcactatcgcaaaactgaacattgatgataatccgcagacagcgccgcaatacggcatccgcggtatcccgacattactgctgttcaaagacggcgtggtgaaggcaacgcaggttggtgcggtatccaaaacccagctgaaaacctttatcgataacaatatctga

SEQ ID NO: 276724 - DNA, 1260 bp, Morganella morganii
atgaatcttaccgaattaaagaatacgccggtatcagagctgattactcttggcgaaaatatggggctggaaaacctggcccgcatgagaaaacaggacatcatcttctctatcctcaagcagcacgcgaagagcggcgaggatattttcggtgacggtgtgctggaaatattgcaggacggctttggtttcctccgctccggtgacagttcatacctcgcaggtcctgatgatatctacgtttctcccagccaaatccgccgttttaacctccgtaccggtgacaccatttcaggtaaaatccgtccgccgaaggaaggcgagcgctattttgccctgctgaaagttaacgaagttaactatgacaaaccagaaaacgcccgcagtaaaatcctgtttgaaaacttaacgccgctgcacgcaaaccgtcgtctgcgtatggagcgcggtaatggttcaacagaggatttaaccgcccgtgttcttgatctggccgcccctatcggccgtggtcagcgtggtctgattgtggcaccgccgaaagccggtaaaaccatgctgctgcagaatatcgcagccaatatcgcacataactaccctgactgtgtgctgatggttctgctgatcgacgaacgtccggaagaagtgaccgagatgcagcgtctggttaaaggtgaagttatcgcatccacctttgatgaaccggcagcgcgtcacgttcaggtcgcggaaatggttatcgagaaagccaaacgcctggttgagcataaaaaagatgtcatcatcctgctcgactctattacccgtctggcccgtgcctacaacaccgtggttccttcctccggtaaagtactgaccggtggtgtggacgccaacgccctgcatcgtcctaagcgtttcttcggtgctgcgcgtaacgtggaagagggcggaagcctgactatcatcgcaacggcgctggttgataccgggtcgaagatggatgaagttatctacgaagagtttaaaggtacaggtaacatggaattacacctgtcccgtaagattgcagaaaaacgtgtcttcccggcgattgattacaaccgttccggtacacgtaaagaagagctgctgaccactcaggacgaactgcagaaaatgtggatcctgcgcaaaattatccatccgatgggtgagattgatgcaatggagttcctgattaacaaactcgcgatgacgaagaccaacgaagagttcttcgacttcatgaaacgctcgtag

SEQ ID NO: 276725 - DNA, 1077 bp, Morganella morganii
atgttaactgaactcctaatcatatttgtgttcgccacagcgacggtctttgttgcccgtaaggctggcgtcgctgtcggtttggtggataaacccaattaccgcaaaaagcatcagggactggtcccgctggtcggcggaatatctatttttatcagtgtctgcttcgctttcctcatcagtgatgagtttattgcgcataaatttatttatctcgggtgcgccggtgcactggtgctggtcggggcgctcgatgaccggtttgacctcagtgtgaaactgcgggccggtgttcaggcagtggttgctatcattatgatggtgtttgccaacctgaaaatcgacagcctggggcatgcattcgggccgtgggaactgacactcgggccgttcagctatgtgctgacactgtttgcggtatggggcgcggtgaatgcgttcaatatggtggatggtatcgacgggctgctcggcgggctttcctgtgtctctttcggcgcgctggggatcctgtttgccctgagcggtaacagcggtctggcattctggtgctttacctttatcgccgccattctgccgtatatctgctttaacctcgggctgttcggccgccgttttaaagtgtttatgggggatgcgggcagtacgctgatcgggttcaccattatctggctgctgacatcggcctcacagggcggggagccgcatgcgattaatgcagtgaccgcactgtggattatcgccattccgctgatggatatggtggccattatgtaccgccgtctgcgcaaagggatgagcccgttttcaccggatcgccagcatattcatcatctgattatgcgttccggatttacgtcccgcgaatcctttgtggtgataacccttgctgcggcagtattagcggctatcggtattgccggacaggtactcagctttgtccctgagtgggtgatgctggcactgttcttgcttgcttttattatgtacggctactgcataaaacgcgcctggaaagttgcccgttttatcaaacgccacagacgccgcgtgcgtcgtaaatcggtcacacactaa

SEQ ID NO: 276726 - DNA, 1056 bp, Morganella morganii
atgcgttcagaaaatactccggacccgcaacaaacgcagtatgaccaggaattagatatccgcgcgttatttatgtcgttatggcgcggaaaattatggatagccgggatggcggttgtgtttgcgctggttgcattgggtgccagttattttatgcagcagaagtggaattccacggcgatcacggattatccgaccgttaataatttaggcggatattattcccagcagcaatttatgcgtaatctggacacgcatctgaatgccgctcaggaatcttcagcactgctgccgatcccgaatgaggcctaccaggaatttattacccaggcggcatcttatgatacccgccgtgatttctggttacagacggattactacaagtcccgcatggaaaatgatgccaaagcagatgcggcgctgctggacgaaatgatcaataacatcacgctgaccccgcgtgatgatacgaagaaactggtgaatgatacgctgacgctgactgcggaatctgcggcggactccgcgaaactgctgagtcagtatgtggattttgccaacgcgcgtgcggctcagaatcttaacgatgagctgaaaggggcgtgggcgacccggtcacagtcactgaaagcactggtcaaacgccagaagatggtggcggaatcgctgtatcagcgtgaaaccggacagctgaaaaatgctatcgcgaccgcacagaaacagggtatcagccgcagccggacagatgtgcctgccgacgaactgccgtcctcccagctgttcctgttaggtacgccgatgttacaggcacgtctggagacactggaagccgccggaccggagtttgataaagattacgagcagaacattgctatgctgtcgacgctgaatgtgggtcctgcgctggaagataacttccgcgcctaccgctatctgcggacaccggatgagccggtaaaacgtgacagcccgcgccgtgccttcatgatgattatgtggggctttatcggtgctctgaccggtgccggtgtggcgctggtccgccgccgtccgtaa

SEQ ID NO: 276727 - DNA, 1131 bp, Morganella morganii
gtgaaagtattgactgtatttggtacccgcccggaagctatcaaaatggctccgctggtacatgcgctggcagcggatcaggcttttgaggcaaaagtctgtgtgaccgcgcagcatcgtgaaatgctggatcaggtattacacctttttgagatcacaccggattatgatctcaatattatgcgcccgggacaggatttaactgatattacctgtcgtattcttgagggtttgaagccggtactggccgactttaaaccggatgtcgttctggttcacggcgataccgcaaccaccatggcaacgagcctggcggcgttctaccagcggatccctgtgggtcatgtggaagctggtctgcgcaccggaaacctgtactcaccatggccggaagaagccaaccgcaaaattgccggacatctggcgatgtaccatttcgcgccgacacaaaattcgcgcgaaaacctgctgcgcgaaggtatccgtgataatcatattttcgtcaccggcaacacggtgattgatgcgctgctcgcggtccgtgatcgcatcatgcaggacaaagccctgctggcgcagctggatgcacagtatccgtttatcgacagcagcaaaaaaatgattctggtcaccgggcaccgccgtgagagtttcggcggcgggtttgagcggatttgccacgcgctggcggaaattgccacgacccatccggaagttcagattgtctacccggttcacctcaatccgaatgtcagtgagccggtaaaacggatcctgcatgatatcagcaatattgtgctgatcagtccgcaggattaccttccttttgtctaccttatgaaccatgcttatatgatcctgaccgactcaggcggtattcaggaagaagcaccgtcattaggtaaaccggttctggtgatgcgtgataccaccgaacgtccggaggcgattgacgccgggactgttcgtctggtcggcactgaaaccggcactatcgttcgtgaagtaacgcgattgctgaccgatccggcggcttatcatgagatgagccgttcacataacccttacggggacggaaaagcgtgccagcgtattcttgaagcattgaaaaacaatcaggtgacattatga

SEQ ID NO: 276728 - DNA, 1263 bp, Morganella morganii
atgagttttgaaactatttctgttgtcggtctgggttatatcggtttaccaacagcggcagcttttgcctcccgtcagaagaaagtggttggtgtggatgtgaaccagcatgcggttgataccattaaccgtggtgaaattcatattgtggagccggacctgggcgcggttgtaaaaacagctgtggaaggcggtttcctgaaagccttcaccaaacctcagcctgctgatgcattcctgattgccgtaccgacaccgtttaaaggtgatcacgagccggatctggcttttgtgcagtctgcggcggaatctattgccccggtactgaaaaaaggtgacctgattattctcgaatccacctcgccggtcggtgcgactgagcagatggcagagtggctggcagcggcacgtcctgacctgacttttccgcagcaggcgggtgaagaatctgatatcgatatcgcctattgccctgagcgtgtattaccgggccaggtgatggtcgaactgattaaaaacgaccgtgtggtcggcgggatgacaccaaaatcctcaaaacgcgccagtgaactctattacatcttcctggaaggtgagtgtgtcattactaacgcgcgcacggctgagatgtgcaaactgaccgaaaacagcttccgcgatgtgaacattgcgttcgcgaatgaattatcactgatttgtgctgaccagggcatcaatgtctgggagctgatcagtctggcaaaccgccatccgcgtgtgaatatcctgcagccgggtccgggtgtcggcggccactgtatcgcggttgacccgtggtttatcgtggcgcagaacccgaaacaggcccgtctgatccacactgcgcgtctggttaacgacggcaaaccactgtgggttatcgatcaggtaaaacaagcggttgctgattgcctgactgaaaccggcaaacgagccaatgaagtgacgattgcctgctttggcctggcattcaaaccaaatatcgacgatctgcgtgaaagccctgcggttcaggtcaccaaaatggtggcagagtggcatgcagggaaaactctggcggttgagccgaacgttcatgaactgccgggcaaactgaaaggtctgacagagctggtttccatcgaaaaagcgattactgacgcggatattattctgctgctggtcgatcacacgccgttcagaggcattccgggcagccagatcccgcagaaatggatcatcgataccaaaggagtatggcgttga

SEQ ID NO: 276729 - DNA, 1074 bp, Morganella morganii
ttgaaacgtattttagtgacaggcggagccggttttatcggctctgcggttgttcgtcatattatccgtgatactgctgacagcgtggtggtggtggataaactgacttacgccggtaacctcgaatcactggcaccggtggcggctgacccgcgctatgcctttgaacaggtggatatctgtgaccgcgcggcgcttgaccgcgtgttcgcacagtatcagccggatgcggtgatgcatctggcggcggaaagtcatgtggatcgctccatcgacggcccggcggcgtttatcgaaaccaacattgtgggcacttacacactgctggaagctgcgcgccattactggacggcactggatgcggagaaaaaatccgcattccgtttccaccatatttccactgatgaagtttacggtgacctcgaagggcctgacggctttttcacggaaaccacaccgtatgcaccgagcagcccgtactctgcctccaaagcctccagtgaccatctggtacgcgcctggcagcggacttacggcttcccgtccgtgatcaccaactgctcaaataactacgggccgtatcacttcccggaaaaactgatcccgctggtgattctcaatgcgatttccggcaaaccgctgccggtttacggtaaaggtgaacagatccgcgactggctgtttgtcgatgaccatgcccgcgccctgtataccgtggtgacacaggcaaacatcggtgaaacctacaatatcggcggccataacgagcgcaaaaatattcaggtggtggaaactatctgtgagctgctcgaagagctgcatccgcagaaaccggccggtgtcgcgaaataccgcgaccttatcacctatgtgacagaccgtccgggccatgatctgcgctatgcgattgatgcggacaaaattgagcgcgacctgggctggcgcccgcaggaaacgtttgagtccggtatccgcaaaaccgtggaatggtatctgaataatgaaacctggtggcgccgggtgcaggacggctcgtatgccggacagcgtctgggactgggtcaggataagtaa

SEQ ID NO: 276730 - DNA, 882 bp, Morganella morganii
atgaaaggaattattctggcgggcggctccggaacccggttgcacccgatcacccgaggggtgtcaaaacagctgctgccgatttacgacaagccgatgatctactatccgctgtccgtgctgatgctggccgggatccgcgaagtcctgatcatctcaacaccggaagatctgccgtcattccgccgtctgctgggcaacggtgatcagttcggcatctctctgagctatgcggaacagccgtcaccggacggcctggcacaggcctttatcatcggtgaggaatttatcggtgatgacagctgcagcctggtgctgggggataatattttcttcggccatgcattcagcccgaaactgaaaagtgtcgcggcccggacgcagggcgcgactgttttcggctatcaggtgatggatccggaacgtttcggtgtggtggagtttgatgatgaattccgtgccctgtcgatagaagaaaaaccggcgcatccgaaatccaactgggcggttaccgggttgtatttctatgataatcaggtggttgatatcgccagacaggtgaaaccgtctgagcgcggcgaactggaaatcaccagtatcaaccagatgtatctggagcgcggtgaactgaatgttgagctgctcggccggggttttgcctggctggacaccggcactcacgacagcctgattgaagccagcacttttgtgcagacggttgaaaaacgtcagggctttaaaattgcctgtctggaagagattgcctggcgcaacggctggctgaatgacgaacaggtggcggaatctgcccgtcagctggcgaagaccggttatggtcagtatctgaagaatttactccatgtccgtccgcgccagtattga

SEQ ID NO: 276731 - DNA, 726 bp, Morganella morganii
atgtccgtccgcgccagtattgagcacctcgcctgggaaagtgacttttttgccctgaaaaccgcaaaactggcattttccccggacgcagcaccactgtctgcggcagatttcgcgccgtatgagctggtgcaggccaaaatcagtgccggggataacgcggcactggacggtttatcagctctcggcttttccctcgcggaaagtgaggtggattttgcattgtcactcaggagtggcacagaaaatgcaatgtctgacagtacactctgttatgcggatgaaacggatatcccggtgataaaacaggcggcggcacaggttttcagtcagagccgtttccgtgccccgtggtaccagccggatgacagcgcccgcttttatgcggtgtgggcggaaaaagcggtacgcgggacattcgataaagactgtctgcttatccgcaataaaaacaatgagattgccgggtttgttactctccgccagacagatgaacacagcgcccgcatcgggctgctggcggtactgccgggcaatcagagccagggtatcggcctgaaattaatgtcggcggcgcaacagtggtgtgcagtacatcactgccgggtattacgggtggcgacacagctcagtaatattgcggcaatgcgcctttatacaaaaagcggtggtgcggttgacagcactgcctactggttataccgaggatgcaatgattccatttaa

SEQ ID NO: 276732 - DNA, 1131 bp, Morganella morganii
atgattccatttaataaaccacctgtagtcggcactgaagttgaatatatgcagcaggccatgaaaagcggcaagctgtgcggtgacggttcgttcaccaaaaaatgcgaagagtggatggaaaaacggttcggcagcgccaaagttctgctgaccccgtcctgtaccgcctcactggaaatggcggcaatcctgctggatattcagccgggtgatgaagtcatcatgccgagctataccttcgtctccacctccaacgcctttgtgctgcgcggtgcgaaagtggtgtttgttgatatccgtccggacaccatgaatatcgatgaaaccaagatcgaagcggctatcacggataaaaccaaagcgattgtaccggtgcattatgcaggcgtggcctgtgaaatggacgtcatcatggcgctggcgaaaaaatataacctctttgtggtggaagatgccgcgcagggcgtgatgtcaacttataaaggccgcgcgctgggctctatcggccatatcggctgctacagcttccatgaaaccaaaaactactcctccggcggagagggcggtgccaccctgattaacgatccggcaatgattggccgtgcggaaatcatccgtgagaaagggaccaaccgcagcgaattcttccgcggccaggtggataaatacacctggcgtgatatcggctccagctacctgatgtccgacttacaggccgcatacctgtgggcacagctggaagaagcggaaaaaatcaacgagcgccgtctggcattctggcagatttactatgatgccctgactccgctggcgcaggatggtctgctgacactgccggttgttccggaaaatctggagcagaacgcgcacatgttctacatcaaactgaaagatgtggcagagcgcaccgcattcagcgaatacatgaaagccaatgacgtgctgaccgtgttccactatgtgccgctgcacagttgcccggcgggtatggagttcggccgtttccacggtgaggatatctttaccacccgtgaaagtgagcgcctggtgcgtctgccgatgttctacaacatgacagaagaagagcagcagcgtgtgatccacctgattaagggcttcttcgcgtag

SEQ ID NO: 276733 - DNA, 1254 bp, Morganella morganii
atgtccttagccaaagcctctgtctggaccgccggctccaccctgatcaaaatcggggcggggctgctggttattaaattaatggcactgacattcggcccggccggtatcggtcaggctctgaacttccgccagctgattacggtgctgggggtattgtcaggtgccggtatttttaacggcgtgaccaaatatatcgccgagcaccgtgatgatgcggaaaaacgccgggcggtgttaggcacgtcctcaaccctgattctggtgttttcgacactgctggcgattgtgtttctgctgttcagcagaccgatcagcatggcgctgtttgacggtaatgacgcttaccaggatgttgttgcggcggtggcctttatccagatgggtattgcttacgccaactattttctcgcgattatcaaaggataccgggatgcgtccggcaatgcgctggcgctgatcgcgggcagtctgatcggtgtcactgcgtattatctctgccagcgctggtggggctatgacggcgcactggccgggctggcactggtgccggcgctgattattattccggcttttgccatgttgctgcgccgccgccatttcccgctttccgagctgaaaccggcctgggatcgggcgattgcatcccatctggggaaattcaccctgatggcgctgatgacggcggtcacactgccggtggcgtatatcatgatgcggaacctgctggcctcccgctacagctgggatgaggtggggatatggggtggcgtgaccagtatttcggacgcttatctccagtttattaccgcgtcgttttctgtctatctgctgccgacattatcgcggttacaggcaaaaagtgatatccgccgtgagatcatcaaatcactgaaatttgtgttaccggcagtggctgcagccagttttatggtctggctgctgcgtgattttgctatctggctgctgttcacggataaatttaccggcatgcgtgacctgtttgcctggcaactggtcggtgatgtcctgaaagtgggtgcttacgttttcggttatctggtgattgccaaggccgcactgcggttttatatcctcacggaagtgacccagtttgctttactgacgctgtccgcgtactggctgattccggcacacggtgccgtcggcgcggcacaggcctatatgctgacatatattatctacttccttttgtgttgtagcgtatttctgatctattgcaggcgagcatga

SEQ ID NO: 276734 - DNA, 1089 bp, Morganella morganii
atgacaactttaattcacgttttaggatctgatatcccgcatcataaccagaccgtgctgcgcttcttcaatgatgtgctggcaccgcagctgccgcgtgaggaaatgcctgaatttatggttgtttccactgccgggcagcttctggcgcaatatcccaacctggaactggatgtctggccggataaaaaaagcctggcgaatgccgtcacagcgaaagcaaaacgtgaccggcagtgccgctttttcttccatggtcagtttaatgccctgatctggctggcattattatcaggaaaaattaaacgtcatcagttttactggcatatctggggcgcggatttgtatgaggattcccgtcagctgaaattcagactgttttatcatctgcgccgcctggcacagaaacgggtcggtcatgtgttcggcacgcgcggcgatttaaactattttgcccagttctgcccgaagatcccggctgacctgctctatttcccgacgcggatggatccctctctgacggttttaacgccgcctgagccgcgtggtgacgataatatgatgatcctgctgggtaactcgggtgaccgttcaaaccgccataaagaggcactgacgcgtattcatgagcaattcggggagaaggtgaaaatcattatcccgatgggctatccggaaaacaacggggactatattgcggaagtggatgctttcgcgcagcaactgttccctcagcagcagacagagatcctgaaagacaaaatggattttgatatctatctgaatctgctgaaacaatgcgacctcggctactttatctttaaccgccagcaggggatcggcacactgtgtctgctgatccagttcggtattccgtttgtgataagccgtcagaacccgttctggcaggatatgaccgagcagcaggtgccggtgctgttttacggtgatgatgtgacaccggatgtggtggcgcaggcgcgggaacagctgtttgctctcgaccgtgaaaaaattgccttcttcagcccgaactttgtgcagggctgggagctggcactggccgccgcgcaggagaaacaggcatga

SEQ ID NO: 276735 - DNA, 1356 bp, Morganella morganii
atgagtcagtttgatttcatcgggctgtttgccgtctggtttatctcgctggcctttattctgctgctgacctaccgcgaattccgccgggtccgcttcagttttaatatctttttctccatgctctatctgctgacgttctttttcggcttcccgtttacctttgcactggtgttccagtttgatgtacaggtggtgccgccgtccgcgctgttacaggcgctgctggcgtcagtcagtttctatgccatttattatgtggcgtataaaacccggctgcgcagacctgacgcggtttacagcggtacgccgctgttttccatgaacaaaacagaaacccggctcacctggctgctgctggcggcgattgccgtcgcgaccgccggtattttctttatggaaaacggactgctgctgtttaagctgaaaacctacagtcagattttctcgagccaggtcaccggcgtggccttaaagcgctttttctacttctttatcccggcgatgctggtggtgttcttcctgaaacccacatttcagcgctggattttcttcctgatcaccacggtggcgttcgggattatgacttatgtgattgtcggcggtacccgcgccaacatcattatcgcgtttgcgctgttcctgtttatcggcattgtgcgcggctggatttcgctgtggatgctggtcagcgccggggtcttcggcgtggtggggatgttctggctggctcttaaacgctacagcctggatgtcagtggggcggaagcgttttatacgttcctctatctgacccgcgataccttctcgccgtgggaaaacctcggcctgctgctgaataactacgacaaaattgagttccaggggctggcgccgattatccgtgacttctatgtctttatcccgtcctggctgtggccggaccggccggataccgtactgaatgcggcaaactattttacctgggaagtgctgaacaaccattccgggctggcgatttcaccgaccctgatcggctcgctggtggtgatgggcggcttctggtttattccgctcggtgcagtggtggtcgggctgataatcaaatggttcgactggctgtatgagctgggcaaacgggagacaaaccgttacaaagcggccattctgcatgcattttgtttcggcgcgatatttaacatgattgtgctggcccgcgaaggaatggactcattcgtttcccgcgtggtgtttttctgtcttattttcggcttttgtctggtggtggcgaaattactgtactggctgttcgaaacggccgggcttatccgccattatgtgatttcaaagggcaaacgcacccgtctttcatcgtaa

SEQ ID NO: 276736 - DNA, 762 bp, Morganella morganii
atggaaccgttatcttctgatgccggcagcgcggaaaatatcccgcagtattctatccgtaaccacccgattcagggtttccggaatcaggcacattttctggattatctgtttaaggacggacagatcagaaccggtacactggtggccattaatgctgaaaaagtcatgaccgccgaacaggatgaggcgctgcacacactgctgagcaacgcggaatatctgtatgcggacgggatcagcattgttcgtgctatccgccgcaaatacccgcaggcggatgtctcgcggattgccggggcggatttgtgggaagggctgatggaacgcgccggacaggaaaacacgccggtgtttctggtcggcggcaagccggaagtgctggcggaaaccgaagccaaactgaaagcacagtggaatgtcaatctggcaggcacgcaggatggttatttcaccgcagaacagcgtgatgtcctgtttgagcgtatccgcgacagcggcgcaaaaatcgtgacagtggcaatgggctcgccgaaacaggaaatctttatgcgcgactgccgtaagatccacccggatgccctgtatatgggcgtgggcggtacttacgacgtctttaccggtcatgtgaagcgtgcgccgaaggtgtggcagaacatgggactggagtggctctaccgcctgttatcacaaccgacccgcttccgccgtcagttaaaactgctgaaatttctgggttattactacggtaataaattataa

SEQ ID NO: 276737 - DNA, 1209 bp, Morganella morganii
atgtttaaagtctttattctgtttcttatcctgattgccgggattattgtcggcccgctgatggccggacatcagggttatgtcctgatccagaccaataattttgatattgaaaccagtgtcaccggcctgatcatcatcttcctggtacttcaggcggttctgatgctgctgggctggtgctggcgtcgtctgaaaagcggcagctcccgcaccctcggctggtttggcggtcataaacgcaaccgcgcccgtgcgctgaccaacgatgcgctgctcaaactggcggaaggggatttccgtcaggtggaaaaattactgagccgcagtgcagataatgccgagcaaccgctggtcaactatctgctggcagcggaagcagcacagcagcgcagcgataatctccgcgccaatcagtatctggagcgggcttccgagctggcagggcgtcatcagttaccggtggatatcacccgtgcccgtattctgctgagccgcgatgaaattccggcggcgagaaccgctatcgataatctgctggaagtcgcaccgcgccatccggaagtactgcgtctggcggaacaggtgtatgcgcgctccggtgcctggaaatccctgattgccattctgccgcagatgaaaaaatacggcgaatttacggatgagcaggttgaacagacggagatccgtgcctggctcggtatgatgcagcaggttgcggatcaggacggcagcgatgcgctgcgccactggtggaaaaatctcagccgccatctgcgccacaatccggagatggccgtggcggccgcgcagcactttatcgccggtgatgatatggcggatgcggaagcggtggtgctcgacggactgaagcgtcagaaagatcagcgcctgctgatgctgctgccgcagatccggacagacaatccaaaagccatccgcaaggtgctgaaccagatgcagaaggaagatgcggatcagccgctgctcaacagtaccctcgggcagctggccatgcaggaaacacgctgggaagatgcggagaaatactttaaatccgcgctgagcgtccgtcaggacacccatgatgccgcctggctggccgatgtgctggataagcagaaaaagtatgaggaatctgccatgatccgccgtaatgctctgctcaataccctgacgttaccggatgaaaaaacgccccgcgaataa

SEQ ID NO: 276738 - DNA, 1374 bp, Morganella morganii
atgacggaacacgaaaaaaaaaccggatcggctgatgtacctgagacacaggatgccgtaaccggcaccgatccgcaggcagagaaaaaagagacaactgccgggaaaaaagcgaccgcaaaaaacgtcactgacaaagcggcgtctgataaaaaaccagcggaaacaccggcggctgacagtaaaccggctgataccgcgccgaaaccggcaccggaagcgccgcagccacggaaaaccccgcctgccgctgaggaaaaacagccctccggctttctgcgcggtgctatcgccctggccgttatcctgctgatcggcggtggtgtctggtatgcctcacaggccggtactcagacgctgtcgaaaaacctggaagcggaaaatgcacagctgaaatctcagatggcacagctgcagcaggaacagcagcagacacaaaaacagatgcaggaatttatcgcgcagcagtctgcactcagcgcacagcatcagcagcaggaagaggctctgaaacacgagctggatttactgcgcagccgtgtcaccgcgctgtccagtaccgatgtgaaaagctggctgctggctcaggcggatttcctggtcaaaatggcagagcgcaaactgtggaatgaccaggatgtggtcaccgcgatggtactgctgaaaaatgccgatgccagcctcgccgaaatgaatgatccgggtctgctcgatgtgcgtaccgcgctgcgtaatgacattacggcactctccgccgtcagtcagatcgattttgacggcacgatcctgcgcctgaaccagcttgccggtcaggtggataatctgcgtctggatgacggcagccgtgacggcgcgccgatggacagcagtgacagtgaagggctgacctcctccgttgcggactggcgcactaacctgaccaaaagctggaaagggtttatgaatgatttcatcaccatccgccgccgtgacaacacctctgctccgctgctggcaccgaatcaggacatttatgtccgtgagaatatccgcgcccagttactgatcgctgctcaggcggtgccgcgtcaccaggaagagagctacaaacagtcactggatgcggtctccacctgggtccgtgcctatttctctgacagcgatccgaccaacgccgccttcctggccgaagtggatgcgctggccgcccagccgatctcaatgagtgcgccggacagcctgaccagccagccgctgctggataaactggtacagacccgcatccgccgcctgctcaacgatgaaaccccgccgccggcaccggctgaggcaccgcaggaaacacctgctgctgcaccggcacagccggaagcggcaccgcaacaggagggataa

SEQ ID NO: 276739 - DNA, 738 bp, Morganella morganii
atgaccatcctggtcacccgtccctcaccggccggtgaagccctggtcagcgccctgcgctcacgcgggcagaatgccctttctgccccgctcatccgtatttcccccggatatgagctgccgttgctgattgccaaaatcgcggcactttctcccggagatgccctttttctgctttcaaagaatgcggtttgtcacgcaaatgaacagcttattcaacagaattacctgtggtctgataagctttgctattatgggattggtcagtcaaccgctaactgctttgaacaactgaccggattccccgccgcctttatgcccggcggggaaaccagcgaacatctgctgaccctgccggacttacaggatatgaccggccgccgcgcacttctgctgcgcggtaacggcggcagagagcatctggcacagacattgcgcgaacggggcgcagtggtggattactgtgaatgttaccgccgcgaacctgagaattacgacggcggagaatgcgccctgttgtggcagcagcaacaggttcagacgctggtcgtgaccagcggcgaaatgctgcacctgctgcggcagctgataccggccgcgcatctcggctggctgctgcaatgccggattattgttgtcagtgacagactggcagctatcgcacaatcactgggctggcagaatattgatgtcgccgccggtgcagataatgaagccttacttcaggctcttcaatga

SEQ ID NO: 276740 - DNA, 942 bp, Morganella morganii
atgaccactcaatctctgcgtattgccacccgtcaaagcccgcttgcactgtggcaggccgaatttgtcagacaggaactggaactgcgccaccccgggctgcacgtcgagctcgtcccgatggtcaccaaaggtgacattattctcgacacaccgctggcgaaagtcggcggcaaagggctgttcgtcaaagaactggaactggcattactggaaaaccgggcggatatcgccgtgcactccatgaaggatgtcccggtcgatttccctgacggactgggattagtcactatctgtgagcgggaagacccgcgcgatgcctttgtttccaaccactatgacagtgtggatgccctgccgcccggcagtatcgtcggcacttccagtctgcgtcgtcagtgtcagctgcgcgaacgccgccctgatctggtgatccgcgacctgcgcggtaatgtcggcacccggctgggcaaactggataacggcgactatgacgcgattatcctggcggtcgccgggctgaaacgcctgaaactggatgaacgcatccgctgtgcactgccgccggaagagtcccttcccgctgtcggccagggtgcggtcgggattgagtgccgcctggatgatgaacgtacccgttctttactcagcgtcctgaatcatgcgcagaccgatatctgtgtccgtgccgaacgtgccatgaatacccggctggaaggagggtgtcaggtgcctatcggcagttatgctatctggcagggggataaaatctggctgcgcgcgctggtcggcgcaccggacggcagtgaaattgtccgcggtgaacgcctgtgcgacccgcaggacgccgccgccgccggggtttctctcgcagaggaactgctggataacggcgcccggggtatcctgacggaagtctatcaggggcacacgcctgcatga

SEQ ID NO: 276741 - DNA, 2601 bp, Morganella morganii
ttgtatctttatattgaaacactcaagcagcgtttggatgcaataaatcagctcagatctgagcgcgcgaccatcgggatgagtcgtgcgtttaaagacgtgtacagtctgctgccggtactgctgcatcatcaccatccggatatgccgggctatgtgccgggtaatgtgccgcacggtgtctgtttctgggcgtccgatgattaccagtcacactggctggcggagttttcccgtcagcacggagagtgtctgccgtgcaatgccggcggcgaactgccgattaccggtatctattccatgggcagcacctcgtctgtcggccagagccactcttctgatctcgatatctgggtctgtcatcagtcctggcttgatcacgatgaaaaacagaacctgcgccgcaaatgcacactgattgaagagtgggcagccgcaaaaggtatcgatgtcactttcttcctgatcgatgaaaaccgtttccgccacaatgccagcggcagcctcaacggtgaggactgcggctcgacccagcatattttactgctcgatgaattttaccggaccgccgtgcggatggccggtaagcgtctgctgtgggccatggttccggcagaagaagaacatcactatgatgaatatgttctctccctttatgcgcagggtgtattaaccccgaacgaatggctggatctgggcggtctgggcgaattgtctgcggaagagtacttcggtgccagtctgtggcagctctataagagtgtggattccccgtataaagccgtgatcaaaagtttactgctggaagcttactcgtgggattacccgaacgggcagcttctggcaactgagtttaaaaagcatctgcatgccggtgagattgttcaccacggcctggatgcttacgcgatgatgctcgaccgcgtcacccgttatctgaaagctatcaatgatgaaacccgccttgatctgatccgccgctgtttctacctgaaagtgtgtgagaaaccgcctgcagatgtcagcgaacgcgcatcctgcggctgctgcggctggcgctgtcaggtgctgtctgagatggtgaaaggctggggctggtcccaggagcggctggctgtgctggatcgccgtaatgcctggaaaattgagcaggtgcgggatgcgcacaatgagctgctcgataccatgatgcagagctaccgcaaccttatccgctttgcgcgccgcaataatctgagtgtcagtgccagcccgcaggatatcggcgtgctgacacggaaactgtatgccgctttcgaggcgctgccggggaaagtcaccctggtcaacccgcagatttcgccggacttgtcagaagagaatctgacctttatttatgttccgccgggccgcgccaaccgcagcggctggtatctgtataatcaggcgccgacaatccataccatcatcggccatcagccgctggaatataaccgctatctgaataagctggtctcctggacttacttcaacggccttctgacagacagaacccgcgtctatattcataacggtgagtcacactgcgatgagcagaaactgcacgagctggtgcatgatgtatcacagaatttccctatccgtctgcctgccccgacaccgcgtgcgctgtacagcccgtgtgaaatccgtcatctggcgattattgtcaatctggagcaggatccgaccgcagatttcgccgagcaggtcgtgcattttgatatgagcaagctggatgtgttcagtttcggtcaggagcagaaatgcctggtcggcagtattgatctgctgtaccgcaactcctggaatgaagtgcgcacactgcatttcagcggtgaacagtcggtgctggaagccctgaaaactattctcggcaagatgcaccaggatgctgctccgccgtccggcgtggaagtgttctgctacagccgccatctgcgcgggttgatcagtacccgcatccgccagctggtttccgaatgtattgagctgcgcctgaccaccaaccgtcaggatccgggccgctttaaggcactgcgcctggccggtcagacctgggggctgttctttgagcgccttaacgtctcggtgcagaaactggaaaatgccgtggaattctacggtgcgatttccaacaacaaactgcgcgggtttccggtgaaaatcagcacggaaaccggtcatctgccggatgtggtggacggttatgccagtgaggggattattcagttcttctttgaaaaccgtgatgataacggcttcaatatttatgtgctggatgaatcaaaccgggtggaaatctattccggctgtgaaggcagcaaagaagacctgatccgggatgtcagccggttctattcctcttcccatgaccgcttcacttatggttcaagctttatcaatttcaatctgccgcagttttatcagatcctgaaaacggacggtaaaacacaggttacaccgttccacagcacgatgttctcccagcctgtgacggaagagccgcgtgatgccccgtatccggattttcatgcggatgtccggccgttacagtatcaggccgccgggcagcgcggctga

SEQ ID NO: 276742 - DNA, 318 bp, Morganella morganii
atgaacgatacagaatttcaccggacagccgatgcgctgttgcaggatattgaagcaaaattagatgattacgacggtgatgcggatattgactgtgaaaccaacggcggtgtgatgaccctgagctttgaaaacggctcaaaaattatcatcaacaagcaggaagcatttcatcagatctggctggcggcacgtaatggcggctatcattttgatctgaaatcagataaatggatttgtgaccgcagcggcggcgagctgtttgccatgctggcacaggccatcagcgagcagagcggcgaaccgttcagcttctga

SEQ ID NO: 276743 - DNA, 192 bp, Morganella morganii
atgaagaaaaaaatgatctgtgcggtatccgccgtgatgctgctgaccctgtccggctgcggactcaaaggcccgctttacttcccgccggaagagcctgccgccgcgaaaagcgcgcctgcagccaagcctgcggcagagcagtctgctgtgcagactgacaacgctgagaccggcaaaacgcaaaaatga

SEQ ID NO: 276744 - DNA, 825 bp, Morganella morganii
atgcagttcaccaaaatgcacggcctgggtaatgattttatggtggtggacgccgtcacccagaatatctatttttctccggagcttatctgccgtctggcagaccggcacaccggtgtcggctttgatcagctgctggtggtggaagcaccctatgacccggagctggattttcactaccgcatctttaacgccgacggcagtgaggtggcgcagtgcggcaacggcgcgcgctgttttgcccgttttgtccgcctcaaagggctgaccaacaaacgggatatccgtgtcagcacacagtccggacgtatggtgctcacgattgccgatgatgacaatgtccgcgtgaatatgggcgtgccggagtttgaaccggctctggtaccgttccgcgcggttaaagaagagaaaacctatattatccgcgccgccgaacgcacggttctgtgcggtgtggtgtcaatggggaatccgcactgtgttatccaggtggagagcacggaaacggcggaagttgaggttatcggcccggttctggaaagtcacgagcgcttcccggagcgggcaaatatcggctttatgcagatcctgtcgcgtgaccacatccgtctgcgcgtatacgagcgcggtgtcggtgaaacacaggcctgcggcagcggcgcctgtgcggcggtctctgtcgggatccgccagggtctgctggcagaaaatgtgcaggtggatttacccggcggtaccttgtttatcagctgggaaggggagggaaaacccctgtttatgaccggcccggccacgcatgtatatgatggtgttatccatctttaa

SEQ ID NO: 276745 - DNA, 711 bp, Morganella morganii
atggacagtcaacaggataccgccgtattcgccccttccggagagccggatgagacggcggtgctggcgtatctgaaagcgcatccggattttttcatccgcaatgccgcgcagatcactgacatgactatcccgcacccggtaaaaggtgcggtttctctggtggaatggcagctcggacgccagcgtgagcggataggcacgctgacggatgatctgatgcagctgatgatacaggcccgtgaaaacgaacacctgttctcgcgcctgctgaaactgctggcatcgctgtccgccgcgacttctcttgatgatttttccgaacgtctgaatcagtgggcgaaggggctgaaactcagccatgccaaaattcgtctgtttactgacagctggcggctgggcgcgccgttccgtcatcaggatctgtccttatcccgcgcacactttgaagctatccgcctctcccgtttcggggaccgcaatcattatctcggacaactgaccgcccctgaaattcagctgctgctgccggacagtgcatttgtcggctcagcgtctgtatcgctgctgggcgggcagcatgacctcggcgtagtgatatttgtcagccgtgacaagcagcactatcagaaggacatgggtaccgcgatgctggaacaggtggcgtatttcctgccgcaactattgcagcgctgggtggaactggcatga

SEQ ID NO: 276746 - DNA, 918 bp, Morganella morganii
atgacggacagcgcggcagatgacctgctggtcacggcagaacagtttctgcagtatctgcgggtggagcgccggttaagtccggtcactattaccaattaccgccgtcagctcaccgcgctggcggaaatgatggtcagcagtaaactccgcagctgggcgcagctggaaccggcaacggtgcggatgctggccgcaaaaagccgccgtaacgggttacagcccgccagcctggcgctgcgtctttccgcgctgcgctcatttctcgactggcaggtcagtaacggcctgctgcccgccaatccggccaaagctgtcagtgcccctaaacaggggcggcacctgccgaaaaacatggatgtggatgatattacccggctgatggatatcagcagtaatgatccgctgaccgtgcgtgaccgtaccatgctggaagtgatgtacggcgcagggctgcgtttatcggagctggtcgggctaaataccggggattttgacctggccaccggcgaagtgcgggtgctggggaagggcagcaaagaacgcaaagtgccgctcggcaaaacggcggttgcctgtctggaacgctggctgccgctgcgtgagctgtatgacccggaagaccgggcggtgtttatctccaccaaaagcggtaagcggatttcagcgcgtaatgtgcagaaacggtttgaatactggggcctgcaccaggggctgaacagccacctgaatccgcataagctgcgccactcctttgcgacgcatattctggaatccagcggcgacctgcgtgccgtgcaggaattgctggggcatgctaatctgtccaccacgcaaatctatacccatctggattttcagcatcttgccaatgtgtatgatgttgcacatccgcgggccaaacgaggaaaaccgtaa

SEQ ID NO: 276747 - DNA, 717 bp, Morganella morganii
atgcgtttttaccgccccctttcacctgtccgcgccatgacgttcgatcttgacgacacgctgtatgataatcgtccggtgatggataaaaccgaggaggaggtcattgcgtttatccgtcagtatgatccgcgttttagtgaattaccggctgactatattaatgtgttccgtgaccggatccgccgtcagcagccggagattttccatgatgtcagccgctggcgtctgctctcctggcgcacctttttcctgcattacggctataccgccgcccgtgctcaggccggggcggatgcagtgatggcgcattttgcgcagtggcgcagccgtattgatgtgccgcagtccacgcatgatacgctgactgcgctggcggccaaaattccgctggtggcgatcaccaacggcaatatggagccggaaaaatgcgggctggcagattattttacttttattctcaaagccggtcctgacgggcgcgcaaagccgttctgcgatatgtaccgcacggcggcgcagcggctggctatcccggcagaaaatatcctgcatgtcggcgataacctgaataccgatgtggaaggtgcgctgtgcagcggcatgcaggcctgctggatcaacctcgacggccgtgatgtttatcacgacccggaaacccgcctgctgccgcatattgaaattacacagttggattctttaaccggactgttataa

SEQ ID NO: 276748 - DNA, 2163 bp, Morganella morganii
atggacgtctcttatctgcttgaaagccttaatgataaacagcgcgaagcggtggcggctccccgctcaaacatgctggtgctggcgggtgccggttccggaaaaacccgggtgctggtgcaccgtatcgcctggctgctggcagtggagaatgcttctccgttttcggtgatgtcagtgacatttaccaacaaagcggcggcggaaatgcgccaccgtattgaagagctggtcggcaccagtgagggcgggatgtggatcgggacgttccacggcctggcacaccgtctgttgcgggcgcatcaccttgatgccggattaccgcaggattttcagatcctcgacagtgaagatcagatccgcctgatccgccgcctgatcaaagccatgaatctcgatgaaaaacaatggccggccaaacagggctgctggtatatcaacggcaaaaaagatgaaggattgcggcctcagcatgttgagagctacggcaacccggtggaagccacctggctgcggatctatcaggcgtatcaggaagcctgcgaccgtgcggggctggtggattttgccgaactgctgctgcgcgcacatgaactgtggcttaataaaccggcgattttacagcactaccgcgaccgttttaccaatatcctcgtggacgaattccaggacaccaacagcatccagtatgcctgggtacgcatgctggcgggcgataccggtaaagtgatgattgtcggtgatgatgatcagtctatctacggctggcgcggggcgcaggtggaaaatatccagcgcttcctgaaagactttccgggcgctgtcaccatccgcctcgagcaaaactaccgttccaccaacaatattctgaaggcggcgaacgccctgatctcccacaacagcgaccggctggggaaaaacctctggacggacggcgaggacggcgagcctatctctctgtattgtgcctttaatgatctggatgaggcgcgttatgtggtcggacgcatcaagcagtggcatgagaacggcggggcgctggcagactgcgcgattctctaccgcagcaacgcccagtcccgtttacaggaagaagcactgttacaggccgcgctgccgtaccgtatttacggcggccagcgcttcttcgagcgccaggaaatcaaagatgcgctggcgtatctgcgcctgatttcaaaccgtcatgatgacgcggcgtttgagcgtgtggtaaacaccccgacccgcgggatcggcgaccgcaccctggacgtggtgcgtcagacggcccgtgatcgggaactgaccctctgggaaagctgcggtgtgctgctggaagaaaaagcactggcgggacgtgctgcctccgcgctgggacgtttcctcgaactgatcaatctgctggcgcaggaaactgacggcctgccgctgcatgtgcagactgaccgcgtgatccgcgattccggactgcgggcacactatgagcaggaaaaaggtgaaaaagcccaggcgcggatcgaaaacttagaagaactggtgaccgcaaccaaccagttcagctatcaggatgctgacgaagggctgacgccgttacaggcatttctgtcccatgccgcgctggaatccggcgaaggtcaggcggaccgctatcaggatgctgtccagctgatgacactgcactccgccaaagggctggagttcccgcaggtctttatcgtcggggtggaagagggcatgttcccgggcatgatgtcggtggaggagagcggccgtctcgaagaggagcggaggctggcctatgtcggtgtgacccgtgccatgcagaagctgactctgacctatgccgagacccgccgtctgtacggcaaagaggtgtatcaccggccatcccgttttatcggtgaactgccgccggagtgtgtggaggaagtgcgcctgcgtgctaccgtatcccgcccggttaatcatcagcggctgggtacaccgatcaccgccaatgacagcggttataccctcgggcagcgtgtccgtcatccgaaattcggcgagggcactatcatcaatatggaaggtaacggcgagcatacccgcttacagatagccttccagggtgaagggatcaaatggctggtggcctcctacgccaaactggaaaaaccctga

SEQ ID NO: 276749 - DNA, 951 bp, Morganella morganii
atgctgagcgcattcagagttgacaataagcgtttgcaacgtcttgatttagaagagggcgacgccctgacagatgcgctgtgggtggatatttcggagccggaagagcatgaacggcagctgattcagacgcagtttaaccaggagctggcaaccagtccggaactggacgatatcgaagcctccgcacgcttctttgaggacgatgacgggcttcacgttcactcctttttctattacgaagatgcggacgaccacgccggaaactccactgtggcatttaccctgcgtgacgggcgtttatacacgctgcgtgagcgggaactgcctgctttccgcctgtaccgtatgcgtgcccgtaaacagactatgcaggacggcaacggttatgaaatcctgctggatctgtttgaaaccaaaatcgagcagttggcggatgaaatcgaaaacatctacagcaatctggaaacactcagccgggcgattatgaaaggcaaacaggatgatgagttcgataaagccctgtctgccctggccgagcaggaagatatcggctggaaagtccgtctgtgtctgatggatacccagcgcgcgctgaacttcctggtccgccgtacccgtctgccggcgaatcagctggagcaggcacgcgaaatcctgcgcgatatcgaatccctgctgccgcataatgaatccctgttccagaaagtgaacttcctgatgcaggcggcaatgggctttatcaatatcgaacaaagccgcattatcaaaatcttctccgttgtttctgtggtattcctgccgccgacactggtggcatcgagttacgggatgaacttcaaatttatgccggagctggactggtcgctggggtatcccgctgcgatcggggtgatggttgccgccgcactcgcgccgtatctctacttcaaacgcaagaattggctgtaa

SEQ ID NO: 276750 - DNA, 510 bp, Morganella morganii
atggactggatcacgcatcatctggcggtactgcacgaccacccgctctggctgctggccattctgtttgttatcgccctgagcaaatccacgattattctctcctccgtactgccacccgcctctgtcatgctgatgacggtggtgaccctggcatttccggtcgttccggtggtgattatctggctggtgattacgctgggcgcggcctgtggctcgatgatttcgtattatctcggccgcctgattatcacccgcaactattttcccgggctgatggcgaaatacaaaactgccctcggtaaagcccaggcacggcttcagaccagcgggctgctgatcctgtttacttcacggtttattgcggtgctgcgctatctgatcccgatggcggccggattgctgcgtttcacacagacccgtgtgctggtgacctgtctgctgtccgccggggtctggaccgccctttacatgctgattgcaaagggcattgaattcacatttttctga

SEQ ID NO: 276751 - DNA, 897 bp, Morganella morganii
atgagccagcaacagaccgtaaaaggcgtcctttgtgctctcggcgcttactttatctggggtattgcccctgtgtatttcaaactgatccaacaggtgcctgcggatgagatcctgacacaccggattatctggtcattcttttttatgatcctgctgatcactgtgtcacgccagtggccgcgtatccgccagattatccgccagccgaagaaagtcatgatcctagcgctgaccgcctgcattattgcctcaaactggctgatctatatctgggcggtaaaccacaaccatatgctggaagcgagcctcgggtactttattaacccgctggtcaacgtactgttcgggatgctctttctcggtgagcgtttccgccgcctgcaatggtttgcggtgtgtctcgcctttaccggcgtgctgatccagctctggcagttcggtactgtaccggtgatcgggctgagtctggccatgacattcggcctgtatggtctgctgcgcaaaaaactgggggtggatgcccagggcgggatgctggtggaaaccttgtggctgctgccggttgcgggtatttatctgcttttctttgccaacagcgccaccagcaatatgaccatgaacagcctgacgctgaatctgctgctgattgccgccgggattatcaccaccgtgccgctgctgctgtttactgaggcagctaaccatctgcgtctctccacgctcggcttcttccagtacatcggtccgaccctgatgtttgtgctggcgaccaccgcgtatggcgaggccatttccgctgagcggctgatcaccttcgcctttatctgggcgggactgattgtctttaccctggatgcactgtacacccagcgccaccgttacaaaaaagcgtga

SEQ ID NO: 276752 - DNA, 1827 bp, Morganella morganii
gtgtctaccgctgaagtcatcaataccctgcccgacgctgacgctatcctgcgccaggtctttggttatcagcaattccgtgccggacagtccgatattatcaataccgtgaccggcggacgcgattgtctggtggtcatgccgacgggcggcgggaaatcactgtgttaccagattccggcactgatgctgccggggctgacagtggtggtgtcaccgctgatttccctgatgaaagatcaggtcgatcagttgcgcctgctcggggtggaagccggttatctgaactcggcacagaccgcgcaggaacagcagaaggtactggaagggtgtcacaataaccgcatcaaactgctgtatgtggcaccggaacgcctgctgatgagcagttttatccgccagttacagcagtggcagccgtcgctgctggcggtggatgaagcgcactgtatctctcagtggggacacgatttccggccggaatactgcgcgataggcgagcttcgccagcatctgccgggtgtgccggtcattgccctgacggctaccgccgataacaccacgcgctctgatatttgttcgcggctgcgcctcagtgatccgctgatccacatcagcagctttgaccgcccgaatatccgctacacactggtggaaaaatataaagcgtttgatcagctgtggatgtttgtccgtggtcagaaaggccagtgcggcatcatttactgtaacagccgtaataaagtggaagatgttgccgcccgtctgcaaaagcgcggactgagtgtcgcggcgtatcatgccggcctggataattcgcagcgtgaatgggtccaggatgccttcctcaaggataacttacaggtcgtggttgccacggtggcgttcggaatggggattaacaaatccaacgtccgttttgtcgcgcactttgatatcccgcgcaatatcgaatcctattaccaggaaaccggtcgtgccggacgtgacggggtcagtgcggaagcggttctgttttatgacccggcggatatggcgtggctgcgccgctgcctggatgaaaaaccggccgggccgcagaaagatatcgagcagcacaagctgaatgctatgggcgcgtttgcccaggcgcagacctgccgccgcctggtattgctcaattacttcggcgagaaccgccagacaccgtgcggcaactgcgatatctgcctggatccgccgaagcagtatgacgggctggttgaggcgcagcaggcgctgtcctgcatctaccgcgccgggcagcgttttggtctggggtatattgtggatgtgctgcgcggctcgaataaccagcggatccgtgaatacggacacgacaaactcgcggtttacggcatcggcaaagacaaaagccaggaacactgggtgagtgtgctgcgccagttgatccacttagggctgataacgcaaaacattgctaattattctgcgttacaattaaccgaatccgcccgcccggttctgcgcggcgaagtgccgctgcaactcgcggtaccgaggatccagaatatcaagccgcgtcagactgcccgcagttacggcggtaattacgacaaaaaactgttcgcaaaactgcgcaaattgcgcaaatccattgcggatgaggaaaatatcccgccgtttgtggtatttaacgatgccactcttattgaaatggcggaacaatgcccggtcagggcaaatgatttactcttgataaatggcgtcggagagcggaaactggaacgattcggcgatgcatttatggcccttatccgcgagcatctcaccggatttgatgactaa

SEQ ID NO: 276753 - DNA, 1002 bp, Morganella morganii
atgctgccaccggaaaccctgaaagcaagctggctggaacgcgaagcggagtattctgcctttgtgaacggcccgttacttgatttctggaaccggcgggatgagcggacatttcagggcgcggatgatgtcactatccgctatgtgcagtttaccgatcctgaccatgataaagtgctggtgatcagctccggacgcagcgaaagctacgtcaaatatccggaagttctgtacgattttttccacctcggttttgatgtctttattatggatcaccggggtcaggggctttccgggcggatgctggatgatccgcaaaaaggccatgtcgagcgttttgacgactatattgatgatttttctcagttcaccaatatcgcactggcggagaaaaattacgcttaccgttatgcactggctcactcgatgggcggtgcgatactgggcggttatctgttacgcgagccggacaccttccgtgccgcggtattatgtgccccgatgttcggcatcaatttaccgatgccgatgtggctggcgaatatgattgtgaaccgggccgataaacggccgtcggaacgcaatgagtatgcggtatcaaccgggaagtggcagccgttgccgtttttaatcaacattctgacccacagttacccgcggtaccggcgttacctgcgctgttatgctgactatcctgctttacgtctcggcggacccacgtatcactggttacgcgaaagcattgatatcggacagaaaataattgcgcaggcgggagagataaacaccccgctgatggtgctgatggcatcagaggataaggtggtggacaatcgggagttgctggctttctgcgaaaatcgccgtaaagcccggacaggacaagaagaagaacatatgcctctgacgtttgagggagcttatcacgagatcctgttcgaagaagacgcgttgcgcgctgtcgcgctcaatgcgatttgtcattttttcggactccactaa

SEQ ID NO: 276754 - DNA, 804 bp, Morganella morganii
atgtatcatgtggttgcttcagatttagacggaacgttattatcacctgcccacagtttgaccccctacaccaaggaaaccctccgcctgctgaccatcaataaaggcgtgcattttgtttttgccaccggccgccaccatgtggatgtggcgcagatccgtgatgcgctggggattgatgcgtttatgatcacctccaatggcgcgcgggtacacaacaccaaaggtgagctggtattcagtcatgatgtggatccggatgtggtccgcgagctgtgcctgatggagtttgataacccggatatcctcaccaactattaccggggtgacggctggatgatcaaccgggaaagcccggaacagaaagagtttttccgggaatctgtttttatgtatgagctgttcgaccgcaatgattttccggttgatcaggtctgcaaagtctacttcacctgtgatgaccacgagaagcttgtcgcgctggaagccaaaatccgcgtgcgtttcggtaataaagtgaatgtcagtttctctctgcgcagctgtctggaagtgatggccggaggtgtctcaaaaggtgaggcgctgcaacaggtcgcagaatcactgggctaccgcctgaatgactgcattgctttcggtgacggcatgaatgaccgtgaaatgctggaaatggccggaaaaggctgcattatggcgggtgcgcatcagcgcctgaaagatattctgccggaaatggaagtgattggctccaatgcggatgacgcggttgctcattatctgcgccggttatatcagcagtaa

SEQ ID NO: 276755 - DNA, 1302 bp, Morganella morganii
atggcgataaatacgacacgttccgcagcggaaaatgccgggatgagtgaagagcagtggcgtgcagcgactaaatttgatggtaccgacgcaggctgggttattatgagtatcgggatggcaatcggcgccggtattgttttcttaccggttcaggtcggtctgatggggttatgggttttcctgctgtcctccgttatcggctatccggccatgtatctgttccagcggttatttattaacaccctcgcggaatccccggaatgtaaagactatccgagtgtgattaccggttatctcggtaaaaactgggggattttactcggagcgctgtattttattatgctggtgatctggatgtttgtttattccaccgccatcacaaatgacagtgcgtcttatttccagactttcggtgtgacagaaggattattatctgacagcccgtggtacggattaattctgatttgtctgctggtcgccatctcttcacgcggcgaaaagctgttatttaaattatccggttttatggtgctgaccaagctgtttattgtcgccgcactcggtatatcgatggtgggtatgtggcacctgtataatatcggttcactgccgccggctggccgtttaattaaagaagcggttattacactgccgtttactctgacatccattctgtttattcagacgctcagcccgatggtcatttcattccgtaatcagaatctgaaccgggaagtggcccgctttaaagcactgcgggcgatgaatatcgcttttattatcctgttctgtactgtctttttctatgccgtttcctttactctggcaatgggtcatgacgaggcggttaaagcttatcagcagaatatttccgcactggcaatcgccgctaaattcttccccggcggatgggtgacagtagtcagtgtgatgctgaatatttttgcggttatgacggcgttctttggggtatatctcgggttccgcgaagccacgcaggggattgtgatgaatattctgcagcgcatgatgcctgcggagcggattaatgaaaccctggtgaaatacggcattatggtatttgcggtactgctggcctggggcgccattattctcaacgcaccggtgctgagtttcacctcaatatgcagtccgattttcgggatggtcggttgtctgattccggcttatctggtttataaagtcccgatgctgcataaatataaaggcatctccctgtatctgattatatttaccgggttgctgctctgtgtgtcgccgttcctggcattttcctga

SEQ ID NO: 276756 - DNA, 3363 bp, Morganella morganii
gtgcgcctgattatctcatttttactggcggtttttcttttctccccgctgacagcggtatatgcggcatcggatattaacgagccgcagatccgccaggaacttaagcggattgagagcagcaaagatccgaaagatattgagatggctcaggcattacaggcgaccctgaactggctgacagacagcaaagccgcggatgaacgcgcacaaagctatcaggacaccatcgataactttccgaagctggtcagggcattacgccagcaactgctggaagagagtgattccccggccaaaattctgaccacccgccctatcagcgaccttgagcagcaggctatccagctcagcggacagttactggagcagggacggctgttacagcaggagcaggacaaaaaccgcgaaatcagcgattccctgaccctcctgccccagcagcagtctgaagcacgccgcctgctgaatgaagccacctcccgccagcagggactcgcaaccccgctgaccccgcttgccgaggctcaggccacgctggccgccgcagaagtgcaggcgcgcaaagcaacggtcaatgagctggaactggctcagctttctgccaacaaccgccaggaactgacccgcatccgccttgaactgctgcgtaaacgctatcagcggctggatctcgaacttcagcagctgcgcagtgtgctcaacggcaaacgtcagcagaaagcggaactggcgctggaacgcaccgaactgctggccgaacaggccggtgatttaccgccgtacctgaaagaacagattgatattaaccgcgagctgtcgcaggtgctgaatgatcaggctgcgcacatgagtgatatcggagaaatgcagcgccaggcggcaaccgatatccagaaagcgcgtcaggtactcggtaccattcaggaacaggcgcagtggctgaacggctcaaccgcactgggagaagccctgcgggcacagctcagccgtctgccggatatgccgaaaccgcagcaactggataaagagattaccgacctgcgtgttgagcgtctgaaatatgaaaatatgctcgacgccctgtccggtaataataatgaaccggatacgtcacagacagcctctctcccgccggatcaggcttccctctatcagcagctgattcagaaccgcaaagagctgctcggctccctgctctccggttatgataccgaaattctggagctgaccaagctcaaagtgaccaccagtcagctcagtgacgtactgatcgaagtccgcgacgacacccaccgctatctgttctgggtggcggatgccacaccggtttacctcaattacccgattgaggtactgagcagcctgaccaaactgctgtccctggataccctggcgcagctcggcggcgcatttaaaaccatgttctcgtggcagaacaaagagatttcactctatattatcagcaccctgatgctggcgattttcggcctgaactaccgccgccattatcaggcatttctggacagaaccagtcagcgcatcggtaaagtaacactcgatcgcttctccatcacgctgcgcaccctgttctggtctgtacttgtctctctgccgctgccggtactgtggtccgccatcggctacgggttacagaatgcctggcagtacccgatggcaaaagcgatcggtgacggtgtcagcgccaccacaccggtgctgtggctgtttatgttctgcgcgacctttgcccggcctaacgggctgtttatcgcacagttccgctggccggaagcccgtgtcaaacgggcaatgcgtttctatcagctctctatttttgtcattgtgccgctgatgatggcaatgaccacttttgaatatttcaatgacagagagttcgccccgacactcggccgcctctgcttccttctgctgtgtgcggcactgtttatcattaccagcagcctgcgccgcgcgggggttccgctctatcttgaccgccacggcagcggcgacaatgccgtcagcaaaggaatgtggtggctgctcctgctggcaccggtcgtggcagcgattgccgctctgctcggctatctcgcaacctcacaggcactgctcggccgcctggaaacctcggtcgccatctggtttatgctgctggtggtctacaacattattacccgctggatgctgatccagcgccgccgtatcgcctttgaacgcgccaaacagcgccgtgctgaaattctggcgcagcgggcaaaaagtgatgacgacagcagtgtgaacagcaatgccaacagtgctgaaggcgtgattgatattgaagagcaggtcattgatctcgataccatcagtgcgcagtcagtcgggctggtccgttcgattctgaccatgattgccctggtatcctgtattctgctctggtctgaactgcacaccgccttctccttcctggaaaatatccggctgtgggatgtcagcagcagtatcaatggcgtggataccctccagccgattacgcttggctctgtctttgtcgccattctggtgattatcatcaccacgcagttggtgcggaacctccccgcattgctggaactggcgctgttacagcatctggacctgactccgggcaccggttacgcgattaccacgctgaccaaatacagtattaccctggtcggcgggattgtcggcttctcgctgatcggcattgaatggtcgaaaatgcagtggtttgtcaccgcaatgggtgtcgggctgggctttggtttacaggagattttcgccaacattgtttccggcctgatgatcctgttcgaaaaaccgatccgtatcggcgataccgtcaccatccgtgacctgaccggcagcatcacgcgtatcaatacccgcgccaccacgctgacagactgggaccgcaaagagatcatcgtcccgaacaaagcctttattaccgagcagtttatcaactggtcgctctcggatacagtcacccgtatcgtcctgaccatcccggtcccggcggaagccaatccggagcaggtcaccattctgctgctgatggcggcacaggactcggcaatgattctggacacaccaaatccggaagcttatctggttgatttgcaacagggtattcagattttcgaactgcgcgcctacgccgctgaaatgggacaccgcctgccggcgcgtcatgagatccatcagaatatcctgcgcagcttcgcggaaaacaacattattctgccgttcccgccgtttgaagcgcgtgtggatatggtgggaaatattctgcgcagcggcacaaaaaatctgtcgggtcgtaacccgatgcggaaatccggcgggttgtga

SEQ ID NO: 276757 - DNA, 936 bp, Morganella morganii
gtgctggatactcttaaaataaaattacaatatttgctgcctaaacagtgtcttactcagctggcgggccgctttgccaacaaaaaacttggctggctgacacagctggtgatcaaagcattcgccaaagcctacaaagtggatatgcaggaagcgaaagagagcgagtttatcgcttacagtaccttcaatgagttttttatccgcgcactgaaagaagaagtccgcccgatcgtacagggcagcgaaaccctggcactgccggctgacggcaccatcagtcagttggggcttatccgtgacgatcagattttacaggccaaagggcataactacaccctggaagccctgctcgccggaaactggcagctggcggatctgttccgcaacgggcagtttgtaaccacttacttatctccgcgtgattaccaccgcgtgcatatgccgtgtgacggccatctgcgtgaaatgatctatgtcccgggcgacctgttctccgtcaacccgctgaccgccgccaatgtcccgaacctcttcgcccgtaacgagcgtctgatctgcgtgtttgacacggatttcggcccgatggtgcagattctggtaggcgccacgattgtcggcagtatggaaaccgtctggtgcggtatggttaccccgccgcgtgaagggattgtccgccgctggacttaccctgcacacgacagcgtctgtgcggtaaacctgaaaaaaggcgaagagatgggccgctttaagctcggctccacggtgatcaacctgttcccggcggatacagtggcactgaacagtgcactggcaaacggcgtttccacccgtatgggtgaactgctggccacccgcatcacagcggatgatgccgcctgcgcggaagaaagccctgcatgcccgtcacaaccggacgccgctgccactaactga

SEQ ID NO: 276758 - DNA, 1050 bp, Morganella morganii
ttggctaaacaaaaactttccaaaggtcaggtacggcgtgttcaggcaaaccagcagcgcaaactgcgcaaagagaaccgcccggagcctgaggacagcctgttcggtgaggctcaggaaggacaggtaatcagccgtttcgggcagcatgcggatattgaagccgcagacggctcggtacagcgctgcaacctgcgccgtaccatcaaatcactggtcaccggtgaccgcgtggtctggcgtgctgcattgcagaataacgaagaaggccgtgttaacgggattgttgaggcagtgcatgaacgtgaatcagtactgacccgtcctgatttttatgacggtatcaaaccgatcgccgccaatatcaaccagatcgtgattgtttccgcgattttaccggaattatcactcaatattattgatcgctatctggtcgcctgcgaaacactcggcgtggaaccactgattgtactcaacaaaattgacctgctgaatgacgaaagccgcgaccaggtcaatgatttaatgaatatctatcgtaatatcggataccgtgtgctggaagtgtccggccacaccaatgaggggattgatgcactgacggcagcacttgccggacggatttccatcttcgccggacaatccggtgtcggaaaatccagcctgcttaatacattgctgccggaaaacgcggatatcctggtcaataacgtttctgatgtttccgggctgggtcagcacaccaccaccgcctcacggctgtatcatttcccgcacggcggggatgtgatcgactcaccgggagtgcgtgaattcgggttgtggcacctgacaccggagcaggtcactcagggatatacagaattccgcgattatctcggcggctgtaaattccgtgactgcaaacacggggatgacccgggctgtgcgctgcgcgaagctgtggagaacggcgaaatcagtgcggaacgctttgaaaattatcaccgcattctggaaagtatggcacaggtcaagccacgccgtaattttacggccggtgaagactga

SEQ ID NO: 276759 - DNA, 546 bp, Morganella morganii
atggcaaaaagtgaacagaaccttatctggatcgatctggaaatgaccggacttgacccggaacgtgaccggattatcgaaatcgccaccattgtgacggatgcaaacctgaatattctggcggaaggcccggttctggcggtacaccagtctgatgaacagttaggtctgatggatgactggaatgtccgcacacacggcgccagcgggttaactgaacgtgtccgcgccagcacgtattccgacgcacaggccgagcaggccactatcgcgttcctggaacagtgggtgccgcagggcgcttctcctatctgcggtaacagtgtcggccaggatcgccgttttctgttccgttatatgccggcgctcgagcaatattttcactaccgttacctggatgtcagcaccctgaaagagctggcccgccgctggaaaccggaagtgctggacggcttcaccaagaaaaacacccaccaggcgctggatgatatccgtgagtcaattgcggaactggcttactaccgcgaaacctttatccgtctgtga

SEQ ID NO: 276760 - DNA, 582 bp, Morganella morganii
atgggtatccccgcagtatttctggacagagacggcaccattaacgtagatactggctatctccatgagattgatgattttcagtttatagagaacgcgattgaagcaatgcaggccatcaagcagatgggctacgctttaatcatagtcacaaatcagtcgggtatcgcccgcggtatgtttaccgaagatcagtttatgcacctgacagaatggatggactggtctctggcggatcgcggcgttgacctggatggtatctattattgtcctcatcatcccgaaggtactgtcgaagagtttcgtcaggaatgtaactgccgtaaaccggcgccgggtatgttgctggatgcacagaaattcctgaagatcgatatgagtaactcttatatggtaggggataagctcgacgatatgctggccggacgggctgctgaagtgggtacaaccgtattggtacgcaccggtaaactggtaacggaagacgccgaagcggcggcagatattgtgattaacagtatcgctgatttacctgcactgctgaaacccgtacaaaaaagcgcaaaatcacctaaaaagtaa

SEQ ID NO: 276761 - DNA, 1035 bp, Morganella morganii
atgataaagctgacgaatataaataaggtttttcagcagggtcatcgcgaaatacaggcactttctgatattaacctgcacgtcccgcaagggcagatttacggtgtgattggtgcttccggcgccgggaaaagtacgcttatccgctgtgtgaatatgctggaacggccgacatccggacaggtactcgtcggcggccgtgacctcactaagatgaacgataaagagttaacccgtgcccgtcgcggcatcggaatgatttttcagcactttaacctgttgtcttcccgtactgttttcgggaacatcgctctgccgctggaactggatcgcgtaccggcggcggaaattgaaaaacgggttgtgaagctgcttgacctggtcggtctgtctgataaacgggatgtttatccggcaaatctgtccggtggtcagaaacagcgtgtggctatcgcccgtgcgctggcaaacgaaccggaggtattactgtgtgatgaggccaccagcgccctggatccggcaacgacccgttcgattctggaactgctgaaagacatcaaccgccggctggagttaactatcctgctgatcacccatgaaatggatgtggtgaaacgcatctgtgaccaggttgcggttatcagcggcgggcaactgattgaacagaatacggtaagtgaagtgttctctcatcctaaaacaccggtggcacaggcctttattgagtccaccctgcatctggatgtgccggaagattatctggcacgtctgaaaccggagccggcggaaggactggggccgctgctgaagctggagtttggtggtcagtctgtcgatgccccgctgatctcgattgcatcacgcaagttcaatattgatatcagcatcctgagttctcagatggattatgcgggtggtgtgaaatttggtgtcatgctggcagaactggacggtaacagcccgcaggatgttgaagcggcgattagttttctgaaagaacaccacgtaaaaacagaggttctcggttatgtctga

SEQ ID NO: 276762 - DNA, 654 bp, Morganella morganii
atgtctgaaggaatgattttactgttagttaaaggcatctgggaaaccctggttatgacatttgcatccggtttcctgggatttttaatcggtctgccggtgggggtactgctgtatatcacccgttcagggcagattgcggataataaaagcctgtaccggaccctgtccgtgctggtcaatatcttccgcgcgattccgttcattatcttactggtgtggatgattccgtttacccggttagtcgtcggtacgtctatcgggttacaggccgccattgtgccgctgactgtcggcgctgcaccgtttattgcccgtatggtggaaaacgccctgctggagatcccgtcaggactgattgaagcttcaagggcaatgggtgccacaccattacagattgtcagcaagatcctgctgccggaagcattaccgggactgatcaacgccgcgaccattacgctgatcaccctcgtgggttactccgcaatgggtggtgctgtcggtgcaggcggattaggtcagattggttatcagtatggttatgtcggatataacgcagtagttatgaatacggtattggcattgctggttgttttggtctttattattcaggtatgtggtgatcgtctggttaaggccgttacccgcaaataa

SEQ ID NO: 276763 - DNA, 816 bp, Morganella morganii
atggcttttaaattaaaatcgcttgtcgttgccggtgctttgctgggttcattagtgctggcgggttgcggacagaatgaaaaagatccgaaaagtatcaaagtcggcgtgatcgtcggtgcggaacagcaggtggcggaagtggcgaaaaaagtcgccaaagacaaatacggtctgaatgtggaactggtcacgttcaacgactacgtcatgccgaacgaagctctcagccgtggtgatatcgatctgaacgcattccagcacaagccgtatctggatcagcagattaaagaccgtaactacaaattaactccggtgggcaatacctttgtttatccgattgccggttattcaaagaaaatcaaatcactggatgagttacaggacggcgcacaggtcgctctgccgaatgacccgactaaccttggccgttcactgctgttattacagaagcagggattaatcaaactgaaagaaggcaccggtctgctgccaacagttcttgatgtggttgaaaacccgaaaggtctgaaactgatcgagctggaagccccgcagctgccgcgttcactggatgataataagatcgacctggccgtgatcaacaccacttacgcaagccagatcaatttaaccccggctaaagacggcttatttgtcgaagataaagattcaccttacgtcaacattattgtctcccgtgaagataataaagacagcgaagcggtgaaagagtttgttcaggcatatcagtcagatgaagtctttaatgaagcagataaagtcttcaacggcggtgcggtgaaaggctggtaa

SEQ ID NO: 276764 - DNA, 411 bp, Morganella morganii
atgcgagtgcttattatcagcctgcttgctcttctcatcgcgggatgctctttccgtcagagccattccgagcaggaacaagcgcaatacgccgatatgcggctgaaaaaaccggccggtaaaaaagccaaatcaacatccgcagcatcacgcgtcaaactctatctccacccggaagaactgctgggtaaacctttccgtgaccttggcgtggttttgggtcagaattgccgtgaagcggcaaaccctgcacagtccggtattccggctgcccgtaaacagatgctgtaccgggccggaaaactgaaagcagatgccgtgttactccaccagtgtgccgtgaaccccgcgcagggttgtaagcagttggcggtatgcgaaggtactgcgattaaggttgatgatgtctga

SEQ ID NO: 276765 - DNA, 708 bp, Morganella morganii
atgtctgagttttcattttcaccggtggggtttatccgctcaccatggcaggaaaaatttgcgattccgcgccagccggggctggttgaggatggtatcggggaactgcactttgtggctccctataatcacgccgactgcgtgcgcggactggaacagttcagtcatgtgtgggtcatctttgttttccatgatattccggccggcagctggcgtccgctggtacgcccgccgcgccttggcggcaatgccaaaatgggcgtgttcgccacccgctccaccttccgcccgaatccgatcgggatgtcgctggttgaactgaaaaaagtctgttacgacggcgatacggcgtatctctccctcggcagccttgatctgcttaacggtacaccggtgctggatatcaaaccctatctgccctatgctgaatccgtccccggagctctggccggttttgcacaggaagagccgccggcggatatgccggtcgtgttcagccctgcggcgcagcaattcatgacagctcaggtcgcccgatatcctgatttggcgcgttttgtcacacaggtactggcgcaggatccgcgtccggcgtataaaaaacaacaggctgacgataaaatttatgccgtgcacatgctggatttaaatgtccgctggcatatccgcgacggcgtgaccgaagtcatcagtctggaaaaacgctaa

SEQ ID NO: 276766 - DNA, 1722 bp, Morganella morganii
atgcgtactacccaatatctgctctctactctgaaagagacccctgctgacgccgaagtggtcagtcatcagctgatgctgcgcgccgggatgatccgtaaacttgcttcaggtctgtacaactggatgccgaccggtgtccgcgtattacgcaaagttgaaaagatcgtacgtgaagagatggaaaatgccggttcactggaaatctccatgccggtggttcagcccgcagatttatggctggagagcggacgctgggaacagtacggtccggagctgctccgtatcactgaccgcggcgatcgccagtttgttctgggtccgacgcacgaagaagtggtcacggacatcatccgtaacgaagtgacatcttacaaacagcttccgctgaatgtgttccagatccagaccaaattccgcgatgaagtccgtccgcgttttggtgtgatgcgctcccgtgaattcatcatgaaagatgcgtactctttccacctgacccaggattcactgcaggaaacgtacgatacgatgtatcaggcgtacagcaaaatcttcaaccgtatcggactggatttccgtgcagtaatggcagataccggctctatcggcggaagtgcatcccacgagttccaggttctggcgcaaagcggcgaagatgatgtgattttctcctctgagtccgattacgcggccaatatcgaactggcggaagcggtctgcaatattactgagcgccctgcacctcagaaagcaatggaactggttgatacaccaaacgcaaaaactatcgcggagttggttgaacagtttaatctgccggttgagaaaaccgtcaaaaccctgattgttcacggcagcaaagagagcggccacaaactggttgcgctgctggtgcgcggtgatcacgaactcaacgaagtgaaagcggaaaaacatccgctggttgcttctccgctggagttcgcgacagaagaagagatccgtgcagccgtgaatgcgggcccgggttcactggggccggtcaatctgccgctgccggtggtcgctgaccgtactgttgccatgatgagtgatttcggtgccggtgcgaatatcgacggcaaacactatttcggtatcaactgggagcgtgatgctgccctgccggaagtggcggatatccgtaatgtggtcgccggtgaccctagcccggacggcaaaggtaccctgatgatcaagcgagggattgaagtcggtcatatcttccagctcggtaaaaaatactccgaagcactgaaagcgactgttcagaacgaagccggtcacaacgaagtggtctttatgggttgctacggtatcggagtcacccgtattgttgcggccgcgattgagcagaacttcgatgatcgcgggattatctggccggatgcgattgcaccattccaggttgctctgctgccgatgaatatgcacaaatcttaccgcgtgaaagaagtggcggaaaaactctacgctgacctgaccgcacagggcattgaagtgatctttgatgaccgtaaagagcgtccgggtgtcatgtttgcggatatggaactgatgggtatcccgcataccatcgttatcggtgatcgcaacctcgacagcggtgtggtggaatacaaataccgccgcagcgaagataaatccctgatcgcgctggatgacgttgtcagtgtgctgaaagagaaaatcatcactgcctga

SEQ ID NO: 276767 - DNA, 660 bp, Morganella morganii
atgaaaaatctgacaaaactcttattggcggcaggcattttcagcattactgcctgtagttcgacagtggttgtgccaccaacgccggaagtccatgttcttgaccgtgcctataacggcgtggttccgtgtgccgattgctccggcatggatgtgaccgttttactggaaggtgacggcacctatgttatgcagcgcacctatctggaaacccgcgacggcaaccagaccttctttgaaaccgggacctgggcgaaagacggcgaaaaactgcgcctgaccgataccgccgggcagcgtgcttattatgacccgcaggataaatcgctggtgatgctggatatcgacggcaatccggttaaatcagacatgaattacaccctgaaaatggtgaaacctgtacagctgaaaggtgaataccgttatatggctgatgcggcaacctttaaagattgccagaccggtgtggtttacgcggtgccgggcaatatcggtttagaacagggttacggtaagctgggtgttgaaggcggcaaacctgtttatctggaagtggaaggatattacaccatccgtccgtccatggaagacggccagtttgatcaggcgctgatccagaccggtaaatccgtactggataaatcccgcggctgtcagtaa

SEQ ID NO: 276768 - DNA, 267 bp, Morganella morganii
atgtctgcagaaaacgaatatcaaccaattaattgtgatgactatgacaacctcgaactggcctgccagcatcatatggtactggaagtgaccttacaggggggcgatgttctgacaggaaaagcgaccgatttggtgctccggaagaaagtggaataccttgttgtcacgattgacaacgaactgcgggagcttcgtctggactctattgtcagcttcagtcatcccgaactgggaacagtggttattgatcactcaccgtcctga

SEQ ID NO: 276769 - DNA, 1383 bp, Morganella morganii
gtggatactgccttttgtgaatcattgtctgccgtgttccgccgtgtgtttgcctctcagcaggcaatcctggcgggactgagcggcgggcttgattccgttgtcctgctgcatgctctgcggcagtggcagaccgctgagcgcccggcgctgcggttgcgggcagtctatattcatcacggattaaacccgctggcggatgactgggcagatcactgccggatattctgcgattcactctctgttccgtttcaggtgtgccgcgtgcaggtggatccccgcaaaaaagggatcgaagctgccgccagagatgcccgctaccaggctttccgtgaagtgatagccccggatgaggcgctggtgaccgcgcagcatctggatgatcagagcgaaaccttctttctcgccttaaaacgcggcagcggccctgccggcctctccgccatgccggagcagatggcattcggtgccaatccgctgatccgtccgctactctccttcagccgtgctcagctcgaacagtatgcacaataccatcagctttcctgggtcgaggatgacagtaatcaggatcaccgttatgaccgcaattttctgcgccatgcggtattaccgcaactgaatgcccgctggccgcactttgctcaggcggtttcccgcagtgccgcgctttgcggtgaacaggaagctctgctggatgaactgctgctgccggaactcatgcagttaacggatacggataacgggttgtcatttgtcccgctgctcagcgccgggacggcaaaacgtaatgctgtactgcgccgctggctgaaacactgtggtgtgcagatgccgtcacagcaccagctggcactgctctggcaggaagtggcactggcgaaaccggatgcggagccgggctattgtctgaaaccggtcaccatccgccgttatcagaacaaactctttgtgacagaaaaaaccgccgggttatcagactattgtctgccgtgggatctgcattttgcattgaaactgccggatgatgcaggaattttgcgggtggcggaaacggtcactccgcaggacagcatttctgtggtgcgtccgccgcgcccggatgaacaggtgacagtccgttttggtttgcaggggcattatcatatctgcggccgtgatcgcgggcggtcagccaaaaagctgtggcaggaatgcggcgttgcgccctggctgcgcgaacgcacaccgctgctctggtataacgatacgctgatagcagcggtcggggtatttgtcacgaaagagggcgaagcggatgaggcaaaactgatgattatgcaggaaaaaaacaaccccgcggacggggttgcagagttattcaggacggtgagtgatcaataa

SEQ ID NO: 276770 - DNA, 960 bp, Morganella morganii
atgagtcttaattttctggattttgaacagccgattgccgagttagaggcgaaaattgattcgctgaccgcggtcagccgccaggatgaatcactcgatatcaatcttgatgaagaagttgaacgcttacgggcgaagagtctggaactgacacgtaagattttcgctgacctgggtgcctggcagattgctcagctggcacgccatccgcgtcgtccgtataccctggattacgtcaaactgatctttactgattttcaggaactggcaggcgaccgcgcatatgcggatgacaaagcgattgtcggcgggattgcccgtctggacggtcgtccggtgatgattatcggccatcagaaaggccgtgaaaccaaagaaaaaatccgccgtaacttcggcatgccggcaccggaaggttatcgcaaagccctgcgtctgatggaactggcagagcgctttaatctgccggtgatcacctttatcgacaccccgggggcttatccgggcgtgggggcggaagagcgcggccagtctgaggcgattgcccgtaacctgcgtgaaatgtcccgtctgaaagtgccgactgtctgtaccgtggtcggtgaaggtggttccggcggcgcactggcaattgcagtcggcgacaaagtgaatatgctgcaatacagcacttactctgtgatttcaccggaaggttgtgcctcgattctgtggaaaagcgcggataaagcgcctatcgccgcagaagcgatgggtatcaccgcgccgcgtctgaaagaactgaaactgatcgacaatgtgatccctgagccgctgggcggcgcgcaccgtgattatgaagcggttgccgcatccctgaaagcacagatcctgtctgatctggaagagctggataaactggacagcgagtctctggctaatcgccgctatgagcgtctgatgagctacggctactgctga

SEQ ID NO: 276771 - DNA, 3480 bp, Morganella morganii
atggcggaaccgcgttttattcatcttaatattcacagcgactattccatgattgacgggctggcgaaaaccggcccgctggtcaaaaaagtggcgtcgatgaatatgccggcgatggcgattacggacttcactaacctgtgcgggctggtgaaattttacggcagtgcgcacggcgccggggtgaaaccgattgtcggcgcggatttcctgatggaaagcgagctgctgggtgatgaactggcgtcactcacgatcctggcacgcaataataccggttatcagaacctgaccctgcttatctccgaagcctatcagaaaggctatggtgcacaggggccgaccatccagcgcgactggctggttaatcacaaagaagggctgattattctctccggcgggcgcaagggtgatgtgggtaagtttctgctgcgcggtaacagcgccctggtggagcaagcgctggaattctggcagacccacttcccggacagcttctatctggagcttatccgtaccggccgccaggatgaggaaagctatctgcatgctgcggtacagctggcgacagagaaatccctgccggtggtggcgaccaatgatgtccgctttatcagcagtgaagattttgacgcccatgaaatccgcgtagccattcatgatggttatacgttagcggatccgaaacgtccgaaactctacagccctcagcaatatctgcgcagtgaggacgagatgtgcgagctgttcgccgacatcccggaagcactgcagaacagcgtcgaaattgctaagcgttgtaacgtcaccatccgtctcggcgagtatttcctgccgcagttcccgaccgggaatatgagcacggaagattatctgatcaaacgctcgaaagagggactggaggagcgcctggcgttcctgttcccggatccggaagtgcgtgcgcagcgtcgtccggaatatgacgagcgtctggatgttgaactgaaagtgattaaccagatgggcttccccggctacttcctgatcgtgatggagtttatccagtggtcgaaggataacaatgtgccggtagggccgggacgtggttccggtgccggttcactggtggcgtactccctgaaaatcaccgatctggatccgctggagttcgatcttctgttcgaacgcttcctgaacccggaacgtgtctccatgcccgactttgacgtcgacttctgcatggaaaaacgtgaccgcgtgattgatcacgtagccgaaatgtacgggcgtgatgccgtttcccagattattaccttcggtaccatggcggcaaaagcagttatccgcgatgtcggccgtgtactggggcatccgtacgggtttgttgacagaatttccaaactggtgccgccggatcccggtatgacactggaaaaagcctttgcggcagagccgcagctcggcgaggtgtatgaggccgatgaggaagtcagggcgctgatcgatatggcacggatcctggaaggggtgacacgtaacgccggtaaacacgccggtggtgtggtgatcgcgccgacaaaaattaccgatttcgcgccgctttactgtgacccggaagggaataacccggtcacgcagtttgataaaaacgacgtggaatatgccggtctggtgaagttcgacttcctcggtctgcgcacactgacgattatcgactgggcgctgggcatgattaacccgcgcaatgagaaaaaaggtaagccgccggtggatatcgcggctatcccgctcgacgaccagaaaagctttgatatgctgcagcgctcggaaaccacagcggttttccagcttgaatcccgcggcatgaaagatttgatcaaacgtctgcgcccggacagctttgaagacatgatagccctggtggcgctgttccgtcccggcccgctgcagtcgggcatggtggataactttatcgaccgtaaacacggacgtgaggccatctcttacccggatgtggaatggcagcatgaatccctgcagccggtactggaaccgacgtacggcatcatcctctatcaggaacaggtgatgcagattgcccaggtgctggcgggctataccctgggcggcgcggatatgctgcgtcgtgcaatgggtaagaaaaagccggaagagatggcaaaacagcgctcggtatttgaagagggcgcggtgaaaaacggcatcgatgccgagctgtccatgaaaatctttgacctggtggagaaattcgccggttacgggtttaacaaatcccactctgctgcttacgcgctggtttcttatcagacactgtggctgaaagcacactatccggcggaatttatggctgccgtgatgacggcggatatggataacaccgaaaaagtcgtcgggctggtggatgaatgctggcggatggggctgaaagtcctgccgccggatatcaacagcggactgtatcacttccatgtcaatgatgaaggtgagatagtctatggtatcggtgcgattaaaggtgtcggtgaaggcccgatcgaagcgatccttgaagcccgtaaggacgggtatttcaaggatatttttgatctgtgtgcccgcacggataccaaaaaactgaaccgccgcgtaatggagaaactcattatgtccggcgcgtttgaccggctggggccgcaccgcgccgcgctgatgtcctcactggaggatgcgctgaaagccgcggatcagcacgccaaagcggaagcaatcggtcaggcggatatgttcggggtactggcggaagcaccggagcaggtagagcgctcttatgccaatattccgaaatggcaggatgaaattatccttgaaggggaacgggaaacactcggactgtatcttaccggacatccgataaaccgttatctgaaagagattgaacgctatactcatggtttacgtctgaaagatgttaacccgacaccgcgtggtcagatgaccacggtagtcggtctggtactggcttccaaggtgatcaccaccaaacggggaaaccggattggtgtctgtaccctcgatgatcgttccggccggctggaaattatgctattttccgatgcactggaacgttaccagcatctgctcgaacaggatcgcattctgattgcttccgggcaggtcagctttgatgatttcagcggcgggcttaaaatggtggtcagggagctgctggatatcagcgaagcacgcgaaaaatatgcgcgcgggcttgctatctcgctcacggacgggcaaattgacgaacaactgctgcaccggctgcgcggtgcgcttgaaccgcaccgctccgggacaataccggttcacctttattaccagaaggacgatgccagagcgcggatgcgtttcggtgctacctggcgggtcaccccgaccgatacccttctgacggatctgcggactctgctgggtaatgagcaggtagaattagaatttgactaa

SEQ ID NO: 276772 - DNA, 597 bp, Morganella morganii
atggattttgtttatccggacgcggcactgattgccggtgtcgatgaagtcggccgcgggccgctggtcggtgcggtggtaaccgccgccgttattcttgatccgcagaacccgatcgacggtctggcggactccaaaaagctcacggagaaaaaacgtgagcgcctgtttgctgaaattcaggaaaaggcactgtactggagcatcggccgcgcggaagcggcggaaattgatcaaatcaatattttgcaggccacattcctggcgatgcagcgggcggttgccggtttaccggtgcgtccgggttttgtgctggtggacggcaacaaagcgccggattttggtgtccctgctcaggcagtgatcaggggtgacgggctggtgccggagatcagtgcggcgtcgatactggcaaaagtcacgcgggatcgcgaaatggcggagctggataaacaattcccgcagtacggatttgcaaaacacaaaggttacccgacagcgctgcatcttgagatgctggcacagtatggggtgacagagcatcaccgcaccagttttggcccagtccgccgcgcgctggccggtatcagtaagtga

SEQ ID NO: 276773 - DNA, 1155 bp, Morganella morganii
atgtcggtatcacctcgtccgctcacgataggtattgtcgccggagaaacctccggcgatattctcggcgcaggtttaatgcgcgcactgaaagaaaaatatccggatgttcgtttcttcggggtcgctggtccgctgatgcaggcggaaggctgtgaaacctggtatgaaatggaagaactggccgtgatgggcattgtggaagtgctggggcgcctgccgcgtctgctctccatccgccgtgatctcacccgccgtttccgtgaactgcagccggatgtttttgtcggcattgatgcgccggatttcaatatcaccctggaaggacggttaaaatcttccgggataaaaacgatccactatgtcagcccgtctgtctgggcgtggcggcagaaccgggtctttaaaatcgccaaagcgaccaatctggtgctggctttcctgccgttcgaaaaagcgttttacgacaaatacaatgtgccgtgccgctttatcggccataccatggcggatgcactgccgttgcagccggataaaaccgctgcccgtgacgcactggagctggatccatccgcgccgtgtctggcaatactgccgggcagccgtcacgcggaagtctcgatgctcagcggcgacttcctgaaaaccgcgcaactgctgcggcaatcactgccggatttacagattgtggtgccgctggtgaatgcgaaacgccgtgctgaatttgaagctatcaaacaggaaatcgccccggagctggatgtgcatatgcttgacggccgcgcccgtgatgcaatgattgcctcagatgccgcgctgctggcgtcaggtacggcagcactggagtgcatgctggcgaaatgcccgatggtcgtgggctaccgcatgaagccgttcacattctggctggcgaaacggctggtcaaaactccgtatgtgtcactgccgaacctgctggcagggagcgagatcgtgccggaactgttacaggatgagtgccgcagtgatctgctggcgaatgcactgctgccgctgttgcagggcggtgaagccgtggataaactcagagaaaccttcctggaactccatcagaaaatccgtcttgatgcggataatcaggcggcacaggccgtatcagatatagcgagtaattaa

SEQ ID NO: 276774 - DNA, 792 bp, Morganella morganii
atgatcgataaaaccgcccggatccacccgtcttccattatcgaagacggcgccgttattggtgccaatgtcaccatcggtcctttctgctgtattggtgcggatgttgagatcggtgaggggactgaaatcaagtcccatgttgtgattaatggtcataccaaaattggtcgtgataaccagattttccagtttgcctccattggtgagataaaccaggatctgaaatacaaaggtgaaccgacccgcgtagagatcggtgatcgtaaccgtatccgcgaaagtgtgactattcatcgcggcaccgcgcaggacaccggcgttacccgtatcggtaacgacaacctgctgatgatcaatgcccatgttgctcacgactgtgtgatcggcaaccattgcatcattgccaacaacggaaccctggcgggtcatgtcacgctggatgattatgtcatcctgggtggcttatcggctgttcatcagttctgccgtatcggtgagcacgtgatggtcggcggctgttcaggtgtggcacaggatatcccgccgttcttaatcgcgcagggtaaccatgtgaccgccttcggcctcaatgctatcggcctcaaacgccgtggttttgataaagacgatatcagtgcgttacagaatgcctataaagtcctgtaccgcagtaatctgacgctggcagaagccaaagtgcagttggctgaactggcgaaagaaaatgtccatgtaaaaaccttcgctgacttcctggataccgctgaacgcgggatcatccgtccgtaa

SEQ ID NO: 276775 - DNA, 453 bp, Morganella morganii
atgagtgacaaccatactctcaaaattgatgaaattttagagcttcttccgcaccggtatccgtttttattagtggatcgcgtgctggattttgaagaaggtaaatttttacgtgctgtgaaaaacgtatcattcaatgagccgttcttccaggggcacttcccgggcaaaccgatttttccgggcgttcttattctggaagcgatggctcaggccaccggcattctggcgttcaaaagcctgggtaaattagagccgggcgaactgtattattttgccgccatcgatgactgtcgctttaaacgcccggtactgccgggagaccagatgatcctcgaagtgactttccataaggaacgccgcggcgttgcccgttttacgggtgttgcgaaagttgacggagaagttgcctgcgaagctaccatgatgtgtgcacgccgccgtgaggggtaa

SEQ ID NO: 276776 - DNA, 1029 bp, Morganella morganii
atgtcttccattcgattagctgatctcgctcagcagttgaatgcaacgttacacggtgatggcgatctcgtcatcaccggtatcgcacctatgcattcagcaaacagcgggcaaattacctttctgtctgatgcccgttaccgggaaaaactggctggttgtcaggcgggtgctgtggtattgcgtgaagacgatttaccgttttgtcaggtcgctgcccttgtggtgaaagacccgtacctggcgtatgcgcatatggcgcagattatggataccacaccggctccggctgagaatatccatccgtctgcggtgattgacccgtcagcctctctcggggcgaatgtgtcggtcggtgcgaatgctgtcattgagtccggcgtggttctgggtgacgatgttatcatcggcgcaggatcgtttgtcggcaaaaataccaccatcggtgccaaaacccgtatctgggcaaatgtcaccgtgtaccacgggattgtgattggcgaaggctgcctggttcattccaacaccgttatcggtgcagacggattcggttatgccaacgatcgcggtcagtgggttaaaatccctcagctgggttccgtcattatcggtgaccgggttgaaatcggctcctgtaccactatcgaccgtggtgcattagaaaatacggtaatcggtaatggtgttatcattgataaccagtgccagattgcccataacgtcataatcggcgacaacaccgcagtagccggtggtgtgattatggccgggagcctgaaaatcggccgcaactgtatgattggcggagcaagcgtcattaatggtcatatggaaatctgcgatcgcgtcgttgtgacaggcatgggcatggtaatgcggcctatcaccgaaccgggtgtatactcctccggtattccgttacagccaaataaaacatggcgtaaaactgccgcgctggtgatgaacatcagcgaaatgaataaacgcctgaaggcggtcgagcggcagctggataacgacgataaataa

SEQ ID NO: 276777 - DNA, 501 bp, Morganella morganii
gtgaaaaagttattaactgctgccagcgtgggtatggtattagcgatgtctgccggtgctgctcaggctgctgacaagatcgcggttgtcaatatcggtgaagttgtccagaaaatgccgggccgtgaagcggcagcaaaacaactggaaagcgaattcaaaagccgtggtactgaactgcagagtttagaaaaagatctgcagacccgtgctcagaaactgcagaaagacggcgcgaccatgaaagacagcgagcgtcagaaactggcaggtgaattcgacaccaaacgtgctgacttcgcgaaaaaagcccaggcatttgaccaggatttccagaaacgtcagatggaagaacgcaacaaagtcatgaagcgtgttgaagatgcagtgaaatctgttgcttcaaaaggcggatatgacgttgtgatcgatgctaacgcagttgcttactctgtttccggcattgatatcactgctgacgttctgaaacaggttaaataa

SEQ ID NO: 276778 - DNA, 2397 bp, Morganella morganii
atggcgatgaaaaagttgctcatagcgtcgctgctgcttggcagcttcactgcatacggttcagacggattcgtggttcaggacattcagtttgaaggtcttcagcgcgtcgccgttggtgctgcattactgaacatgcctgtccgtgtcggagacacggccagtgatgaggatatcggacgtaccattcgcgctctgttcgcgacaggtaacttcgaagatgtccgcgtcctgcgtgaaggtaatgtactgctggttcaggtgaaggaacgtccgaccattgcaaatatcaccttctcgggtaacaaatccgtgaaggacgacatgctcaaacagaacctggaagcatcccgtatccgcgtcggggaagcccttgaccggacgatgctgtcaaacattgaaaaggggctggaagatttctatcacagtgtcggtaagtataacgcgacggtaaaagccgttgtcacaccactgccgcgcaaccgtattgatgtgaaattcgtctttgcggaaggtgtatccgcgactattcagcagatcaatatcgtcggtaacactcagtttaccacggctgaactggttaaccgtttccagctgcgtgatgatgtaccgtggtggaacctggcggctgaccagaaataccagaaacagaaactggccggtgaccttgaaaccctgcgcagcttctatctggatcgcggttacgcgaaattcaatattgattcgactcaggtcagcctgacgccggacaaaaaaggtatctatatcaccattaacgtgaccgagggcgatcagtatcagattgccggggttcaggttgcaggtgaaacggccggccactccgctgaaatcaccgagctgaccgccattgagccgggttcactctataatggtgctcaggtcaccaaaatggagaatgatgtcaaaaatatgctcggtcgttacggctatgcgtatccgcgcgtcatgacccagccggaaattaatgaagccgataaaaccgtgattctgcatgtgaatgtggatgccggtaaccgtttctatgtccgccagatccgtttcgccggtaatgacgtgagtaaagactccgttctgcgccgtgaaatgcgtcagatggaaggggcatggttaggtaacgatctggttgaagccggtaaagagcgtctgaaccgtaccggttactttgaaaccgttgaggtggaaacccagcgtgtgccgggtgtgccggatcaggtcgatgtcgtctataaagtcaaagagcgtaacaccggttccctgaactttggtgtgggcttcggtacagagagcggcgtcagcttccaggtgggtgtcacccaggataactggttaggtaccggttatcaggttggtgcgaacgccagtaagaacgactactcaacgtacgcagaactgtcactgactgacccgttcttcacggttgatggtgtgagcctcggcggccgtattttctacaacgacttccgtgcggatgatgcggacttgtccggttacaccaacaaaacctatggtgtggacggaacgctcggcttcccgatcaacgaaaacaactctatccgtttaggtctgggttatgtgcataacaccctgtcacgtatggaaccacaggttaatatgtggcgttatctgcactcaatgggtgaagatccgaactataaagatcgcgcagaattccgtgccgatgacttcacgctgacgactgcctgggtttataacaacctcgaccgtggttatttcccgacttccggtgtgaaatccaccgtgagtgcgaaagtcacagttccgggttctgataacgaatactataaactgatcgccgataccaccggttactaccctattgacgaaaacggcagctgggtcgtgatgggacgcggtcgtttaggcttcggtgatggtctcggcggcaaagaattgccgttctatgagaacttctatgccggtggttccggtaccgtccgtggtttccgctcgaataccatcggtccgaaagcagtctactatgacggggcatccgataagttacgcagcgacagcccgtcccgtgatgctatcgggggtaacgcgatggcggtggccagtatggaactgatcactccgacaccgtttatcgacgaaaaatacacgaattctgtccgcacatcactctttgtggatgccggtacagtgtgggataccaattgggacaatactgagcttatgcagaagtatggtattcctgattacagtaaagcagggaacatccgtgtttccaccggtgtcgcgttccagtggatttctccgctcggaccattggtcttctcttatgcgaagccaatcaaagactaccagggtgaccggacagaacagttccagtttaatatcggtaagacctggtaa

SEQ ID NO: 276779 - DNA, 1356 bp, Morganella morganii
atgatgacttttatctggaactcagccgcgtttgttatcgcgctggggattttggttaccgtacatgagttcgggcacttttgggtggcccggcgctgcggtatttttgtcgaacggttctccgtcggtttcggcaaagcactctggcggcgtacagacaaacacgggacagaatttgtcatcgcaatgattccgctcggcggctatgtcaaaatgctggatgagcgcgtggcaccggtagcaccggagcgtcgccatcaggcgtttaataacaaaaccgtcggccagcgggcggcggtggtcagcgccgggccgctcgctaactttttgttagccatcgtggcgtactggattgtgtttatgatcggtgtgccggcagttcgcccggtcgtggcggatatccgcgcggggtcggtcgcagaacaggcaaatattttgcccgggatggaactaaatgccgttgacggcatcgaaacgcctgactggaatagtgtgcggatggcgatgatcagtaaaatcggtgatgattttactgttctgaatgtgattccggaaccggggtcagccccggcggaaaaacgcctggatctcacccgctggaaatttgatccggaaaaacaggatgctgtcctgtctctggggatcatgccggtgtccgcaaaggtcagtaatgagattaatgcactgacgtccggggggcctgctgaaaaagccggtttacaaccgggggacaggatcgttaaagtaagcggggagccgcttacggtctggcagccgtttacgctctttgtacgtaatagtcccggtaaaacgctcgatttactgattgagcggggcggagaacatattaatgtgcctctcacaccggagataaaaaacagcggcggcagtaaacaaattggttttgccggtgtcgaattaaaggttattccgctcgacccgcagtatattacggaacatcagtacgggccggtggaagcggttgccgaggcgaccgggaaaacctggcagttaatgaatctgaccgtgaaaatgatcggcaagctggtgaccggtgatgtaaaactgaataatctcagcggtccggtatcgattgcgaaaggtgccggtatttccgccgattccggcttagtgtattatctgatgtttctggcgctcatcagcgtcaatttagggatcataaatctgttcccgctgccagttttagatggtggacacctgttattcctgcttatcgagaagataaaaggcgggccggtgtctgagcgtgtacaagacttcagttatcgtattggtgtaatggcactggtactgttgatggggcttgcacttttcaatgatttctcccgcttctga

SEQ ID NO: 276780 - DNA, 891 bp, Morganella morganii
atgatcagtctgagcaggctccgggaggaaatgttgcttaagtaccgtctaattactgccattattttaattccgctggtactgctggcgatgtttatgctcgcaccggcacatttcggctgggtagtgattgccgtgtgtggtctggccggctgggaatgggcgcagtttgccggtctgaaaggtgccggacagcgtattgtcaccggtgtgctgtttgccgccggtctggctgcgtggcagctgacactggatatgaataacctgatggcggatgctgctgtacaggtcagcctgtgggcggcgctggtctggtgggtctgcgcggtgctgctggtgatcagtttcccgaaatccgccgcgctgtggaaagattctgtgattatccgcctgatcttcggtgtggtgaccattgttccgttttacagcggcatgatggtactgcgcaaccagggatatgcgggcggtgatgtgtatcagggggcctggtggctgctgtatgtcatgctgctggtctgggcggcggattccggggcgtatgccttcggccgcctgctgggcaaacacaaaatggcaccgcgtgtctcgccgggcaaaaccctggaaggtctggccggtggcctgattaccgccggtctggtgtcctggctgttcagtcactattcgccgttacagacactgccggaaaacctgattatcgtgtcagtgattgtggttctgatttctgtgttcggtgatctgaccgaaagcatgtttaaacgtcagtccggcgtgaaggacagcagtcagctgatcccggggcatggcggcgtgatggatcgcattgacagcctgaccgcggcagtaccggtatttgccggtctgatcctgttagtattctccggcttttaa

SEQ ID NO: 276781 - DNA, 774 bp, Morganella morganii
gtgacagtatccagtgaaaatgcctcagaaaagccgggacctcagcatgtcgccattattatggacggcaacggccgctgggcaaaaaaacgcggaaaattgcgggtttccggccatcgcgcagggatcaaatcggtccgcagctcggtcagttttgccatcaaaaaccagataaaatccctgacactttatgccttcagcagtgaaaactggaaccgtcctgaacaggaagtccactcactgatggagttgtttgtctttgcgctggacaacgaagtcaaaagtctgcacaaacacaatgtcagattatccgtcatcggtgatatcagccggttcagcccgcgtctgcaggagcgtatccgccgtggtcaggtgctgaccgccggtaacaccggtttacagctgaatatcgccgccaactacggcggacgctgggatatcacccacagtgtgaaacaggtgatagcacaggtgcagcgcggcgaattgtcggctgaggatgtcagcgaacaggatatcagccgtcatatctcgcttcatgaccagccgccgattgatctcgtgatccggaccggcggtgagcatcgtatcagtaacttcctgctctggcaggttgcgtacgccgaattttattttacagaagtgctgtggcctgactttgatgagaacgcattcagcgatgcggtgacttcttttacacagcgtgagcgccgtttcggcggaaccacacctgatgatcagtctgagcaggctccgggaggaaatgttgcttaa

SEQ ID NO: 276782 - DNA, 1197 bp, Morganella morganii
atgaaaggtttggcaattctcggatccacaggatctatcggtaaaaacacactctcggttattcgtcagcacccggatctgttccgtgcggtggttctggcagccgggaaaaatgttcagacgatgtttgaacagtgtctggaatttaaaccccgctatgcggtgttatccgacgaagtggctgccggtgaattgcgcattcagctgaaactccacggcagtgcaaccgaagtactcagcggcagtgccgctatctgtgaagtggttcagcttgatgaagtggatcaggtgatggccgctattaccggggtggccgggctgctgccgactctcgcggctatccgcgctgacaagcgtattctgctggcgaacaaagaagcgctgatcaccagcgggcgtctgttttttgccgccatgagcaccagccgcgctgaattgtttcctatcgacagcgaacacaacgcgattttccagtccctgccggccggcgtacagttatctctcgggcatgctgacctgactgccgcaggcattgattccattatcctgaccggctccggcggcccgttccgtgagaccaccttatctgagctggccaatatgaccccggatcaggcctgtgcacatccgaactggtcaatgggacgtaaaatttccgtggattccgccacgatgatgaataagggccttgaatatattgaggcacgttatttctttaatgcatcagcaaaacaaatggaagtgattgtgcatccgcagtcggttatccactccatggtccgctatactgacggcagcatcatcgcgcagctgggcacaccggatatgcgcaccccgatcagttattccatgagttatccgggccgtattaccgccggagctgaacgccttgattttacccgtatgggcggcctgacattcactgagccggattataaccgttacccgtgcctgaaactggcgatcgaagcctgtgatgacgggcaggcggcaaccacggcaatgaatgcggcgaatgaagaaactgtgcaggcatttttacaaaacagaatccgtttcacagatatcgcgcaaataaaccgtatggtagtggaaaatcaccggttcacggaacctcagtcaattgatgatgtccttattattgataaacaggcgcgggaactgacccgtaaatcaatcggaaaaatcgcgaagtaa

SEQ ID NO: 276783 - DNA, 558 bp, Morganella morganii
gtgattaatgaaatccagaaagacgcgcaggaacgcatggaaaaatgcgtcgagtcgctgaaatcccaaatcagtaaagtgcgcaccggccgtgcttccccgagcctgctggacggtatcgttgttgaatattacggtacaccgactccgctgcgtcagttagctaacgtggttgcggaagattcacgcaccctggctatcactgtgtttgaccgttcaatgtcaccggctatcgaaaaagcgattatggcctctgacctcggtttaaacccgtcatctgccggtacggttatccgtgttccgcttcctgcactgactgaagaacgccgtaaagacctgatcaaagtcgtccgcggtgatgctgagcagggtcgtattgctgtgcgtaacgtccgccgtgacgcgaacgataaagtcaaagcactgctgaaagacaaagaaatcagtgaagatgatgatcgccgttcccaggacgacgttcagaaaatgactgacctgtttatcaaaaaaatcgatgatgcactggcagcaaaagaaaaagagctgatggaattctga

SEQ ID NO: 276784 - DNA, 729 bp, Morganella morganii
atggctaccaatgcaaaacctgtttatcaacgtattctgctgaagctcagtggcgaggctttacaagggaatgaaggtttcggaattgatgcgactgtacttgaccgtatggcgcaggaaattaaggaactggttgaactgcagattcaggtcggtgtcgttattggcgggggcaatctgtttcgcggcgcagggctggccgaagccggtatgaaccgcgttgtcggtgaccatatggggatgctggcaaccgtgatgaacggtctggcaatgcgtgatgcacttcatcgcgcttatgtgaatgcgcggctgatgtctgcgattccgctcaacggcgtttgtgacaactacagctgggctgaggcaatcagtcttttacgtcacggccgtgtggttattttttctgccggaacaggcaacccattctttaccacggattctgcggcctgtctgcgcgggatcgaaattgaagcggatgtggtgctgaaagccacaaaagtggatggtgtttactcagccgatccggccaaagacccggatgcagtgctgtatgaaaaactcaattatcaggatgtgctggaacgcgaactgaaagtgatggatctggcggcctttaccctggcccgtgaccataacctgccaatccgtgttttcaacatgaacaaacccggcgcattacgccgtgtcgtgatgggcgagaacgaaggtaccttgatttcgcgtgactaa

SEQ ID NO: 276785 - DNA, 852 bp, Morganella morganii
atgtctggaattaccgctgcattggtaaaagaactgcgtgaacgtactggcgcaggtatgatggaatgtaaaaaagcactggttgaagcaaacggtgatatcgaattagctatcgataacatgcgtaaatccggccaggctaaagcagcgaaaaaagcaggccgcgttgctgctgaaggcgttatcttatctgctgtcagcgcagatgctaaattcggcgcactgatcgaagttaactgtgaaacagacttcgttgcaaaagataccggtttcctggcattcgcacaggacatcctgaatttcgttatggctgagaaaactgctgatgcagaagctatcgttgcgaaattcgaagaacagcgtgttgcactggttgccaaaatcggtgaaaacatcagcttccgtcgcgctgctatcttagaaggcgacatggtcggttcttacatgcacggcgcacgtatcggtgttctggttgcggcaaccggcgcaaacgaagaactggttaaacacattgctatgcacgttgcggcaagcaaacctgaatataccaaacctgaagatgttcctgctgatgttgttgctcacgagaaacaaatccagctggatatcgcaatgcagtccggtaaacctcaggaaatcgcagagaaaatggttatcggccgtatgaacaaattcaccggcgaaatctctctgaccggtcagccgttcgttatggaaccaagcaaatctgtcggcgacctgctgaaagaaaacaaagcagacgtgactgcattcatccgtttcgaagtgggtgaaggtatcgagaaagctgaagctgacttcgctgcagaagtcgcggcaatgagcaaataa

SEQ ID NO: 276786 - DNA, 720 bp, Morganella morganii
atggctactgtttccatgcgcgatatgcttcaggcgggcgttcacttcggtcaccagactcgttactggaacccgaaaatgaaaccattcatctttggtgcccgtaacaaagtgcatatcatcaacctggaaaaaactgttccgatgttcaatgatgcattagctgaactgaacaaaatcgcttcacgcaaaggtaaaatcctgttcgtaggtaccaagcgtgctgcaagcgaagcggtacaggaagctgcaatcagctgtgaccagttcttcgtgaaccaccgctggttaggcggtatgctgactaactggaaaacagttcgtcagtcaatcaaacgcctgaaagatttggaagcacagtctcaggacggtacttttgacaaactgaccaagaaagaagcgctgatgcgtacccgtgaacttggtaagttagaaaatagcctgggtggtatcaaagacatgggcggtttacctgacgctctgtttgttatcgatgctgagcacgagcacattgcaatcaaagaagcaaacaacctgggtatccctgtatttgctatcgttgatactaactctgatccggacggtgttgatttcatcatcccgggtaacgacgatgcaatccgtgcaatcaagctgtacctgggcgcagtcgctacttctgtccgcgaaggccgttcacaggatctggctgttcaggctgaagaattagccgctgaataa

SEQ ID NO: 276787 - DNA, 273 bp, Morganella morganii
atgccaatcattgcgcggaaacccggcggacaacggataaccgccggcatgaaaactgaagaaaatgtggtatcgctgctgcttttatggtataaagcgcgccggcattccgtgtattttgcccggttgccggaaaatttaactaactcaactgttataacacacacgaatcggcacgtgcgccggggtgctccgaagcttaacgctgacagggagtcggaagcatgggattcgtggaggcataaccccaacttattatttacagaggtttaa

SEQ ID NO: 276788 - DNA, 798 bp, Morganella morganii
atggcaatcacaatcaaaacagaagacgacatcgcgaagatgcgtgtcgccggtcgtcttgcggccgaagtgctcgaaattatcgccccgcatgttgtgccgggtgtcagtaccggtgagctcgaccgcatctgccacgagcatattacagtaaagcagcaggccatttccgcctgtctcggttaccacggcttcccgaaatctgtctgtatctccgtcaatgatgtggtctgccacggcattccgagcgaagataagatcctgaaaaacggcgatattgtgaatatcgatgtcactgttatcaaagacgggttccacggcgacacctccgccatgtttatcgccgggaaaccgacgattcagggcgagcgtctgtgccgagtgacacaggaaagtctctatctggcattgcgtatggttaaaccgggcatccgtctgcggactatcggcgcggctatccagaaattcgcggaaggacatgattactctgtcgtgcgcgactactgcggccacggtatcggtgaaggcttccacgaggaaccgcaggtgctgcattatgacggcgatgacggcggcgtggtgctgaaaaaaggcatggcatttaccatcgaaccgatgctcaataccggcgattaccgcatccgtaccatgaaagacggctggactgtcaaaaccaaagatcgcggcttatccgcacaatatgagcacacgctggttgtcaccgatgacggctgtgaaatcatgaccctgcgtaaagacgaggaaggtgcgctttcccgtattctcgttgcgcagtaa

SEQ ID NO: 276789 - DNA, 651 bp, Morganella morganii
atgctggtaccgttttatttcctgaccaagtcatccggctggtggcagaaagagtttgtcgcacgcgggtatgctgtcggtgtgcagatccaccagaatgtttacgaactgaatctgtttgatctggcctttaccaaaccggtgtttgatcaccagtcagtgtatgtcccggcaagcagcctcggctcctatttcacactggttgcgttgtcacaacagtcgtttccgacgcggaaaaacatcctgttgccgacggaaaatccctatttcaacggccggatcagcatcactgccctgaatattgataccgccgcgctggcaagcgagagcagacagtacctgaatgccggggagagctaccgcatcacccgtctgaccgcttcaccggaccgctctctgttcagtttcagtaccgatgataatgcgccggaaatactgcaatcctccccgtacctgaaggatatcgtcaatcagggtatgtgccgcacagacggacagagcaacggctgcgggatcgctgaagatacctatattaacctcagtgatgtcctgcataactacttccgcagctgcctgatttaccgcgtggatgatgaaaacaaacgcattattctgcagtttatcccgatgcccggcccggtactgatataa

SEQ ID NO: 276790 - DNA, 2655 bp, Morganella morganii
atggacaacgcccggagtaccgcatcagccctgaaacccgcctcgccgttatcctttactgatgatgatttgcagctgcctgtgctgcgggagcacctggagcattaccgccgctggcaggcagaggctttccgcgaaggccagccggttcataccctgctgctgacccgcagtgattatatcgatcagctgctgatccgcctgtggcaatttttcagttttgatgaggtggcggatttcgctctggtggcggtcggtggttacggtcgccgggaactgcacccgttgtcggatatcgatatcctgctgctgagcagagccccgctgccggaagcactcacaccgaaaatcggtgagtttattgccgtgctgtgggatctgaaactgacggtcggccacagtgtccgtaccctggatgagtgtatccgcgaaggactcggcgacctgactgtcgccaccaacctgattgaatcgcgtcttatctgcggcactctgccgctgttcctgcagttacagcggcagatatttaatgacagcttctggccgtcaccgcgcttttttgccgccaaactggcagagcagaaagagcgccacgcccgctatcacagcaccagttataacctggaaccggatatcaaaagcagtccgggcgggctgcgtgatatccataccctgctctgggtggcgcgccgtcatttcggcgcgacgtcgctgtatgaaatggccggttccggcttcctgaccgatgccgagcgggaagagctgaatgaatgtctggatatgctctggcgcatccgctttgccctgcatctgtccctcagccgctacgataaccgcctgctgtttgaccgccagctcagtgtcgcggagcagctcgggtatgacggcgagcacaaccagccggtcgagcggatgatgaaagcctattaccgcgtcacccgccgcgtgtccgaactcaatgagatgctgctgcaactgttcgacgaagccattctgcacgcagggcaccacgatacccccaagccacttgataaggattttcagctgtacggccaccgtatcggacttatccgtgattcgctgttcagtgaggatcccgctgccattatgcggatgttttaccgcatggcctgcgatgacaccatcaccggcattcattccggcacactgcgtcagttgcgccatgcccggcggcacctcagccgtccgctgatggagtatccggaagccagagagctgtttatcgcaatcctgcgccatccgcgcggtgtgagcgccgcgtttgttccgatgcaccgccacggcgtgctgggcgcctatatgccgctgtggggcaatattgtcgggcagatgcagttcgatctgtttcatgcctataccgtggatgaacacacactgcgggtgctgggaaaaatcgatactttcaggctggaatccgagcgggtgaatcatccggtgtgtgtggatgtctggccgaaactgccgcaaccggaactgctgcgcctcgcggctctgttccacgatatcgccaagggcagacagggcgatcatgccgttcttggtgcggctgatgcacgggaattctgtgaatatcacggcctgaatgaagcagacacagatctggtcagctggctggtggaaaaacatctgctgatgtcggtaaccgcgcagcgccgggatattcaggatccggaagtgatccgcacctttgccggtgaagtacagagcacagagcggctccgttaccttatctgcctgaccgttgccgatatatgggcgaccaatgcctcgctctggaacggctggcggcgcagcctgctgcgcgagctgtttatcagtaccgaaaaccagttattacgcggagtgcataacaaaccgaatctgcgccagcggatccgccaccaccgcgatcgcgcgctggctctgctgcgtcaggatggtgccgatgaacagaaactgaaccggttctggtcgcgctgtcatgcggattattttctgcgccatactccggaacagcttgcctggcacgccggagctctgctgaaaaatgacatggcatcaccgctgacccttatcagtaaccagcgcagccacggcggcagtgaaatttttatctggtgcaacgaccgcccttctctgtttgcttcggtggtcagcgagctggatcgccgcaatctcagtgtccagaacgcccagattttcaccaaccgcgacaatatggcaatggattcctttgtggtactggagccggacggcaagcctctcgccgccgaccgccatgacaccatccgcaaagcactggctcgtgcggtcaccacagattatgtgccgaaccaccgcacccggaccgcgcccgccaaattgcgccattttgatgtgccgacgcgggtgaagtttattcacaataaacgcggcctgcgcagctacatggaattatatgcgctggataaacccggactgctggcacaggtcggtcagatttttgccgggctcggccttcagctgcacggcgcgcgcatcaccacaaccggcgaaaaagtcgaggatatttttattctgacggataaggataataaagcgctggataaaaatattcaggaagaactgactgaacggttgacaaaagccctcaattcaaaggataaaacagagtaa

SEQ ID NO: 276791 - DNA, 825 bp, Morganella morganii
atgcagcaattacaggccattattgaatccgcctttgaagatcgcgccgctgtaacaccggcaactgccacccctgcactgcgtgatgcagtcaatcaggtgattgagttactggacagcggaaaactgcgggtcgctgaaaaaatcggcggcacctgggtgacacatcagtggctgaaaaaagcagtgctgctctctttccgcatcagtgacaatcaggtgatggacggggctgaatcccgctactttgataaagtcccgatgaaattcgcggattacgaccaggcacgttttgagcgcgaagggttccgtgtggtaccgcctgcggcagcccgccgtggtgcgtttatcgcccgcaatactgtgctgatgccgtcttacgtcaatatcggtgcctatgtggatgaaggcacgatggtggatacctgggcgacggtcggctcctgtgcgcagatcggtaaaaacgtgcatctctccggcggtgtcggtatcggcggggtattagagccgttacaggccaatccgaccattatcgaggacaactgctttatcggcgcacgttccgaagtggtggaaggggtgattgtggaaaccggctccgtgatttccatgggcgtgtatatcggccagagcaccaaaatttatgatcgcgaaaccggcgaaatccattacggccgggtcccggcgggctctgtggttgtctccggcaatctgccgtcaaaagatggccgttacagcctctattgtgcggtgattgtcaaaaaagtggatgaaaaaacgcgcggcaaagtcggaattaatgaattgttgcgcaccatagactaa

SEQ ID NO: 276792 - DNA, 387 bp, Morganella morganii
atgtacgacaatttaaaaagtctgggaattacgcatcctgaagatattgatcgctatactcttcgtcaggaagcgaacaacgacattctgaaaatctatttccgcaaggataaaggcgagttttttgccaagagcgtgaagttcaagtacccgcgtcagcgcaagactatccaggatgcacagggtttcaaagagattaatgagatcaacagcaacctgcgttatgtcatcgaagagctggataccatctgccagcagaccgaaagcgcaatgccggaaatcgatctgaaacgtaagatcctcgacgatctccgccatctggagcatgtggtgtccaataagatcgctgaaattgaaagcgatctggaaaaactgacccgcaagtaa

SEQ ID NO: 276793 - DNA, 450 bp, Morganella morganii
atggcacgtatcggtatttttatcggcacagtttacggtaactcgctggctgtgggtgaagaggcgcagaccattctggagcaggccggtcatgaagtggtgttgtttgatgaaccggaactgtcacagtggaaagattaccttacggatgtggcactggtgatcacttccaccaccggacagggcgatctgccggataatatccgcgaactgtttgccggtctgcgggatgacatcggttatcagccgtcactgcgctacggtattatcgcgctgggcgacagcagttatgataattttggcggtggcggccgtcagttcaatgagttactgcaggaacagcatgcgcagcgcatcggcgagatgctggtgattgacggcgcggaagtcgctgcaccggaagagtttgcacagccgtggctgaaaacctgggcggcactggtcagctga

SEQ ID NO: 276794 - DNA, 744 bp, Morganella morganii
gtgacacaaccattgcaggacacgccattactggaaatctgttatcaggatgaacatatcgtcgcggtgaataaacccgccggatggctggtacaccgcagctggcttgaccgtcatgaaacggtatttgtgatgcagacactgcgcgaccagataggtcagcatgtttttccggttcaccgtctcgacagaccgacctctggcgtgctgctgatggggctgtcatcagaggtagcgcggctgctgtcacaacagcttgaacggcatgaaatgcagaaaacctatcatgcggtggtacgcggctggatagaggaaacggcgacactggattacccgctggtggaagaactggataaaatcgctgataaatttgcggcggaaaaaccggcgcaaccggcggtgacacactaccgcccgctggcgaaagtggagtgtccggtggctatcgggcgttacccgacatcccgttttaccctgacggaactgaaaccggaaaccggacgcaaacaccagttgcgccgccatatgcagcatctgcggcatccgattatcggtgataccgcccacggcgatctgcgtcagaaccggggattcacagaacatttcggcagccgccggctgatgctgcatgcatctgaactggcactgacacatccggtcagcggagagccgctggtactgcatgccggtttcgacgaaacctggcagcgggtggcggaacagcttggctggacattaccctga

SEQ ID NO: 276795 - DNA, 324 bp, Morganella morganii
atgacaaaacatcagcagattactgcgatcctgacggacatcgagaatgagatgcgcgccgtcgagctgtggcaggggcagcctccggcagcagaagcatttgaaagcgaactgccgtttgcggtggataccatgaatgcccatgaatggttacagtggatccttatcccgcgtctgtatgccatgattgaacagggcgcggcactgccgtccgcctttcagatagccccgtattttgaagagcactacagaggggacgaacaggctgcacgctatctggtgctgcttgaccatttacgggcactggacgggcttttcgcgtga

SEQ ID NO: 276796 - DNA, 552 bp, Morganella morganii
atgacccgcacagtttctcaggcgttacatcagtttacccggcattatgtcggtttatggcaggaaaaaacaggtttaccgccgatcagtcacgatctttatggtattccttccccgtgtattatccgcaccggtgatgaatgtgtgtactgggagccggcggaattcaccgcagacaagcatttgcagccggttgagaaagcgctggatattcagctgcacccggatatcagtgaattctacacgcagcagtttgcgggggatatgcaggctgtttttgaggatattcagctcagtctggtgcaggtctggagtgaggatgattttatccgcttacaggaaaacctgattggtcatctggtcacgcagcgccgtctgaaactgccgccgacacagtttatcgccacactggaatcagaatttgacatgatttctgtctgtaacctgaatggtgaagtgatcctcgaaacgttcggtaccacaaagcgccgggtgctggcggcggatacggcatcatttctgtcacagctgacggcggtatgcacagcataa

SEQ ID NO: 276797 - DNA, 852 bp, Morganella morganii
atgtctctgtatgaaggaaaggcggaactggcgtcactgacgctcggtaaaaaaaccggttatgagcagcattacaatcccgcactgttacagggcgtgccgcgcagcctcaaccgggatgccctgcatctgcatgcggataatctgccttttcgcggtgcggatctgtggacactctatgagctttcctggttgcagccgaatggcgtgccctgcattgcactcggctatgtttccctcgatgccgccgggctgaatctgatcgaatccaagagcttcaagctctatctcaacagctttaaccagacggtatttgcctctgcggatgatgtccgccgcacactggagcaggatttaagcgcctgtgcacagggaaaggtgacagtggaactgctgcgcccggatcagttcacggaacaaaaaatcattgattttaccggcgagtgtatcgattatcaggatattacgattactgattatcagttcagcagtgattatcttattgatgccgtcaatgaaaatgacgatgtcgttgaagaaacgttagtcagccacctgctaaaatcaaactgcctgattacacagcagcctgactggggctccgtcgcaatacagtatcgcggccccaaaattgatcgtgaaaaactgctgcggtatctggtgtcattccgcaaccataacgagttccatgagcagtgcgttgagcggatttttaccgatctgaacacacactgccgcccggttgccctgactgtctatgcccgttatacacggcgcggcgggctggatatcaatccgtggcgcaccaatacggactttacaccgtctgcggaccgtctcgcccgtcagtaa

SEQ ID NO: 276798 - DNA, 1368 bp, Morganella morganii
ttgatcacacatatcagcccgttaggctctatggatctgctttcccagcttgaagttgatgttctgaaacggacagcaagcagccacctgtaccgtctgtaccgcaactgttcgctggcggtactgaattccggcagccagatggataacagtcatgaattactgtcccgtttcccggattttgatattaacgtgctgcgccgtgagcgcggggtaaaactcgaactggtgaacccgccgcagaatgcatttgttgacggcaaaattatccgttcactccaggctaacctgtttgccgtgctgcgcgatattctgttcgtacagacccagatcaccgatgccgagcgctgccgcggcctgaatctggacaacagcgcacatatcaccaacctgattttctttatcctgcgtaacgcccgtgccctgcatattgatgaagatccgaatatgattgtctgctggggcggtcactccatcaatgaaaccgaatacctgtacggacgtaaagtcgggaacgagctggggttgcgcgagctgaatatctgtaccggctgcggaccgggtgccatggaagcgccgatgaaaggcgcggctgtcggccatgcccagcagggttacaaaaacagccgttttatcggtctgaccgagccgtccattattgctgccgagccgcctaacccgctggtgaacgaacttatcatcatgccggatatcgaaaaacggctggagagctttgtccgtctggcacacggaatcatcatcttcccgggcggggtcggcacagctgaagagctgctctacctgctggggatcctgatgcatccggaaaacaaagatcaggtactgccgctggtactgaccgggccgaaagagagcgccgactatttccgtgtgctcaatgacttcgtgatcaacaccctgggcgaagaagccacccgccattatcagatcattattgatgatccggtggaggttgcccgcgtaatgaaacgcgccatgccggaagtgaaagataaccgccgcagcaccggggatgcttacagcttcaactggtcgattaaaattgccggagatctgcagcatccgtttgagccgacacatgaaaatatggctgcactgaacctgtaccgcaatcaggagccggaaaaactggcggcagatctgcgccgtgcgttctccggtattgtcgccggtaacgtgaaagaaaacggtatgcaggccatcgcacagcacgggccgttcaaaatccgcggcgaggaagccattatgcagcggatggatgtcatgctgcgcggatttgttgaacagcaccggatgaaattaccgggcggcacggcttacgagccatgctacgaaatcatccgctga

SEQ ID NO: 276799 - DNA, 768 bp, Morganella morganii
atgatccatttactgattatcgatgcaatgaatctgatccgccggatctacgccgtgcagagccagtccggcctgctggtctgtgagcaggcactgatgcagatcctgaatcatgcacaaccgacacacgcggtcaccgtctttgatgaggacgaccgcagtcacagctggcgtcatcagctgttgccgggttacaaagccggacgcagtgagatgccggaagttgtccggcaggaactgccgctgctgcgggagatgtttgcccgtcacggcatccgggcatggcattccgaaggggatgaggcggatgatctcgccgccacactggcgcacaaagtcggtcaggcgggacacagagtgacgattgtctccaccgacaaaggctattgccagctgctctccccgcagattcagatccgcgactattttcagaaacgctggctcgatatgccgtttattgccgccgaatttggtgttaccgcacagcaactgccggacttctggggcttaagcggaatcagcagcagtaaaatccccggcatcaccggtatcggcccgaaagcagcggccacactgctcagcacctttgctgacctggattcactttacagccacattgaccgggtaccggagaaatggcgccagaaactgatcgacggaaaagccatggcttacagctgtcgtgacgtcgccaccctgaaacgggatctgcatttacagggcaatctcagccagttgcgcttaccggcgggaaacagcagcacttaa

SEQ ID NO: 276800 - DNA, 696 bp, Morganella morganii
atgtttacgaaagcacgcattattttaggaatttttgcagttattggtttgctgatgctgatgggcggcagttacttttacctttccggttattcacaggaaaaaagcgggatagtggtcaccggacaaattatcgatctgtctgttcaccgcccggatgacagtgcttcttattgccctgtggtgagatacactgacgggcaggaagagtatgtcatggagtcctcttattgcagcagcggttaccgcaatgctctgggtgacgatattgatgttatttaccagccgggcagcccggataacgcggttattcactctttcggcggtctgtacggcggagccgtgattcttctcggaatgggggcggtatttgcactggtcggtacgctgccactgattatcatgtatctgcggaataaatccggtcagcgcctgctgcgggaaggaatgccggtcaaagcccggttcagtgaagtgatcctgaataccacgatcaatatcaacggccgcagcccgtttcaaattgtggcacagatgcatgacaccgcggcaaacacggtgaaactgtattacagccacaatattgcgtttgacccgtcaccgtttattaatcaggagtttgtcaccgtttatgtggacaagaaaaatcctgataaatactacatggatatctctttcctgccgaaggtgaagtga

SEQ ID NO: 276801 - DNA, 1098 bp, Morganella morganii
atgaataaaatagcattatattgccgtccgggttttgaaaaagagtgtgcagctgagatcacggataaagccgggcgtcttgagatttttggtttcccgcgggttaaagagaacagcggttatgtcatttttgaatgctatcagccggatgatgccgatcgcattgcaaaagagatcccgtttaaagaacttatttttgcccgtcagatgatagttgtcggcgaactgctgaaaaacttacccgaaaatgaccggatttcgccgatcatggggatgctgaccggcgtggtggagcgtgcgggtgatctgcgtgtcgaagtgcctgacaccaacgaagccaaagagctgatgaagttctgccgtaaattcacggtgccgctgcgttcggcactgcgtcaggaaaaactgctgctggcaaaagagaaccggggccgtccggtcattcacgttttctttatcgcgccgggctgttgctatgttggttattcttactcgaataataactccgcgttctacatggggatcccgcgtctgaagttcccgtcagatgcaccgagccgctctaccctcaaactggaagaagcattccatatgtttattccgtatgacgagtgggaagagcgtctggaaggcgggctacaggcggtggatctgggtgcatgcccgggcggctggacgtatcagctggtgaaacacagtatgcgcgttcaggccgtggataacggcccgatggccgaaagtctgatggaaaccggtcaggtgcgccatctccgtgaggacggctttaagttcgtgccgacatccaaaaatattacctggctggtctgcgatatggtggaaaaaccggcgaaagtggccgcactgatgaccacctggatggttaacggctggtgccgcgagacgattttcaacctcaaactgccgatgaaaaagcgctatgaagaggtatcccatatcctcgaaaaaatggctgctgaaatgaaagagcagggcgtgaatgcgctgatccacgcgaaacatctgtaccatgaccgtgaggaaattacggtgcatgtccagcgggtgtggggtgcatataacccggatcgggtattctga

SEQ ID NO: 276802 - DNA, 396 bp, Morganella morganii
atgaatagtcggttgatgttaatttttgccggtttcagcggctttttttatgttgcattcggcgcaatcggatcgcaccttttaacaccggttctggcaaagcaccagatggactggattaatctgggtctccagtaccagatctcacatacactcgccctgatggggttggccgctgtgctgatgcgcaaagtggtattgtggttttactggagcggactgtttttcgggatcggcattctgctgttttccggcagcctgtattgtatggcgctgttacagatgaaatattttgcctattttacgccggttggcggggtaagtttcctgttaggctggttttgtgtattgattggcgcgctgcgtctaaggaaagtggcttccggccatgaataa

SEQ ID NO: 276803 - DNA, 927 bp, Morganella morganii
atgtccaaacgattgcctccgctcaatgctttgcgtgtcttcgatgctgccgcccgccatttaagttttactaaggcggcggaagagctttttgtgacccaggccgcagtgagccatcagatgaaaagcctggaagatttcctcgggctgaaattattccgccgccggaaccgttcgttgttgctgacggaagaggggcagagttattatctcgatattaaggaaatcttctcagcgataaatgacgccacacgcaaactccaggcacgcagtgccaaaggggcgctgacagtcagtctgtcaccgagtttcgcgatccagtggctggtgccgcgtctgtccggctttcatcaggcctatccgggcattgatgtgaggatccaggcggttgaccgcgaagaagataaactggccgatgatgtggatgtggcgattttttacggcaggggcaactggccgggtctgcgtacagaccggctgtatgcggaatatctgatcccggtgtgcgcgccgtcactgatgaccggtgaacggccgctcaaaacgctgaccgatttgtcgtatcatacacttctgcatgattcatcccgccgtgactggcaggcgtatatccgccaggcggatttgcagcagcaggtcaatgtgcagcacgggccgattttcagccacagtgcgatggtgattcaggcggcagtgcacgggcagggcgtggcactggtcaataatgttatggcaaaaaatgaactggatgccggtcgcctggtgtgcccgtttaaagatattctggtcagtaagaatgcgttttatctggtgtgtcaggacagtcaggctgattccggtaaaatcgcagcattccgtcagtggattatggcgcaggcggcgagtgaacaggaaaaactaggttggatgacaagtgagcaggattaa

SEQ ID NO: 276804 - DNA, 1212 bp, Morganella morganii
atgaaaaccttttctcccgatacattccgccgcgcctttcccgggactgccggtgacactgtttttctcgacagcgccgccaccgcccttaaaccggaggtgatgacacaggccaccgcccgctattatcagcatgacagcggtgcgaccgttcaccgcagccatcaccggcaggccagagccgtcactgaacagtttgagcaggcgcgtgacgctgtgcggcagctgattcaggctgaagatgcccgcagctgtatctggacaaaaggcaccaccgaatccctgaacctggtcgctcagggctttttccgcccgcgtctgcagccgggggatgaaatcattgtcagtgagctggaacaccactccaacctgatcccgtggatcatgctggcacagcagaccggggcaaccctggtgaaatggccgctgacagcggacagaacactgtgctgtgatcagctggaaaccctgctgtcaccgcgcaccaggctggtggcggtcacacagatgtccaatgtcaccggctatcagccggatattgcccgcgcggcacagctggcacatcagcacggcgcactgattatcgctgacggtgctcagggcgtggttcaccggccgctgaatgtcaccctcagtaatgttgatttctatgcgttttccgcccacaaactctatggcccgaacggactgggtgtgctgtacggccgtccggaactgctcagtgatatgcagccgtggcagggcggcggcaaaatgctgacggataccgactttttcagctttaccccggcaccggttcccgcccgttttgaagcaggaacaccgaatgtggccggtgttactgcgttcggggaaaccctgcgctggctggatacaatcgatctcaccgccgcccacgattacaccattgcactgtgtgacagtgcggagcagcaactcgcggcacttcccggtttccgcagttaccgcagcccgggcagcccgctgctggcctttaatatcgatggtattcatcacagtgatatcgccacgctgctgtcggaaaaaaatatcgccctgcgccacgggcagcactgtgcacagccgctgtgtcaggcgctgggaacggaaggctgtctgcgggtctcctttatgccgtataatcagccggatgatgtccgtcagctggtgcaggcggtacaatttgctcttgaaattctggctgacgactga

SEQ ID NO: 276805 - DNA, 447 bp, Morganella morganii
atgacacacacattcccggcacacccgttcggccactctatccaccgtgagcagctcacggaaaccttttccgcctgccgctcatgggaggaaaaataccgtcagctggtgatgctggcgcgtcagttaccggtactgccgccggaaagcaaaggtgaagagacagaaattaaaggctgtgaaaaccgcgtctggctggatggcacactcagcagtgacggtacgctgcatttttggggggacagtgacgggcggattgttaaaggtctgctggcggtactgctgaccgaagcggaaggtctgacaccggcggcactgttatctgcggatttatccgcagcgtatgaacagtacggactgagcgcgcagctcagccagtccagacaaaacggcattcaggcactgattgatgccgcccgcgccattgcacagcggttcagcgcctga

SEQ ID NO: 276806 - DNA, 816 bp, Morganella morganii
atgcaaacccttttatctgatgcttatctgcagcgttttgccggtattggtcgtctttatggtcagcaggcgctccgcttgtttgcccgatctcatttctgtgttgtcggcatcggtggtgtcggctcatgggcggcggaagcgctggcgcgtaccggaattggtgccattacactgattgatatggatgatgtgtgcgtgaccaataccaaccggcagatccacgccatgcaggggaccgtcgggcagccgaaaattgaggtgatgcgggagcggatcctggccatcaacccggaatgtcaggtgcattgtacggatgattttgtcacgccggataatgtcgcggacatgatgagcccgggatttgattatgtgattgatgctatcgacagcgtccgcccgaaagcggcgctgctggcttactgccgccgtaacaaaattccgctggtcaccaccggcggtgccggcgggcagatcgacccgactcagattcaggtcgcggatctggcgaaaaccttacaggatccgctggcagcgaaactgcgtgagcgcctgaaatcagactacggtgtgcgcaaaaacggcaaaggacggctcgggatcgactgtgtgttctcgacagagccgctgcgttaccctcaggcggacggcagcgcggcctgtggtatgaaaaacagtgcggaagggagtatgcggatggactgtgccgccgggttcggtgccgccaccgtggttacggcatccttcgggtttgtggcggtctctcatgcactgaaaaaactggtggcaaaagcggagcgtgctgcggcggaataa

SEQ ID NO: 276807 - DNA, 1104 bp, Morganella morganii
atgggtatgagcaaaaccggcaggtatttgttgtgcggcgtattgttttcgttattggttggttgtgaatcgcgcccgacagataaaggtcagcagtataaagacgggcatctgacacagaatttacaggaagtggcgaacgtcaacagtcccggtgtgccggtcaacggcccggactttctgaaacaggtggaagccatccggacaacctcaccgcgcctgtacaaccagtacagcgagaacttccgcgcggttgaaaactggctgcgttccggtgcggatactgcgcaactgcggcagttcaacctgcacagctatcagatggaaggcaaagataactacggaaacgtgcagtttaccggctattacaccccggttgttcaggcccgtcatacccgtcagggggagtttcagtatcctatctaccgcatgccgccgaaaaaaggcagccgtctgccgagccgggcccagatttataacggtgcgctgagtgataactacgttcttgcctacagcaattcactgatggataacttcctgatggatgttcagggcagtgcttatattgatttcggtgatggctctgagctgaactttttcgcttatgccgggaagaacggacacggttataccagtatcgggcgtgttctgatcgatcgcggcgaggtggagaagaaagatatgtcgatgctggcgatccgcaagtgggccgataatcattctccgcaggaagtgcaggaattactggagcaaaacgcctcttttgtctttttcacaccgaagcagtttgcgccggtgaaaggggcgagcgcggtaccgctgattgccaaagcctctgtggcctcggataaaaccctgatcccgccgggcaccacgctgctggcggaagtcccggtgctggataaccagggcaattttaccgggcgttatgatatgcgtctgatgatcgcgctggatgtcggcggcgctatcaaggggcatcacttcgatatctatcacggtatcggccacgatgccgggctgatggccggtttctacaatcactacggccgtgtctgggtactgaaaaaagggatcccgccgatcctgaacccggcgctgtag

SEQ ID NO: 276808 - DNA, 843 bp, Morganella morganii
atggctgatccaacctatgtcccgcctcaggtgtgggaatggaaacagaaaaacggcggaaaatttgccaataccaaccgtcctgttgccggggcgacacatgaaaaagccctgtctgttggtaaacacccattgcagctttactcgctgggaacacctaacggtcagaaagtcactatcatgcttgaagaactgctggttgcggggatccgcgatgcggaatacgatgcctggctgattgatatcggcgaaggtgaccagtttggttccggatttgttgatattaacccgaactcaaaaatcccggcattggtcgacagaagtggtacgaagcaggtacggatctttgaatccggtgcaattctgacctatctggccgaaaaattctctttgttcctgccggaaacacaacctgaaagggcagaaacattgtcatggctgttctggcagatgggatcagcaccgtttgtcggcggcgggtttggtcatttctatgcgtatgcaccggaaaaatatgaatatccgattaaccgctacgcgatggaaaccaaacgccagctggatgtcctgaaccgtcagctcagtcagcatgaatttattaccggcgataactacactattgctgatatggctgcatggccatggtacggcgggttagtgctgggtacgctgtataatgcggcgacattcctgtctgtcagtgaatatccgcatgtgatccgctgggcgaagcagatagcggcacgtccggctgttcagcgcggacgccgggttaaccgcagcggcggagagccgtcagatcggtttatccgcgaacgtcacgacgcatcagatctggactga

SEQ ID NO: 276809 - DNA, 1935 bp, Morganella morganii
atgtcctggtatccgtcccgcatttcaacccgcctgactatcgggggcatcctgctcctggccgtcactactgccattattattgttgttatgctgtggcggggtcagccccgcgttgtggaaattaatactgcattaattgaagaaaccggacgcggcctgacatccagggtcagcacgattttatctcagacagacggaaaaacggtcagcctggcacgcctggcggaagtgctgcccaatgatgaggcgctgtaccgctatatcccgcccaatctgattgaaagcaacagcctgatcaccggcggcgggatctggccggagccgggggcattcaccccgggaattgagaaacgcagctttttctgggcacggaatccggccggggaactggttttttctgatgagtacaatacagagggtgccggtaattatcacaatgaaagctggtaccggaatgcccgtgagcaatcaacggagagctgtttgtggtctgatgtttaccgtgatgccgtttccggtgtgaatatggtgacctgcagtgtgccttacaaaaccgacggaaaatttgccggtgtcgcgacaacggatatccgtctggataatatcgccgctattatgcagcaatacggcaacagcaccggaggctatgcctttgtgacagaccggcaggggcagctgatctattttccgggtgatgacagtaagcaattcaaaacctttgatgagctggccgcacaatcagcctggctggcaccggtggcagcaagcctgaagcaaccccattctgagcaatccgctatcgacagtatccgcattgataatgacggtcagctgaataccgcttcacaagtgatgctgttcccgatggccgataccggatgggtcataggccttgtcacaccggaaagccggatcaccgggctggcaaaagtgatgatgcaggatgtgctggaagccctgctgccgatcatggcactgctgttgctgggctcctggctggttgtccgccgtctgatcacccgcctcgatgagacccgtaaggccctcgatgatatagctcacggggaaggcgacctgacccggcggatggaagttcgcggtgccgatgaaatctccgctatctcacaggcatttaatctgtttgccgataaaatatcatccatgctgctcacggtacgcagcagcagttctgttgtggccggaaataccgttaatcttgctgataataataacgagttgtccgcacgggtcacacagcaggcggcagcgctggagcagagtgcttccgcgatggaagaactgaatgcaacggtgcgtcagaacagtgagaatacccatcaggctgatgaactggcggaaaccaccgcacaaacagcaagccgctgcggagatatgatgcgtgatgtgatttcgacaatgaacagcgtcagtacatcatccggacgaatggttgaaatcgtgtcagtgatcgacagtattgcattccagaccaatattctggcactgaatgccgccgtcgaggcagcgcgtgccggtgattccgggcggggctttgcagtggtcgcaaccgaagtcaggtcactggctcagcgcagcgcacaggcagcacaggagattaaggcgctgattgatgagtctgtgcagaatgtcaaaaccggcagtaatcaggtgcatgaagccggagaaacgctggcagatctggtgatggatgtgttgcaggtaagacagctgatgagtgatatccgtgtcgccggtgaggagcagagcaaagggctggccgaggtaacgatggcagtctcagagatggataccaccgtacagcagaatgccacattaattgatgatgccgcttcgcggacgcaaatcctgcgaagagaagccgaacagctttcgcagatggtatcagcctttaaattaccggaaccgcgttaa

SEQ ID NO: 276810 - DNA, 654 bp, Morganella morganii
gtgaatttaatcagaagaatgaatacgttactgctctctttcttagttttgctgatgttcagtccgcagacatttgcacacccgcacagttttatcgatatggaaacgaccctgataacggaaaaccagactctgacaggcattgagtatgtctggaaaatggatccgatgacttccgcagatattctgtatgatttgatgaacaccaaagaagacagtccgcagtggaagaagcaggcagcatctgtgatggccaatataattgcacagtcttatttttccgaactgaattatcagaataaaaaacagcctcttaaactctttccggacacctaccggatgatgcgtgagggattgcagattgttatgtcattccgtgtctcactattgcatccgataccgttaaccggcagcaccattgagctgaaaacgtatgagccgactttttttgtcagtatgacctacaacggcaaacgcgcggttcacctttctccgccggatgcatcacagtgccggttaatttttaccgaggcagatccttcggataccctgaaagattatgcgctgtcgctggataccggtgataccccggatgatgacctgacgctcggtcgtcagtttgcacagcagatcaccttacattgcccggagtga

SEQ ID NO: 276811 - DNA, 990 bp, Morganella morganii
atgacatcatattcacggattattcttcagctcactgttgtacttattgttttgtctgcaggcgggttgctgtacagccagtggccgtcattgctgcatgtcagtgcaaagttacaaaaagaactgaatttcgaaatggcggcgctgattcagaaagtagtgtctgatccgcttaaagcgggcgggcttctgacgcttttcagttttttatatggcctgttgcatgctctgggcccaggccacggcaaagttatcctttctgcttacatcgccacacatccggcaaaattacgccacagcacgttattaagtattctggcttctctgcttcagggcactgtggcggttgttttagtctctgttgtgctgtttatattaaacttgtcagtacgccagttaaataatgtcagccagataacagagaaagccagttatgcgtttattattctttttggcaccattattgttatccgcgcattacgccgtttatttatcaggccaccgatcaataagccgcaaataaaaacaatccgcgtatcggataataaaccccctgtggcattaaaaccggtttatctgcaaagcggacaagttgagacatgcagttgtggtcatcagcatgttatgccgggaaatacagtcaccggcaattggcggacacaagccggtatgattctggccatgggtagccgaccgtgttcgggggcattattggttttactgttctcatcagttatcggtgtttttcactggggaattatcgcggtattcgcaatggcgctgggaaccggcatcactctttgtatgattgcctggttcgtacacagcatgcgctttctggcactgcgcctgtcccgtaatcccgggcaaaaaacaaaccggtattatggcgatattctccggttgatcgccggggggatatttattattgctggtgtattgatgtaccagacagtcagtatgcccggagcagggttttttaccagctga

SEQ ID NO: 276812 - DNA, 1539 bp, Morganella morganii
atgacagcgatagcgtctggtgccgggaaactgactttattaggtttttttgcgattactgcctctatggtcatggcggtatatgaatacccgacatttgcaacatccggttttagtttggtttttttccttttattaggtggtttattgtggtttattcctgttgctctttgtgcggcagaaatggcaacagtggaaggctgggaagagggcggcatatttgcctgggtttctaacactctgggtgagcgctggggatttgctgctatttcatttggttatctgcaaattgcaatcggctttatacctatgctctattttgtattaggggcattatcttatatccttaactggcccgaactgaataacgacccgatagttaaaactatcggtgctttggttatattatggatattggcatttactcagtttggcggtacaaaatatacagcaactatcgcaaaaataggtttttttgccggtattttattacctgcgcttattttggtatttcttgctatacattatctcgtcagcggtgcgcctttagcgactgaaatcagcgcatcgacttttttccctgattttacaaaaataggcacattggtcgtttttgttgcttttatattgagttacatgggggttgaagcctcagcaacacacgttaatgaaatggaaaacccgggaagagattatccggctgcaatgtttttactgatgatagcggctatttgtttaagctcaattggcggattatcggtcgcggtatccattcctgtcagtgaaatcaatctgtccgcaggtgtggtgcagacattcaatgtgctggtatcaagttttaatcctgcgcttgagtggactgtccgtattattgcggcactcttattattaggtgtactggcagaaatagcatcatggattgtggggccatcccgcgggatgtatgttgctgcccaaaatggtattttaccgaaaagctttgctaaggtgaataaaaatggtgtgccggttacattggtgatttcacaattactgattacaactattgccatcatagtgctgaccaacagcggcggaggcggtaatacctccttcctaatcgcattagcgctgaccgttgttatttatctgtgcagttattttatgttgtttctcgggtatatgtgtttaatttgcaaacaccctgagaaaaaacgggtatttaatatacccggcggtaaaggttttaaacttgctgtggcatctgcgggttttatattatcggttcttgcctttgttgtttctttctttccaccaagttcattaccgggcggtgcaggcagtgaatcctatgtgatgttacttggtatctgctttgtggttatttttctgctgccatttattatctatgcatttcataataagcaaggtaaaaaaaccggaatattaatgatacatattaaaacgcataacgcgccgtcaggtcatttctttatccatccacgggcacgatctgcatatcatttggttcatgatgataaaaaagatcaaaatgagtaa

SEQ ID NO: 276813 - DNA, 405 bp, Morganella morganii
atgtatacttcccggcaggaaatttattcatggttaattaaaatgaaagaaaacgaaaaagcacaaatcaagcttctcagcgaccgtttagaccttacccgccaccagatggcaggtatgctgcagaagaacgaaacagaaaagtatgcagaacttgagaaagaaaaagccgcgctggaaactgaaattgcccgtctgaaggaacaacgaagcaagaaactcagcaaagaagcgcagaagctggtggatatgccgttcaaacgtcttatcactaagaaagagcaggctgatatcggcaagcttaagaaagctgtgcggggcctgatcattgtccatccgatgacggcattaggccgcgaaatggaactggacggtatgaccggtttttctaagactgatttctag

SEQ ID NO: 276814 - DNA, 1947 bp, Morganella morganii
gtgctgaaagttgacaccgcattacaggaaacaccgcaatccgtttctgttattacgcaaaaagagctggaaacccgcgcaccgcaaaaactggatgaagcactgcgctacacctcaggggtaactgctcagccttacggtgcggataatgatactgactggtttaaaatccgtggttttgatgccgcgacctatctggataacagccgtttattccgcgacgggtattatacctggctgcttgaaccttatggtttcgaacaaattgaagttgttaaaggcgcgtctgcggttctgtttggcgaatctacccccggtggtgctgtaaacgtggtgactaaaaagccgctgtttaccccgaaaggggaatttttccttgaagcaggaaataatgatcagcgcgggtttggttttgatgttgccggtcatgccagcgatgatggggatatccgttaccggatagtcggtttgatgaaacaggcagacggtgaactggataaaacggataacaaacgaatttatctggcgccttcacttgcgatggcgctttctgacgataccatgctgacattgatggcaacgtatctgcatgatgatggtacaccaaccaacccgtttttccctgcagccggtacactgatcgattcaccttacggaaaaattaaaccttcagcgaatcttggcgagccggattatgataaatacaagcgctcacagttttccgccggatatctgctggaacacgatattgacacgacctggcgtttctcccagcgcctgaattatggttataattcactgacgctgcgcagtgtatatgcatttccgaacgcagatacatctgcaacctctctcgcccgcggtgttgtattccgtgacggtaacagccagagtataacattcgataacaacctgacgggacaatgggattcagaacgtctggagcacaccctgctggcaggggctgaaattcagtatcaccggacaaaaggtgatgaacaggacagttatgcattcagtccgatcaatccgtggaatccggtctacggacaatacgtaccactggacccggccgataatattaaccggacaatagataaaactcaggcaagcctctattcccggtaccaaatcaagctggacggtaaatggatcggtgttgccggggtgcgttatgatcaggtaaaaactgagaataaaaatcagacagctcataatgataaatcccggaatgatggtgaggtaagtgtcaatgccgggctgatgtatctggcggataacgggttatcaccctataccagctattcacagtcatttgaagtgatgagcaccatcgaccctgcgaccggcgatttgtataaaccgctgaaaggtgaacaaattgaggccggagtcaaatatacgccttcattcctcgatggttatctgaatattgcctggttcagtattgaacagaaaaatgcactggttaccaatccggatacttctgttgccacacagacaggaaaagtcacatcaacgggggcagaagctgaaggatttgtgcagttgactgataatgtcaatgttcaggcatcctatacctacacaaatgccaaaacagataataccggtggtcagggacgtaaacagactgcgcttatccctgagcacatggcatccgcctgggtcaattacacactgccggtaaccggcagcggagaactgacacttggctccggtgtccgctatctcggtaaatcaaaagacaatccggcgagcagtgatcgtactgtgtctgctgctgcattatgggatgctgcggtcatttataagctgaacaaacagtggcagcttcaggtcaatgtgaataatctgctgaataaagaatatatttctgcatgtgattattactgctattacggccaatcccgttctgttgtcgttcagaccaaatacagctggtag

SEQ ID NO: 276815 - DNA, 774 bp, Morganella morganii
atgtttgaactgaatggtatccgtgttgtacgtgacgggagggtaattttatccgtcccgtccctgacgatcccggcgacggaactgactgttgtgcttggtcataacgggtcaggaaaatccaccctggttgatctgctggccggtcagacccggccggatcagggggaaattttgctgaataataaaaacctcaccggttacaccaaacgggagctggcacaacaagtggcatttttgccgcaaaaactgccggtttctgccgggctgaccgtccgtgaactggtcagcctggggcgttttccctggcgcggcacatttggccgccggcatccggaagataacattattatctcacaagccatggagagtgccggtgttacggaatttgcacaaatacccgccgataatttatccggcggtgaacgccagcgcgcatgggttgccatgttactggcacagcaatccccggtactgatcctcgatgagccgacatctgcactggatattcatcatcaataccaactgatgaggctgctgcaggatttaaaccgcacacagcgtaccggtatcattgttatccttcatgatcttaatcttgcattgcagtatgcaacccatattatcgccctgaaaaaaggcaaagtagcgtttgaaggcaatgctgcattgctggaggatgaaacccgtctttccggattatatgaaacggctatccggttaataccgcatccggatacagaacaacgaaaagtagcagtcgtatgcaactga

SEQ ID NO: 276816 - DNA, 924 bp, Morganella morganii
atgcaactgatgttattacgtttaatccggttatccgccatattttttttgatgtttgcgggagcagggcaggcggctgtcacaatcaatgatgaccgtggcgggcacacgtttgaaaccataccgcagcgggtcgtggtgctggactgggatctgcttgaacaaacgctgtcattagggataacccctgccggggcaacagaaaccagcggttaccggcagtgggtccgactgccggtactgacagaaaatgtggctgaaaccggaacccgggcggaaccgaatcttgaaaaaattgccggactgaagccggatgtcatcctggcgggtgcatcacaggcagatctgattccgctgttagagcagatagctcccgtcgtttatctgaccaatttttcatcagcagatgatgccgctccggtggctatccgtcaccttaaaacgctggggatactgtttggcagagaacagcaggcggatgaacaactggctgctttaacgcagcggtttacggagctgagcaataaattagcggctgtctatccgccgggtacccgggttactgtcattcgcttttccacgctgaccactgtttttctgccggctgataattctgctgttaactatgtattgcgtaaccttggcctgacaccggcaatccccctggacgcgcagccatggggaatcgcccagcggcggatcaatgtattacaggacgtcggtgatggttatgttctctggtttcgcccttttcctgaagaaaaaaaactggcagatacccgtttgtggcaggcgatgccatttgtgaagcagggcaaaatcaatggcgttgcaccggtctggaattacggtggcgtctgttcattgcagcggatggcggatgccattacggatagtttactggagattgcgcccgcctcatga

SEQ ID NO: 276817 - DNA, 1974 bp, Morganella morganii
atgaaaatccgttaccttatactctttccgttgctgtttattctgttgatagcgattaacttgcagcttgagcccggcttatctccgcaacagcaactcagcctgatttttacgccggaagcggcacaaacgtttccggctgtattttatctttacggacaattgccgagactttgcatggcattgctggcgggtgcgacgctggggctgaccggcagcctgatgcaacagctgacacaaaataacctcacttccccgatgacactcggaacatcatccggagcctggcttgcactggttattttatctgtcagtttcagtgaattggctgctgattatgccgttcctgttgcaaccgcaggtgcgctgctggcgtttgcatttgtcatcctgattacaggaagccgtaatattacaggattaccactgattgtttccggaatggtggtcaatattctgcttggtgccatcgcaaccgcggtgattacactgaattcgcagtttgcgcaaaatatttttatgtggggagccggcgatctgactcaggatggctggcagaatgtcacagatgttatgccgcgcctgctgcctgttttgtttattctgctgttcgccccgcggatactgacggtattacggctgggacaccagggcgcacaagcacgcggattatctgttttgccggtatttttgctgttcatggtactttcagcatggctggtttcggtcgtgatcagcactgccggtatgattggctttatcggattgctggcaccgaatcttgtccggattgccggtgcacgcactgcgctacaggagctgattttctctgtgattgccggggcgtttttactgttgtttgctgacaccctggctctggctctcgggcaactgatacagacggtgatcccgaccggtgtgatgactgccgccattggtgcacctgcacttattgtattcagccgccgccgtttcaccgcacaggatcagatgaccattattctgaaaccggttatttctccccgttttctgccgcacgcaatgagtgttgttgtacttctgctgtttgccgggctgatgaccacgatcttttttcagcaatcagaaaccggcttcctgtggggggctccggagcctttccgctggtctctgagatggccgcggttattgtcagctgccacggcaggtgttgcactggcgctggccggaaccctgttacaacggttaatttataatccgctggcaagcccggatattcttggtgtgtcatccggggcgacggttgcacttatcctgataagcgtgttaacgggaaatatgattcagacctccctctggggagcagcactgaccggcagtgctctggtactggggcttttacttttactcggacgccggcatcagtttgcaccggcaacattaatccttaccgggattgcgctgacggcggggctggaagcctttgtgcaattctttctggcgcagggggcattgagtaattaccggatactgctgtggctgtccggttccacctatcgtgtcagcggagagcaaagtgtactttttgcatccgtgattgccggactgactgttattatactggcgctcagtcgccgtctgacgctgatatccattggcagaacatttgctcaggcccgcggattgcataccggccgtaccgctctgctgatgctgacactggtcgccctgttgtgtgctctggtgacagcaactgtaggacctctggcctttaccggtctgattgcgccacatatggcggcgttgtgcggtgctcaaaaagttaaatcacagctgatttttgccggtctggcaggcgcggttctgatgatatgggcggactggctgggacaaacgcttatctggccgtcacagatagcagccggaacattggtatctgtccttggcggcagctatttcctggggttaatgctggtcagccgatttcggaaataa

SEQ ID NO: 276818 - DNA, 336 bp, Morganella morganii
atgctgaaagtatacgcaatcttaatggtgtctatcatcgctgaaacaacagcgacaaccatgatgaaggcgtctcatggattcacaaagttagtacccagcattattgtaattatcgggtacgctatttctttttatggcttatcgcaagttgtcaaaagtatgaatattggtatcgcctatgcgatatgggccggagcagggatatttcttgtttcagccctgtcattttttatttataaacaaaaacttgattttccggcattaattggtctgggatgtattgcactgggcattattattatccagttattctctaaatcgattactcattga

SEQ ID NO: 276819 - DNA, 1302 bp, Morganella morganii
atgctacagattacattattactcttcggtgccgaatttatcagagggaaagctcattacctctggggagtggggctcctctggtgtttaatgggtatacttattttcattgatggtcttgatggtattcttttttttccaatacatttgtttggttttttattattacttgaaagtctgattacattatgtgttgcctcaggcagtatcgggacacaaaaaacgatacttttctttaaaggtggtctgtttttattctgtgcattggttatcttaattaatcagacatatagtaatgtattactatcggcaatgtttggttttattttcttcgttaccgggttatttgttgttgcatcagcctggattattcgttttccgggatggaaattaatcctgttatgggggggaacagaaatcctgtttgccttttttctgtttacccatcaccaggcaacaatttccttttttatcggatttttaatgatagggagtggttttggatgcctgaagatagcattccgggctcgtcatattcagcggggaacatctgtatttgaattgatgagaccttcacctgtatcgtttaagaagaaagggatagctctgccaataaccgatacggcacaattaccgtctttaaatgcaacagcagagcaaggtgctattttaactgttcatatctggacacccgaaggctccgcaaaccagcgccctgtgccacgtccgattattaaccgttatattgcggcggttgattctgagggggttatctctacagggcatgcgtctctggagctctgtccgcatctctatatcagtttatacccggaagaagatattgatcgttctccgtcagagtttttcaggttattaaaagcaactgctgataataatattcccggaaggtttttacccgattatcaaactgaagcatccgagtggtgtgaatctgacagacagattgtttttaatatttataatcatgcttctttgctgaatttttgggaaaaatatcgccggcaccctgtttataacctgacataccagaactgttccagtagtgttgcatatgcgctggaagccgcattagatggcgttttgtccatgcaaaaaagaagttattttatgggcgttttaaatgtactttgtatgccggagttgtggattgctgctcaaattcgccggcgtgcactgatgatggcatggacccccggattaattatggattatgcacgtgctttacgtgctattgtacatccggttccggttccttggtataagcgcttgttaaaacgttga

SEQ ID NO: 276820 - DNA, 1275 bp, Morganella morganii
atgaaaacatccttgttatcaaacaaaaccacattagtcgtaataataggatggttattactttattacgtgacaggcgaaatctcggaaatactcacacctgaaaattctgatatatctgtggtctggtttcctgccggagtcgcaacaaccgcttttttatgtatgcacaaacgccaatggctgctgctgctaattggcttcattgtgttaaacatggtactgaatggctttgatagtgaggaatttaccctttcgtttatatacgctgttctggctgtgctttcttgtattgttattgcctggagtgtccgcaggtatgcccggcagggagatgacctgcaaataatattgttatggctatcagcaacaataattgtcagctttgctgatgcggttttattttctgtccatatgtattggtttgataatacatcacttaaagatatattctgggatggattcattgctgatattaccggcaatatctttgcaacaacggtaattatggggttaattaacacccgtttcaaatggatggttccctcccataaagttaatataatttggggtagtgctattttatttcttcttattaccagcactatattgatcttcaatgatactgcaatacagatataccattcctattttcaccagcaacgcaatattgccaaattatcgttactctgcatcccggttttacttgctgttatgctgtctgtactgtggggaaatcgggggggatcaatagcgttgttaatacttgcgacgattacaatctattacacccgcagcaagcagggacctttttatctgcatggtttgtttcgtcatgaatcactgtggctgatacagggatatttgacattaatatcgttattaatggtttttttacgggttgtgacccgaagtactcatcgaattgataacactcaaggagtttataaaccacagcatttggtatatcaacttaacctggataatggtgttattgaatggggaaatacagatagcttatttcaacaaactgatttaacagctctttctggtgtaaggcagattatggcatctgttcatcctgacgatcgtgaaaagcttgccgggcattgggaacaaaagcaggcaaataccactcttccggggataacctttagtctgaaagataaggaaggccgttggtggaatatagaagatcgcgggagtgttattttcagtaataatgatccggtaatgattgtcgggaactggtttgttttaggtgaaatttcctga

SEQ ID NO: 276821 - DNA, 837 bp, Morganella morganii
atgacccgtttagcctcccgcttcggcagggcgaatatcattcgtcgtgaccgtccgttaaccaccgaagaattatactgcactgtacccagtgtcttttcagcagagaaacatgaatcccgcagtgaacgctatacctatattcccaccatcaccctgcttgagagcctgcagaaagaaggtttttatccgttctttgcctgtcagacccgtgtccgcgacgatagccgccgggagcacaccaaacatatgctgcgccttcgccgtcataaccagatcaccggtatccaggtaccggaaattattttgttaaacagtcatgatggctccagcagttatcagatgctgccgggattatttcgtgcagtttgtgagaacgggctggtctgtggtgatacctttggtgaggtcagagtgccgcacaaaggtaatgtcgtcgataaagtgattgaaggggcttatgaagtgctggaaacgtttgatgcggtggctgaaaaacgagaacagatgcagtctctgttgttaccactaccggcacagcaggcgctggcgcatgccgctatcacgtaccggttcggggatggccaccagccggtcacggaagagcaggtgctgcaaccccgcaggtgggaagataagaaggatgacctgtggacagtataccaacgtttacaggagaacctgattaaaggtgggttgtccggacatacagccaaggggaaacgatcacatacccgggccgtgaccggtatcgatggtgatatccgtctgaacaaagcgttgtgggtgatgacagaaaaaatgtatgagcatttcagaagtcgtcaacccgtgtga

SEQ ID NO: 276822 - DNA, 333 bp, Morganella morganii
atgaaaaaagcaacattatctgcgtcaccggcggcagtctggcagacattgctgacttacctgctgcaacagcattacggcctcactctgaatgacacggaattcagtgatgagcgcgtgattgaggcctgtttttgtcgcggggtgtcactgtgtgaggcactgaatgcctttgcggggaaatgcgccctggtccgcactggccggcgcaacaacggtatcactgagccgtcactcggtatcactgcgaccgatattctgcgggcacggaaagcaactggtctgacagtacaccgcagaactcacaccaccagccgatacacctctgtataa

SEQ ID NO: 276823 - DNA, 441 bp, Morganella morganii
atgacattatcagcccttccgctccaagagcccgcagccatcaaaagcaatctggttcatccccggggcagagacacattctggcggttttatttcggcagcgtaccggactggcagcgcctggaaggtgacatttttacccggatgagcgaactgtgtgacgtttattatggcgctttctgggagttcagcatgctcaccaacggcggtgcgtttatctggccggatatgccggagaccacgctgtacctgtttaatccgcataacggcaatgacgcggaactgagcccggaagcggccggtatcgcggtatgcctcatcacttacagtctctggtcatttaacactgagagtcccgtgctggtggagtatttttatcagttacgggactacgcccttcagcataaggagtgtgccgctatttttcgccttattgattaa

SEQ ID NO: 276824 - DNA, 213 bp, Morganella morganii
atgtctgtttttaaattaatggccaccacgctcggtgtggtaacggtagcgttagctacgtactgtgcctggcaggctgcggctgaggcggcagacaatgaggatgcctccgcagcggaaaagctggcggcaggcctcagtgccgcgctggcctgctcagccgtgctgggcggtacccttgaccgtctgctgggtcggctctttccccgctga

SEQ ID NO: 276825 - DNA, 450 bp, Morganella morganii
atgaaaagaagtctgacactgcttggttgtttactgctgtccgccccggtttttgcactgcgcatgcccggtgaggtgcagcctgaccgttacacttattacctgaccccggaatacgggcagcagctgaaaatgcagaacgacggcaaaggccggaaacctgcgtggcagccactccctgccggagaactgaaaagtgagacaagagcggatttatccaaaggccatccggctccggtggccatgacctgtatcagcagtatttattataacaccggggctcaggccaactggctgaaggtgggctgtatcgataataacggtatggagtatgaaaccagtaagaaatggccgccgaaatccgtcgcggagcgggtctgtaaagccggagagggagactgtgagtccttcctgcagatggatactgacagctggtccggtccgcagtaa

SEQ ID NO: 276826 - DNA, 672 bp, Morganella morganii
atgcatacgtcagattcacgccatgaccggcttgcgtcacggctggccatcattatcagccgcctgttccgcggcgaaacactgtatccggcacagctcgcccgtgagtttaatgtctcggcccgcacactgcagcgtgatttcagtgagcgcctggtctttctggacacggagccgtatcagggcggataccggctggccgccggtcagcgcccttaccggacagacagcgatatcctgtactttgccgatatcacccatatcaccccgctgttcccttcgcttgaccgcaggctgctgtccgttctgctcagtccggaaaacggtgccccctgtctggtctaccatgagccaccgcaatccgccccgacgctgttcggtggcttttatgtggtgacacaggcgattgtccgcaggcggctgctcagcttccgctgtgacggtcaggaccatgagggcatggctccctacaagctgatttactttcagcgggactggtatctgtgcggggaatggcagtctgccctgcgggtgttccggttcagccagctgcagaacattgctgtgtccggacgtcgtttccggcaggatgcggttatcgcacggacggtcacccggcccgaatttatcaccgcattaccccattatcagtttatccgttcattaccttaa

SEQ ID NO: 276827 - DNA, 729 bp, Morganella morganii
atggcaacctaccgtatcgaccctgacctcgcgtttatcgggcagtgcagcaatgaagacctcagtctgctggtctccgtcctgactcacgacagtaaagacggcaaaaaacggctggcggagtctctgaccgcctcaccggaatatcagctcttttaccctgaccatcagaagtactggccagccatctgtgccgaactgcaggccttcggggctaacagccttgtcacgctgctgcgcggtaacaaaggcgtactttaccgtgaaattctgcacgatgtctgcgacaagctgaaagtgaactacaacaaagaaagtccggtggaaaccaccgaacttaacctgctgatgaaagtcctggagaaaagcctgcgggagatgtcacaggacgagctggtccgttttgcggacggactgaagctgaatctgtccgcgccgactccccagcttattctgctcgcggtgcaggccgccgtgaccagctccggtgtcgcagccctgcagtttgccacaattgccgctgtcggtgtgattgaagccatgggcggtattgccacctggggtacgctctttgccgccaaccgcgcgctgggggtactggccggtcccgtcgggattgcgctgagctccgcctggctgatagccgatattgccggtcccgcttaccgggtcaccgttccggcctgcatcattgtggcgtacctgcgtcagaaggccctggcggcctga

SEQ ID NO: 276828 - DNA, 1008 bp, Morganella morganii
atgaacgataaaaactatgagattgatgagttgctcaaagtgaaagacctgaggaaagcgggtgtttttgtattttccatgtcaacagagcccgggtttgaatgggttgaaaataaatatttagcaggtgacagaaatgacaaatcacggttaagagatttaatccatgaagttattggcatggcgaacagtaattataattaccttaccaatgaagttttaaatgatgtaaataataatcttatcagtattgataagtttgaatggattaaagaagacagtattgcctctgcatattgctgggtaatgttaaataatataaagcccttaacacccataagcgataaatatactcaggcaattcaacagtcaaacgtggtaaaacccactattaagagttggtcggacaataaagaattcaggggtttacctgtatcacagcaaataaaatacattaaaagtaaatttggaataaaagagaatcatgtcagcactgaagagatgtatcgcgacttcctgactgtctttgatcatatgaacctgcggtttggtgaaaaagaaaatattataaacatgcttaaggatgaatggataaaatccttcacagcagtaaaaaatataaagtggctgagtaaggataatgatgatgcctgtaactgggcatgggattatatttgcaattactctgtcgataatataaaggtatcggtctggccactccggttctttaatcccgtaagttccggggataaatatatttgtttttatgctgccctgcgggcatggaatgataaccccggggggaagaagtattttttatactctcttaaaaaggcatggcagcagcgtactctccggaaaaaacaaaagaataaaaaaacacttagctgcagtctcgatgaggaagttaaaattcatcttgagcaactggctgacgcttatgaaatgacgatcaccgatttggtgacccggttaattgagaacgagtacaatgcaccgaaaaaataa

SEQ ID NO: 276829 - DNA, 1020 bp, Morganella morganii
atgaatgacaatataacctgtgaaatactggcgctgtcacaaacctataataacggtacggagattaccgatgacacaacagaccgtgagctattccggttgatagcgttacacaccactgcattaattaaaagaaagagtcagtctttaccttttagtgcgtactattttggtgaaaaattacaaataaaggccactaaaaccggtcagttgttttatgaattaatacaaaacactctttctctttctcgggtaaccggtaaccagcgtaagttacatccggttattccgctgattgtttctcttgctgataaatatcatattcgttatgttccgatgctgtcggaatactatcctgactcagaggaggatattaaacagttaaatgacgcctattgtgagtttattcagtcagtggacagcaaggagtataaaaacgctgtcagtacctttaagaacagtgcccgcaagaattaccggttctgttgccgctatattgaaagcctgtttgagcgccatgcaaagctgctggtggtcagaacagacctgtcttacggaaaacgggtaagtcataaagttacagcccgggatttaacccgtcaccggattgccctgtataaagcaatacagcggttacccctgtttaaacactgcgtcggttatatcctgaagctggaatacggtcgtgagaaaggctttcactaccactgcctgtttttcttcaacggccagcatgtcagacaggatatcacgatagccaggctcatcggtgagttttggcaggaaaccatcactgacggacaggggctctactttaactgcaaccgttataaatcagattaccgtatctgcggtattgggatgttacaccgcagtgagagccaccggcgggaaggtctgatgaccgctgtgaactatatctgcaaaacagaccagtgggtgaaacttcaggtaccggggatcgaccggacattctggcggggaaccatcagaaacaaacggcgtaaaacacgccggtaa

SEQ ID NO: 276830 - DNA, 222 bp, Morganella morganii
atgaataccaccgatatcaccacagcttcttctccgcttgacgaaccgctcgtggacatgaaattcatcaccatattaaccggattaacggacaagtggttttacaagcagatacaggaagggctgttcccgaaaccgattaaactgggacgcagttcccggtggcagaaaagtgaagtaagcgcctggctacaggcgcgtattgcggagtcccgtgtgtaa

SEQ ID NO: 276831 - DNA, 7089 bp, Morganella morganii
atgaaaaaaaaactaatagataaacctgcgattcaatctagaaaatcgattcagctggtcgtatggctgaatatcgttatacagatattatttcctttctcagccgtaatttctcctgcaattgcaaaaacggaggttgctgatttactgcctgcggaaaaacccgtgcagtggcatgctatttcatctggtgaaacattagctacgctggcttcccgttaccatacttctgctgaaaagctgaaatcacttaattttgcttattcacaattcgatacagcagctctgttaccgcaaggaaaatatattctcgttcctgtttccggaaaacaattgtctgtgtcctctcctgttacggactcagaacaaaaaatagcagctttcgtttccggaaccgggcggttcctgcaaaataaccctgacatggacaccgccgcttctctggcccgcggggtggtcacaggagcagccggcgatgaaattcagcaatggctcagccggttcggcactgcccgggtgcagcttgatacggataaaaacttttccctgaaaaactcacaactggacctgcttgtccctttgtacgaacaaaaggacaagcttgtttttactcagggtagcatccaccggactgatgacaggactcaggctaatctggggctgggatatcgctggttttccggtgacaactggatgctgggtgcaaacaccttttttgactacgacctgtcgagaggccatgccagaatggggttaggaggagaatatcagcgtgattttcttaaattgggtgttaacacttaccatcgactgacaacgtggaaaaattcaccggacacggaagattatgaagaacgtccggcaaacggatgggatgtccgggcactgtactggctgccgtcactgccacaacttggcggaaagttgatgtatgagcagtattacggcgatgaagtggcactgtttggccgtgataatcgccagaagaatccgaacgctgtcactgccggggttaactacactcctgttcccctgctaacgtttggtgctgaacagcgccgggggcagtccgggaaaaatgatacccgtttcagtatggatataacatatcagctcggcgtaccgtggcagcagcagattaatcctggtgcagtagcggccatgcgcagcctggccggcagccgttatgacctggtagagcgtaacaacaacattgtgctggaataccgaaaaaaagaggttatcagcctgaagacggctgacctggtgacgggatatgccggtgagcagaagtctctgggggtatccgtcaacagcaagtacggcctggagcgcattgactggtcggcttccccgctcatcgctgcaggaggcaaaatagtacaggacgggagtgactgggcggtggtgatgccggcttatcgctcaggtttggaggcttctaacagttacactgtcagcggcgttgccgttgacaagaaagggaacgtttccggccggactgaaacccgggtcaacgttacccagccggcgattgatacaacgaccagttctctctcacctccggccgcgaccctgccggctgatggcgtctcactgcaggaatttgtcctgaaggtgaatgataaagaagggcagcctgtagatattgctgaaaatgaaatcagtgttgagaaaatatcgggacttcgcgggagcagcaacgccactgtgtcgtcttttacccggcgtgcggccggagaatatgtgatgacagtcacctccggaacgatgcctgaagcattcacggttacaccatcagcccggaatacgaaatttgcgtctgcagatgtcaggctgacagcagacaatgccacagcaatggtaaccgctctggatgtggttgaagacaatgccattgctgatggtcaatctcaaaaccgattccgggtaacagttgttgatgcacagagtaatcctgtccccggccagtcagtcagccttcaggcggataacagcgccactgttgcgaagtcagccgttacggaagacgatggtacagtcattgttccggttacttcaccgcttgcaggcgaaacaaccgttaccgccggtatcaacaataaaggaagtaagacgctgaagctttctttccgtcctgaccagaatacggcgcggattgagcaaaaggatttaagcgttctccctgaggtctccctggctgacggaaagacagaaaaaaccgtatctgcccgggtgactgatgcaaagggtaatgctgtaccggacgtcctggtaacattcagcgcagataatggcgcagttcttgctgaggaaaaagtcaaaacagatacctggggtatggttaccaccacgatgaccagtactgctgccggtatcgcgcacgtagctgccggcgtgaacggccggtcagtttcaaaggagaccacttttaccggcaataatgcgacggccattgtgacctctgttgatacaactgctgcatccggtgtcgctgacggtgtgactgctgtgatattcagggcgtttattaaggaccagaacggcaaccctctttccggtattcctgttgactggaaatccaacaaagacagcagcattgtcacctttaatgatacgcaaactgtcacgtcgggagagggtattgctgaagtccgggtcaccagtaccagggcatacagtgacgtggttgtgacggcttccacgaatgcatcgtcaaaggccgcttctccgtttacctttgtggctgacaggcagacggctgtcatcagggcgttcagcactaacaagcagacgctgacggccaatggcaaagatgcagcagaactgacagccagcattactgacacccacggtaacccgctttccggtgtggcagttgagttcactaacagcaataacgccggaattacaccttcgcgcacggtaacggatgaaaatggcgtagtctcagcaaacctgactactattcatgcggggccggtgactgtttcggtatcactggataacggaagcgaaaaatctctgactctcacggccgtatcagatgaacagactgcggatgtcaccgtcgctgcaaataccacttccgcaacggcaggacagataaagcctgttattgttactgccactgtcattgacgggaataataatccggtttcaggtaccagtgtggcatggcagagcagccacaaccagttgagtgacacagtcagtcagacgaatgcagaaggcagggcctcggtacagctgacggggacagaggcagccctcacgacggtcaccgcagttctctataacggtcagaagggttcggctcaggtgattttcggacccggagagcctgacaacggacacagccggctgtcagtgtcgcctcagtctattacggctgacggaaaatctgaagcagttacaacacttatccttcgtgataagtgggataacccggtaccgggaaaggcggttaactgggatgctgatataaacgcaggtattcattttgtagcgtccgaagatgggaatggcgtttatcaggctgcggtcaccggaaacgctgaaggggaatggttgctgaatgcacaaagtggaacggtcaacctggaggtgccgctggcacttctggcaagccgggattctgcgcagattgacagcgtatctgtatccggccccgatacggccagagctgacggtcaggaaactgtgacgatacgtacgcaggttaaggatgaaaatggcaatacaaaacttaaaggggttgctgtgggctggagtacgaccctgggtactctttcttcaagcctgagcaagacggatgaaaacggtgtggctgaaattacgctgagtagccgtacagcgggcagcgcccttgtttcagccatgcttggtggtggttcgccggttcaggcaaataaagcagtcactttcaccgcgggagatatcagtgcggataaatcctcactcgttatctctccgtccgtcatcattgcagaaaaagaaagtgccactctcagcgtcactgtccgtgacgccgaagggaatctgctcccgggtctgaaagatatgataaatgccggtttcacgcctgacctgaatatgaccatatctgctttcagcgaggtgtcaccgggcatctacgcggcaagtgtatcgggtaaaaaggcgggtacatcccgggtaagcgctgacgtcagcaatatccgcatcaatcataccgcctcactaacgctcagggctgacaatgatactgccagagtcaaaggcagcatcagcgtgacacctgcttctgccaccgtgggtgatgttgtcacgtatgcagccgtgctgaccgatgttaacgaaaatgctctgggagccgggattcctgtcacctggagcgcgaatgagggcagtaagctcagcgcacagataacccgcacggatgattccggcactgcacgtgtcacactgagccggaagcttacaggcacagccaaagtagaggccattctcccgtcaggcaccacacctgcacctgacgtgatattcagcgccggtgatgtggatgaaaatcgctcagaactgacacttgcaccttcggtgattgtggccggaaaagacacagccacactgacactgatattacgtgacagcaatggcaacctgcttacaggtaaaggtgtcagtggtcacagtgataaaagcgatgtgaccattggcgaaagccgggaaaacagcaatgcacccggtcactacacaatgacggttaccagtgacaaggcgggcagcgccacactgacagttaaagttggtggtgccacgctgaacaagagccggatactgatggtgaaaggtgatactgacagctggaaactgtccgctgtcacaacggacaaaaccagcctgacagccggagattctgaaggggtgacctaccgtgtcactgtcacagatgctaagggaaacccactgaataatgtggtggtttcctggcagcttagtggccaggcggaaagctacgcaccaacgtcgcgcaccaatgaaaaggggattgcggccaccacggtgaaaagccataccgcaggattacttaagatgacagcgtatcttgatgctgataaccatatgcaggcagacaatgtcaccgtggtacccggagaaataaaaaacgcgacttttgatgcagacaaaaccagtatcggatctgacggtaaggatacggtcacattcacaaccagtctgaaagacacctacggtaacccggtcatggggaaaacggtcataatcgaaggcactgatttgctggccggctttaagctcagtgaggttcatgaccagcagaatggacgttatgtggcaacaggtactgccacaaccaaagggcagatcacgctcagtgcacatgtggacggtaaaaaagtggggaactccgttacggtcacggtcggagccatcacaccagatttacgatttgataatgcggggcaggaggtgacatggacaaagaatttcactgcatcgcaggccgtacggggtatgccggtaggacttaagcagatatggtccagttcagatgaaacaatcgcgatggtcagtaactcaggaaaggtgacgctcaataaatccggtgaaagcaggatcaccgtctatacgccgggtaatgagcaatacaatccggcaatggcaacctacacgcttaaaataaacagagctcagccacagttagtctttggggagggagagcaccagactacttatggcagtcaatttgttcttcctgccgtaaaaagcgccgatgatcagattgatttaaacgacctgacaattaattacgtaagttctgaacctgaagtatcagatatcgacgggagcggaacaatcacgatgaaaaaggcgggaagcgtaaaattctatgccagtacgacaggaaatgacagatatgaagcatctgaagcagaatatgttctcgtcattgcaaaagccagacttcctgtctcatttactgaaacacttagaaaagtcaatatgcagcagatgtatacagatacaaatgcatattggcaggctcctgagcaaaacttccctactgatgcggcggtacagatttccagcagtgaaagttctgttttaaaaattgacactgacggtacagtgaaactgtattcaccgggaagtacacgtatcaaagttactgttaaagaagatgagcgttatgaagcttcaacaggtgattatgacctgaacatttacggaagacctgttatgtcactcagcagtattcagggaacctctttgggcaaacttgcggatgtatcaaagcaggactggcagccatattttataaatgatgaactgcagatagactggtcttctaaagttgaccaatattatcttccggagaaagttgttgtgaaaatatcggaaggtgacactttacttactgaactgtcctatggaaaaggtgaaacctcatcaggaaaaacaagaataaaggctcaggcaccgtgggttggtaaatcgcttactgtcagtgttatgggatatggttttgccggtattgagtctgaaaaagcaagtaaagtaattaacacgagcgtagttgatattaataaaattattgcttcggcaactgctgtcctgaaacatgatgtatacataacatcagatcgttcaaaggacagtgaaaatacatgcaggacttcatacctaagaactcaaagggatgtttatctggattttaatgtaaatatagttccgttatacccttcagaaaaaacactttttgggcacgatatcacgttatacattgataattataccaggaaaaataatgggggtaaggattactggaccagagttatggggagtgtcggtaattcaggaagtcttcgtttcagcagctccggcagcggtattaattctaatacccagttagtggaagactgctggggaaatcatgccggaggaatggatgatcagggaagagtttctgcgatcgttgacgttcagtatgcaggaaaaacgttcaggctaaaatcatcatcacctatgacatggagtggtgactctggatcttctaatcagtctggtgtcaatcttgtgattcagtaa

SEQ ID NO: 276832 - DNA, 270 bp, Morganella morganii
atggatagtaatcatattctgctgaatgatatcggtaaattgataagagaattaagaaaagaaaaaaatatgagtggaattgatctgggggttgagattggaattagtcaacagcagatatcccgttatgagaaaggaaagagtgatatgtcaataactatgttttttaatattatatcagtatttaatatgactcctactgaattttttctacgcatgtatgaaacagagagggaatcccccagtaaatacttttcaatgaaatggtaa

SEQ ID NO: 276833 - DNA, 2991 bp, Morganella morganii
atgaagtgcattaaaatacccattgttttctttatttctttttcttccatttcacatgcggaaataacatcacctattgatgttaataattcaaaggaagttattgataatgagtctatcaatattaacaatggttctacagccatttcaattaaaggtgaaaacgcagaattaaaccttgttaatagtaaggttaatgcttcaggagtaaatcaaaataattcatatggcatagatgtacaccaggggaaacttaatattaccgggggggagtataactattcatatgataataatgtaaatgcttttcctttatatgggcatgctcttaatgtaagtgaaggaggtagcctttatgttgatggtgctaaattaaatatttcagggtctgccgatagcagtgaaaataaatttcttattcaaagttgggggggcggtgacgtatctattaaaaatagtgagttatcctctaatacgggaagggttttgtttgcaagtaacacaccagtgacaattacggatagctctgtttatgttactaatgatattgctaatggctatatcaacgcatttgagtctcagcaaaatgccagattaattttatcaggcagtaaagttatatctgatgtaaataactcggccaactctgctgtattctacgcccccggtgatggtttcattgatatttacagtagtcatttacagagtaattatggacaaactgtattaagagctgtagataccggaaatatatcagtgtcagataccattattgactacacaaccagcaataataatacaaactcaagcattgccgtagcattatcagggagatacgactggaaaacgtccatggaactgaaaaatacaactctgaatgctaaatcagaagatggcagatttgcaattgctgtttatttaaaccatacagactgggatgatcccggtgttaacgatactgcgaatacgatatttaccgggaataattttactataaacactgagggtaatattgaggccttccgtattcgtggaggggggggaatagagctaaataacagtcatgtttattcaaacagtgacagtaactcagcatttaatattctgtctcccaatgattcagacattattgaccatgatgcaatagttaaacttaaaaaaacttttgtttcagccggtgagtgggtaatttatcaatctaatactgacgcaaaatttagtgtaaatgataactcatatgttaaaggtgattcaggtttagctattgtttccgtaaaagacgatgctgctacagccaaagatacaaatttgacaatgcagattgcgggagattctcaggcttatggtgatatacgggttcttgattatcagggaaaaaatgcctcattaaatatgtttgttgataatgcttattgggaaggtgatattattaccaaaaccgagaattcccttgctgatattgagcttttaaatgattcagtttggaaaggctcagcaaagtattatcaggataacaaggggggaattgttaatctgaagcttaatggtgaatcggcccgctgggtaatgacatcatcctcaactattagtaatttagagttaaagaacggcgaggtttatttggggagtgctgattccgtagcaggtaatcggttatttattgatggaaattatgcgggagccagtgaaaaagataaagctactatcattttcaatacggttttgggcgcagataattctctttcagataaaatgattgttaatggaaatacttcaggtcacacgatggtgtcagtaaggaacctgggcggacagggggatgcaacactcaatggtatagagctcattagtgtcacagggctttcagatggagtattcgaaaagaaaggccgtattgttgcgggtgcatacgattacgaccttatcaaaaaagacagtaactggtacctgaccagttatgtaccagaacctaaccctgaacctaatccggaacctaatccgactcataaagttcggccggaagctgccagttacaccggaaatctggccgcagctaattccatgcttaatacgcggcttcatgaccgtttgggtgaaactcagtataccgatgcgcttaccggtgaagaaaaagtgaccggcatgtggatgcgtcagctcggcggacataacaactggcgcgataacagcggacagctgaaaacacagagtaaccgctatgttatgcagctcggtggtgatattgcccaatggtcatctgacggttttaatcgctggcgtttaggtgtaatggccggctatggtcatgagaacagtcatactaactcatcggttaccgactataaatccagaggttctgtaaatggatacagtattggtacttatgcaacatggtatgctaatggtaccggcgaaaatggtttatatctggacagttggttacaattcaactggtttaacaatgaagtaaacggtgaatctcaggaaacagagtcatatcgttcccggggtctgacagcatccgctgaaaccggttatactcagaagttaacggagttcaccggcagcaaaggttcccgtaatgaatggtttatccagcctcaggcacaaattactttcatgaatgtcagggctggtgagcatagggaaaagaacggtactcatgttgaaaatgagggtgacgggaatattcagactcgtttcggaatgcgtacttacctcaaagggcacacccgtgaagatgacgcaaaaaacagagagttccagccgtttattgaagcaaactgggtccataacacccgtaatttttccaccaaaatggacggtgtgaatatctctcagaaaggaacaaagaacctgggggaagtaaaaattggcttggaaggacaaatcaatccacacctggatttatggggaaatgtgggtgttcaggttggtgataatggctataacgacagtgccgccatgcttggcatcagatataacttctga

SEQ ID NO: 276834 - DNA, 150 bp, Morganella morganii
atggtgccgataatgggaatcgaacctccgaccttcacattacgaatgaaagcaacacccaattatgcctatataattctggtctctgatggaaaacagttgttcacggtcgattctgccgatcattacaaagtgccggaagcaaggtga

SEQ ID NO: 276835 - DNA, 1173 bp, Morganella morganii
atgcctttaaacgatatgcagattcgccgcgctaagcctgaagctaaagcctatacacttggagatgggcaagggctgtcattgcttatagaacctaatggaagcaagagctggcggttccgttatcgttttgccggtaaacccaaaatgatctcgctgggtgtgtatccgacgatcacacttgcagatgcccgttcccgtcgtgacgatgcccgaaaactggtcgcggaaggaaagaatccgagtgaggttcgaaaagagcagaagattgctttgcaaaccgagtctgaaagcgcgtttgaaaagatagcgacagagtggcatcagatgaagtctgccaaatggtcggcaggttatgcctctgacatcatggaagcatttaagaacgacatttttccttatgtcggaacaaggccagtgggagagattaaaccgctagagctgctgaacgtactgcgtaaaattgagaaacgtggtgcgttggagaaaatgcgtaaagtacggcagcgttgctccgaagtgtttcgctacgcaattgcaacgggtagggcggagtacaatcctgcggctgatctctccagcgctctcgaagtacaccaatcaaatcacttcccgttcctaaaggctgatgagataccagattttcttcgcgccttaaacggatacaccggaagtcggcttgtcctgattgccacgaaattactaatgattacgggtgtgagaaccctcgaattacgtgcggcattatggtcagaatttgatctagataacgctatttgggaaattcccgctgaaaggatgaaaatgcgcagatcacatcttgtgccattgtctgttcaggcgttagatttactcaatgaactcaagatcatgacagggaactatcgttatgtttttccggggcggaacgatccgaacaagcctatgagtgaggcgagtataaatcaggttataaaacgtattggatatggtggacgaattactggacacggttttagacatactttatcaacaatactacatgagcagggatacgagagttcatggatagaaatgcaattggcacatgttgataaaaacagtattcgggggacttacaaccatgcgcaatatcttgaagggcgtagaacaatgatgaattggtacagtaattttctgggagtgaaaaattaa

SEQ ID NO: 276836 - DNA, 1695 bp, Morganella morganii
atgagtattaaaaaaattgaaatcaggaattgcattagtaagcttgctaataatataagggcggaaaagatagattatagtagctatcttgagctttattcaggcggggaaaatattagaaatatcaacaatgtcaataatagtgttatatacggcagaagggggtcgggtaaaacgcatttgctgaaagcattgtcagaagaaataatgaataatttttctagtgataaaatatttccagtttatattgatttgagaaggattatccctcttatatctacgagttcagatagtcaggatgttaatgctgtactaatctttaagtacataatgcaagaagtttcatttaatctgtatcaaaatttacctcagattttagaggctaatgaatttgattctaaaaatgatatgttatttgaatcaaaatttgagcatttaaaaaaactattctctgagttataccttgaatttgatgggcgagagttaaagaaaacgagcgatttgaccgtttctgaagaggaggtaaaaagtattaatggtggtgttgaaatatcgaaaagccccaatttaaaagctagtgttggtagttcaacaaaagaaacaaagcaaacagaattaagaatgcatatatctattcttcatatgacaaatgtcattgaggaaattatttcttctttggatctaagattcatcatggtcatgcttgatgaatggtctgaaatatctaaagatactcaacctgcgctagctgaaataataaagaaaacattttcagctattaatgtggttacaaagatagcagcgatacccaatagaacaaatcttggatttaaaaatgataataagttttatgggttagaggatggcggtgatgtttttggttatcatctggatttaagatatgtgttcgaggtaaacaaaaatcaaactcgtgatttctttaatgatctcttatacaaacatttatcttcaatcgataaaaaagaagttgatgcattaataaaaaaagaaaagaaaactaaagaaagttttataaatatcttatttgccaatgttgcgctgaatgaaatattaattgcttgcgctggtattcctagagattttatgaatctctttttgaatagctatgatagattcatgctatcatccacatctacagctttaagaattagtgttaaaaatttacgtgctgctaatgctgagtggtatgaaaaagataagaaagagcaagttgataaaaatgaaattgaaaggaatcttttaactcagattgttcaggaagttattgagaaaaagaaatccatgcacttcctcattccagagaagtactcaaataataaacacattcagaatcttattgattttagagttatacaccttagaaagagcgggtactcacatcaagaccatgcgggggtttcttataatgtttactcagttgattatgggtgctataactcattaaacataaccaagagtaaattagatacttctgttctcaatgaactaggtgtaaaagagttaagagatatcagacgaatttctttagaggattccttttttcagcagtttatgatggaaattggagaggcttttatatgtcctcacgctgcctgtaaaaaacctgtagatacaaaccatcccgcttatacgaaacaagggctatgtaatcattgttttgacaaagtggtttaa

SEQ ID NO: 276837 - DNA, 576 bp, Morganella morganii
atgatacgagcaccactggagcaggtctttgaaacctgtcagaagaataaatcggactggatgagcagcaagtcagcactggcacgggctgaaatggcgctaaaagaacatgaactgacctgtacccgttatgaacctgacgctgtacaggcgctgcgtgatgatattgacctgaaaaaatgggcagtgaaccagtctgccggtcagtacatccggtcacatgaagccgtgcagcgtgtcagcatgcgtcgccagctccacgcctttatgcaggtaagtggcgacgcgctggtcgcagcgctggcaccggaattaatgcacctcagagagcagcctgaaatcgtcagagaatgggctctcgaccgggcggccgccagcgttcgcgaagcgctatcggtttatctggccagcggaagagatattcattatgcagaggatgagcgggatatcctgacgtccatcgggttccggcctgacagagcgtccagagaagaccgccgggcaaaatatacacctgaacagagtcagattttcatgtgccgacaggccgcgcagactcgcaaaaaatccgcataa

SEQ ID NO: 276838 - DNA, 243 bp, Morganella morganii
atgatgcgctgtccgtactgcaaacaagcggcccatgttcgcaccagtcgttacctgtcggataacgtcaaacagagctatctccagtgcgtgaatgttttctgctccgcgacgtttcgcaccatcgaatctatcgatgaggtgatacggccaccggcggaggaaaagccagaaccggcgcaggcagcgccagtgacacagccccgaattctggattgcgctcgctcatcgctgcgccactga

SEQ ID NO: 276839 - DNA, 297 bp, Morganella morganii
atgaaagacactccccctgcactggtacgtgcatttgctttacgtctgcgtgagcttgagattaagggggaagaacaccctcacactattctgattcaggagctgggcgagaatgtactgacacagagccagtattacgcattcaacatggaaaatgagccggtgatttcacagattggccttcatcgcccggcactcaccggcgtagacatgaagctctttaaaagtcctgccctcagaatggcgcgagctaaagcgctggcacagaagaaacaaccgcagggggtgaagtcatga

SEQ ID NO: 276840 - DNA, 1590 bp, Morganella morganii
atgcaacagcctcgccctatccgtcgcgccctgctcagtgtctctgacaaaaccggcattactgaatttgctcaggctctttccgcccgtggtgttgaattgttatcaaccggcggtactgcacgtctgctggctgacgccggtctgccggtgactgaagtctccgattacaccggtttcccggaaatgatggacgggcgtgtcaaaaccctgcatccgaaagtacacggcgggatcctcggccgccgcggcaccgatgatgagattatggcgaagcatcagatttccgctattgatatggtggttgtgaatctttatccgtttgcggagaccgtggcaaaacccggctgcacattggaagacgcggttgaaaatatcgatatcggcgggccgaccatggtgcgctccgccgcgaagaaccataaagatgtggcgattgtggtaaaaagcagtgactacagcaatatcattgccgagatggatgccggacaaaacagcctgagttttgatacccgttttgacctcgccatcaaagcctttgagcatacagctgcctatgacagcatgatcgccaactatttcggtcagaaagtaaaaccgtacttcggcgataccactcagccttccggccagttcccgcgcaccctgaatctcaactttattaaaaaacaggatatgcgctacggcgaaaacagtcatcagaatgccgccttctatatagaagagaatattcaggaagcctccatcagtactgctgtgcagttacagggcaaagccctctcttataataatattgctgatactgatgcagcccttgaatgtgtgaagcagtttgataaaccagcctgtgtgatcgtcaagcacgccaacccgtgtggtgtggccgttgccgataccttactgaccgcctatgacaatgccttcaaaactgacccgacttccgcattcggcggtattatcgcctttaaccgcgaactggatgccaaaacggcggcagaaattattgaacgccagtttgtggaagtgattattgccccgtccgtcgcggaagatgcactgccggttctcgcggcaaaacagaatgtccgcgtgctgacctgcggtcagtggcagcatccggttgccgcccttgatttcaaacgggtgaacggcggtctgctggtgcaggatcgcgatctcgggatggtctgtgatactgacctgaaagtggtcagcaaacgccagccgacagagcaggaactgaaagatgccctgttctgctggaaagtggcgaagtttgttaagtccaatgccattgtttatgcaaagaataatatgaccatcggtgtgggtgccggtcagatgagccgtgtttactccgcgaaaattgccggcatcaaagccggtgatgaagggctggaagtggcgggatgcgccatggcatccgatgcgttcttcccgttccgtgatggtattgatgcggcagctgccgttggtattacctgcgtgatccagccgggtggctctatccgtgatgatgaagtcattgcggcggcagatgaacacaatatcgcgatgattttcaccggcatgcgccatttccgtcattaa

SEQ ID NO: 276841 - DNA, 1284 bp, Morganella morganii
atgaatatcctgattatcggtaatggcggacgcgaacacgcgctggcctggaaagccgcacaatccccgctggcagccaatgtttatgtcgcgcccggtaatgccggtaccgcacaggaaccaaacctgaccaatgtggatatcagtgcgacagatattgacggcctggtggcctttgcccgcgccaataatatcggcctgaccattgtcggcccggaagcaccgctggtgatgggggtggttgatgcattcaatgccgccggtctgactatcttcggcccgtcaaaaggtgccgcgcagctggaaggctccaaagcattcaccaaagattttttggcgcgtcaccatatcccgacggcagcctatcagaactttactgaggttgaaccggcactggcttatctggacaaaaccggagcaccagtggtgatcaaagctgacggcctggcggccggtaaaggcgtgatcgtcgccatgaccctgaaagaagcacaggacgcggtacatgacatgctggccggtaatgctttcggcgatgccgggcaccgcattgtgattgaagagttcctgaccggcgaagaagccagttttatcgtcatggtggacggtaaaaatgtggtgccgatggcgaccagccaggatcacaaacgggtcggtgacaatgacaccgggccaaacaccggcggtatgggcgcttactccccggcaccagtggtgaccgatgccgttcatcagcgggtgatggaaaaagtgatttacccgaccgttgaaggtatggcggcggaaggtcacacctatcagggttttttatacgccgggctgatgattgatgaacacggtgagccgaaagtgattgaattcaactgccgctttggtgacccggaaacccagccgattatgatgcggttacaatcagacctggttgagctctgccttgccggtacgcagggaaaactggccggaaaaacctcacagtgggatccgcgtccggcgcttggtgtggtgatggcagccggtggttatccgggtaattaccgtaaaggtgatgtaatcagcggactggatgttcaggaagcagactgcaaagttttccaggccggaacggcgatgaaagaaggtgcggttgtgactgacggcggccgggtgttgtgtgtgacggcactgggtgaggatattgctcaggcgcagaaacaggcttatgccgcactgaaacatattcactgggatgatgcattttgccgcagtgatatcggctaccgtgctgttgcccgtctgaataagtaa

SEQ ID NO: 276842 - DNA, 660 bp, Morganella morganii
ttgttgatcagacaggggctgcttgcactgggctttggctcattgctcagcgcctgctctgttcagcctgaccttcctcccttcagtgcgtccggttatatcgcggacgacggcgctgtcagaatgtggcgtctcaacgccgacaaccaaccccgtgtcctgatgagtgttttcagtccctaccgcagcggacaacagaccgtcgtcaccgtttatgaataccgcagaggacagctctggcagatccgtacagaatatctgggcgataacggtttttctgaacagatacggctggatcacgagggcaataccatctttatgcagcgtgataaagacgggcataaatccccgctgaccacagatgaaatcacccggatgacctttgtggcggacagacagctgacacttaacagtgcactggtgatcggtgatatccggctgaaacaggggcagtggcgcgacagctatgtcacggattgtcagggtaataaatcctacattgaatttgatgcggaaacagaacagttcctggcgaagcgtcagcgcagcagcacatcacctatctacattgcatggctggattcaccggaaggacgggaaattctgctggcggcaaatgataacttctgtaaatgggaacctacggaagattcactgtaa

SEQ ID NO: 276843 - DNA, 273 bp, Morganella morganii
atgaataagactcaattgattgatgctatcgcagaaaaagcagagctgtctaaagcacaagctaaagcagcgctggaatcaactctggcggccatcactgactctctgaaagaaggcgatgctgtacaattagttggcttcggtacttttaaagttaaccatcgtgcagagcgtactggccgtaacccgcagaccggtaaagaaatcaaaattgcagcagcaaacgtgcctgctttcactgccggtaaagcactgaaagactcagtaaaataa

SEQ ID NO: 276844 - DNA, 591 bp, Morganella morganii
atgttaaagaacccgatccacttacggctggaaaaactggaaagctggcagcatctcaccttcacggcttgtctgtgcgagagaatgtacccgaattatgccgttttttgtcagcagaccgggtttactgatccgtcgctttaccggcgtattctggatctcatctgggaagtcctgactgtcaaagacgcaaaagtgaactttgataaccagctggaaaagctggaagacatcatccctgatggggacgactatgatatctacggtgtgtatccggcgattgatgcctgcgcggcactcagtgagcttatccatacccgcctgagcggggaaacactggagcatgctattgcggtcagtgagatttcagtcggcactgtcgcggtactggaaatgacacaagccggacgcgaaatgtctgacgacgaattaaatgaattgcccgctgttgaagaagagtgggacattcagtgggaaatttaccgcttattggccgcctgcgaagagcgcgatattgagttgataaaaggcttgaaatccgatctccgggatgcggggatcagcaatattggcgttagtttaggcgattaa

SEQ ID NO: 276845 - DNA, 744 bp, Morganella morganii
atgacagccatcgacacccgcgccctgaaagtccggcagacagaactggcacagctggtcagtctgcaggatgtgccgcttaatccccgctatatcgcaggggtggatatcggctttgaggacggaggggacgtcacccgggctgctgtggtgatcctcacctggcctgaactggaggtggcggagtatcagaccacccgcattcccacccaactgccctatattccggggctgctttccttccgtgaaatccccgccgcacttgccgcatgggagaaactgaccttaaaaccggacctggtactggtggacggccagggtcgcgctcatccgcgccgtctcggcgttgccgggcatctcggggtgctgctggatttacccgccattggtgtggccaaaagccggttatgcggcacgtttgaaccgctggcggaagaggccggtgcacagtcgctgctgacagacaaaggtgagccgctcggctgggtctggcgcagcaaaaaccgctgcaatccgctgttcatttcacccggtcatcatatgagtattgacaccgcactgacctgggtaaaagccctgacgcgcggctatcgcctgcctgaaccgacccgctgggctgatggtattgcctcaaatcgaacattttttgtccggttgaaacagaaatttcccgattttccacgtaaagatgtggatatcacggattttcaggtaaactgcggctcacatcagagtaacgagtaa

SEQ ID NO: 276846 - DNA, 1068 bp, Morganella morganii
atgagtgaactgaaaaacgaccgctatctgcgggcattactgcgtcagccggtggatgtcacccccgtgtggatgatgcgccaggccgggcgttatctgcctgaatataaagccacccgcgaacaggcgggggattttatggcgctgtgcaaaaacaccgaactggcctgcgaagtgactctgcagccgctgcgtcgttttccgctggatgcggccattctcttttccgatattctcaccattcctgatgcgatgggcctcgggctctattttgaaaccggcgaagggccgcgctttgtgcatccgatccagaatgcccgcgatgttgaaaaactgccggtgccggatccggagcaggaactcggttatgtcatgaatgccgtgcgcgccatccgcaaagccctgaacggcgatgtgccgctgattggtttctccggcagcccgtggacactggcaacctatatggtggaaggcggcagcagcaaagcctttaccaaaatcaaaaagatgatgtacgccgaaccgcagaccctgcacctgctgttggataaactggcggacagcgtgatcctctatcttaacgcgcagattaaagccggtgcacaatccgtgatgattttcgacacctggggcggcgtgctgaccgggcgtgattaccgtgagttttcactcaattacatgcacaagattgtcgatggcctgatccgcgaaaatgacggtcgccgtgtgccggtcacgctgttcaccaaaggcggcggacagtggctggaagcgatggcggaaaccggctgtgatgcgctggggctcgactggaccacagatatcgcggatgcccgccgccgggtcggtaataaagtggcgttacagggcaatatggatccgtccatgctctatgcatcacctgcccgtatcgaagcagaagtggcatctatcctcgccggttttggtcagggcgaagggcatgtgttcaacctcggacacggcatccaccaggatgttccgcctgaacatgccggtgcattcgttgaatctgttcaccgcctgtcagccaaatatcatcagggctga

SEQ ID NO: 276847 - DNA, 783 bp, Morganella morganii
atgcagcagattttaacgggcaatgaaaccggctactgggttatcagcgcggataaccgcgtctggctgccggaaggacaactgccggagggcagtgcggcacaatggatgctgaccgggaaaccggcggtgcgtatcggggagtggcagggactgccggtctggctgatccgcgaaaaaatgcgttccgatatgtgttcgccgcgcattattgccgcagagaatgatgacctcttcaaaatggccggacgcggcgtgcagctggcggagttctaccgctcgcaccgttattgcggctactgcggtgcggcgatgaaatacagtgaaagtgagtgggcgtgtctgtgtgacagctgccgcgagcgttactatccgcagatagcgccgtgtattattgtcggcatccgccgtcatgactctattctgctggcacagcaccgccgccacaaaagtgcgccgctgtttaccgtgctcgccgggtttgtcgaagtcggcgaaaccctggaagaagccgttgcccgtgaggtgatggaagagagccggattgagattcagaatatccgttatgtctcctcgcagccgtggccgttcccgcactcgctgatgatgggattcctggcagattatgcggatggtgaaattcatcacgatccgtcagagctgctcagtgcagactggtaccgctatgataatctgccggttattccgccgccggataccatcgcccgccgtctgatagaagatacagtcgcattgtgccgtcaggatgacgaagacgcgtaa

SEQ ID NO: 276848 - DNA, 1071 bp, Morganella morganii
atgacacgttttcctgctgccaaaatattgctgaccgccgttgctgtttccgcctctttctctgcgttctctgccgggcaaaacaccattcctgaagaactgattgccgccgccaaaaaagaaggggtggtttacagtgtcgggatgccggatacctgggccaactggaaaggcacctgggctgatcttgaaaaactctacggcatccgccatcaggataccgatatgagctctgctcaggaaattgccaaattcgccgctgaaaaaagtaatgccaccgcagatatcggggatgtgggcgccgccttcggccctgtcgccgttcagaaagatgtggtgcagccttataaaccaaccacctgggatcagatcccggactgggcaaaagataaagacggtaactgggcgctggcctataccggcaccattgcattcatcatcaataatgaccttgtcaaagaacagccgaaaagctgggctgagctgcgcaacggtaactaccgtgtgactatcggtgatgtcggtatcgcggcacaggctaacagcggcgtgctgtctgcggcctttgcccttggcggtaatgaaaccaacattcagccggcgattgagttgtttgccgatctcgccaaacagaaacgtttatccctgaatgacccgagcgtggccaacctggagaaaggggaagtggaagtggcggtaatgtgggatttcaacgcccttaactaccgcgatcagattgacgccaaacgctttaccgtggtgatcccgtctgacggctctgtcacctccggttacaccaccatcatcaacaaatatgcgaaaaacccgaacaccgccaagctggcccgtgagtttatcttcagtgataaaggacagctcaacctggccgaaggttatgcccgccctatccgcgcagcacacctgaccctgccggacgatatcaaagccaaactgctgcctgaatcccagtacagcaaagccaaaccgattaccgattttgacggctgggaaaaaacctcccgccagttgccgaaactgtggcagcagaacgttatcatcaacatgaattaa

SEQ ID NO: 276849 - DNA, 825 bp, Morganella morganii
atgaataacccagttatcctggttgttctggatggcttaaactaccgcacagcccatgactgcatgggctttatgcaggggttagctgaatccggggacgccacactgtaccgcctgagctgtgaactgccctcgctctcccgcccgctttatgaatgtattctgaccggcgtgcgcccggttgacagcggcgtggtgcacaatcaggtggtgcgcctgtcacacaacgacagtattttctccctcgcacaaaaagccggaaaaaccaccgctgccgccgcttatcactgggtcagtgagctgtataaccgcgccccgtttgatgcagtccgtgaccgtttcacccacgatgattcgcttgcgatacaacacggctgtttttatcaggcggatcactatccggatgatcatttattcctcgatgcggaatatttacgccgtcaataccaccccgacttcctgcttattcacccgatgaatattgacgatgccggtcataaatccggcggggattcacagcaataccgcaacagtacccgccgtgcagacggcctgctctccgcgtatctgcccggctggctggaagccggttatcaggtgctggtgaccagtgatcacggcatgaataatgatcgctcacacggcgggattttggatgaagagcgtgcggtgccgctgtttgttattggtgatgccttctctcatgaggcagacctcccggtacagcagacacaactgtgcggcaccatctgccggttactcggcctgagcggacacaacaaagccgctgtaccgcgcctgctgcgggagacgcaacatggctga

SEQ ID NO: 276850 - DNA, 894 bp, Morganella morganii
atggctgatattctgccggagctgaccgcgatgaaaagtaagcaacataccagccctctgtcacgccgtctgccgctgaaaccgatgctgttactgctccctgccgcgctgctgttcgcgcttttccagcttgcgccgatgttatgggtgattatcaacagcttcgtgtatgaagatgcctggtcattcggtaactttaccgaaatcttcagcagccctttttatattcagtcctttgaaaacaccctgtggatttccggggtatcgtcagtcggcgggctgatcctcgccgcactgtttgccgcctccttacagcacgccccgccgcgtccgcgccgctggctgatcgctttcaccaatatgaccggcaatttcagcggtgtgccgctggcgtttgctttcatcatcattctcggcgtcaacggcgccatcaccctgcagttgaaagcctggggggtgattgaggatttcaatctctacagcgccgccgggctgatgctgatttacctctattttcagatcccgctggggatcctgctgctctatccggcgtttgatgccctgaaaccggagtgggaggatgctgccaaaactatgggagccggccgcccggcctactggcgctatgtcgcactgccggtgctctctccggcgctgctcggtacctttatcattctgtttgccaatgccgccggggcttatgcctccacctatgcgctgaccaccgggaactacaatatggtgaccatccgtatcgccagcctggtgtccggcgacctgttcctggagccgaatatggcagcggcactttctgtcctgctgatggttatcctcggattcatcactgttgtctatcactggctgctgaaacggagttaccatgccaagtgctga

SEQ ID NO: 276851 - DNA, 801 bp, Morganella morganii
atgccaagtgctgatctcacactcaatccgccgtacatggcgcgttatcacaaaatcatgctcagcctgattgtgatcctgctgctgttaccgattatcgcgacgctgctgtattccttctccacccgctggggtgccacggtgctgccggacggcctgacattacagtggtatctgaagctgtggcaggatccgcgttttcttgccgcgttcggccgttcactgtttatctgctttgtcacccttgccatcagcaccctggtgatcctgccgctggtgtttgccgtgttttattacctcccgcggctgaaagggctgatggagatcctgattattctgccgttcgccgtgccgccggtggtctcctccgtcggactgctgcagctgtttgctgacgggccgctgccgattgccggtacgccgtggatcctgatcggtacctatttcaccatcaccctgccgtttatgtaccgggcgctggccaacagcctgaacggtgtgccgctgaaagatctgctggatgccgctcatctgctcggtgcgggtacttttaaggcgtttctgctggtggtggtaccaaatatccgcaaagggctgctggtgtcgctgctgattgcgttctccttcctgttcggtgagtttgtgtttgccaatatcctggtcggcacccgttacgaaaccctgcaaatctatctctataacatgcgccagaccagcgggcacttcacctccgcactggtggctagctactttattttcaccctgatcctgaccctgatcgcgacacgcctgaaccgctga

SEQ ID NO: 276852 - DNA, 1029 bp, Morganella morganii
atgagctatgtaattgctgaaaacctgacaaaatcctttgctgccaccccggtcttttccggtctgaatttttctgtcagcaaaggggaatttattaccctgctcggcccgagcggctgcggtaaatctaccctgctgcgttgtctcgccgggctggagcctgtcaatgacggaagaatttatgtgaataaacaggatattactttatctccgccacaacagcgggaaatcggtatggtgtttcagagctatgcgctgttcccgaatatgaccactgaacgcaacattgccttcggcctgaagatgcagaaagtcccggcggatgaacagcgcaaagctgttgcagaggtgattgagctggtggggctgaaaggaaaagaacagcatctgccgcatcagctttccggcggccagcggcagcgtgtggcactggcacgggcactggtgatgaaaccgcgcattctgctgctggatgaaccgctctccgcgctggatgcgcaaatccgcaaacatctgcgccagcaaatccgtcagatccagcgcgagctgaatctgaccaccatttttgtcacccacgaccaggaagaagcgatgctgatgtctgaccgcatcttcctgatgaacaaaggtgaaatcgtgcagagcgataccgccgaaaacctctacactcagcccgccaatgagtttgtcgcacgttttatggggcattacaatctggtcagcgcgcacaacgccaacagcctgctcggcctgaatctcagcggtattgtggcgatccgcccggagtccatttatgtgcgcgaggccggaagacagtacggggaacacatttctcacccggtttcaggtacaatccgtgacagtcagttactgggcaatattatccgttatcaggtggataccgggctgggcgcactgaccgtggatctgctgaaccgctcctcagagcggctgtttgaacagggcactcagttggagctgatgttcaataaaaatgaaatccgcgcccttgccccgtcagttaattaa

SEQ ID NO: 276853 - DNA, 675 bp, Morganella morganii
atgtcaacattagcggttttcgacctcgatcacaccttaatcgctgcagacagcagcctgttatggacagactacctgtgggaaaaaggcattatcactgatccggcctttcttgccgcagataagcagatgatggcggattacagcgccggtaagctggatatggccgcgtatatggccttcagcctgaaggcgctgggtaatgccaccgttgcacagattgatgaatgggtggctgattttaccgaaagcaaagtgcgcccgctggtctacccggatgcggtcaaaaccctcgcgttttataaagaacacggcgtgccggtgatcatcatttctgccaccgccgattttattgtcaaaccggtggcgaagatgctgggtgtgaatctggcgtttggtatcgaactggaagtccgggatgatcactacaccggcgcattgcaggggatcaccaccttccgggaagggaaagtggaaaaactggctaactttctggatattcgtcagtttttaccggaacgtacgattttttataccgattccgccaacgatttacccctgtgccgctatgtcacggatgtgctgacggtcaacgccgacccggtattgaaggcagaagcagaaaaacagggatggatgcagctgacgtggtcattggacacaataaacagctga

SEQ ID NO: 276854 - DNA, 1578 bp, Morganella morganii
atgaatcttaaaaatacgacgattcgtgtcaggttatctgtcacatttggtgttctgatcgccattctggcgctggtttccggaatggcggtgattaacctgtataaagacaaagagatgttcacgaattacgttaacgggacatatgcacttcaggttcaggcgtatgaagtccgccatgcgacggaagagcgggctatcatgctgcgggatatgatcaatgcgactgataagaaagataaaacagaagaactgaaccgttttaaagaagaagacgggaaagtcagtaaaagaacgcagacactgctggatatggtcaatgagttcggcatggatccgcaggggcgggcgttgcttgataagatgatagcggatgaaaaacactatgccgccgtgacccgggaagtgcttgaactcgatcagcagggacggcatgaggaggcgattgcgaaaatgatggatgccgaatatgcggcatcggatgcctatatcctgtcattccgagccagccgggatcacggcacggaaaccggcaatcagcttattcaggaatttaataccaattatgagcgtcagagcaacattattctggtgttcgcgctgctggcgttaacgctggcgattgtctccggggtgatgattatccgcaatctgacacgctctctgggcgccgaacccgcccaactgaaagaagtggctgaacgggtggcctccggtgatctgtcgccgtccgatgaaattcatccggttccggacggtagtgtgctgagtaccctgaaagcaatgcagaggaatctggccggtatcgtcggtacggtacgtaataacagtgacagtattgtgaccggcacaatgcagataacgagcggtaatgctgatctgagccagcgtactgaatcccaggccagcagtctgcagcagacagctgcttcaatggaacagttatctgccacggtgaaaagcagtgcggagattgcggcaaaagcaaacatgatggcagcagaagcgtccgaaaccgcccgtcacggtggtgagaaagtggatttggttattcatgccatgcaggatatttcaaactcttcacggacaatcactgacattatcggtgtgattgattccatcgcattccagactaatatccttgcactgaacgcggcggtggaagccgctcgtgccggtgaacatggtcgcggttttgctgtggtatccggcgaagtccggacactggcacagcggagtgcacaggctgccggtgaaataaaaaatctgattaacaccagtgttgagcaggtggatgcaggcagtaaactggtggcagaagccggtgagtcgatgcaggtgattgtcactcagacacagggtgtcagtcagatgattgacgagctgacactggcggcaaatgagcagtctcagggaatttcgcaggtcggaattgctgtacagcagattgatgaagtcacacagcagaatgccgcgctggtggttgaaaatgccgcggcagcggaaagcctgcatcagcaggcgggtcagctcatgcaggttatgactcaattcagactgggaagcagcgccgcctga

SEQ ID NO: 276855 - DNA, 1950 bp, Morganella morganii
atgtcccgtgaacaacgtattgataccactgatctctccccaggtgcggaaaccgccgctccttccaaagcccgtacccgccgtgagcagcgcgacgcggcagaggaatatatcagcaccctgaaaggggtgaatttcccgaactcctcccgtatttatctcaccggctcgcgcccggatatccgcgtaccgatgcgggaaattgccctgtccccgactctgatcggcggtgataaagccaatccgcagtatgaagagaatgaaccggtaccggtttatgataccgccgggccgtacggcgacccgcaggtgaaactggatgtccgtaccggccttgcccgcctgcgtgaacaatgggttgcagagcggggtgataccgaagcggtgacacacctgagctctgatttcacccgtgaccggctggccgataacggtcttgaccatctgcgctatccaaaccgcccggcaccgctgaaagccaaaaccggaaaatgcgtgacacaattgcattatgcccggaaagggattgtgaccccggagatggagtttatcgccatccgcgaaaatatgggacgtgaacgcatccggggcgaagttctgctgcaacagcatccgggacagcatttcggtgccaatctgccggataacatcactccggagtttgtccgcgatgaagtcgctgccggacgcgccattatcccgtccaatattaaccacccggaatccgaaccgatgattatcggccgcaatttcctggtgaaagtgaatgccaatatcggcaactcctctgttacctcctccattgaggaagaagtggagaaactggtctggtccacccgctggggcgcggatacggtgatggatctctccaccggccgctatattcacgaaacccgtgagtggatcctgcgtaacagcccggtgcctatcggtaccgtaccggtgtatcaggcactcgagaaagtaaacggtgtggccgaggatctgacctgggagatgttccgcgataccctgctggagcaggcggaacagggggtggattacttcactatccacgccggtgtcctgctgcgctatgtaccgatgaccgcaaaacgcctgaccggcattgtgtcacgcggcggctcaattatggcgaaatggtgtctgtcccatcatcaggaaaacttcctctatcagcacttccgtgacatctgtgaaatctgcgcggcgtatgacgtggcgctgtcgctcggtgatggtctgcgtccgggctctattcaggatgccaacgacgaagcccagttcgctgaactgcatactctcggcgagctgaccaaaatcgcgtgggaatatgatgtacaggtgatgattgaaggtccgggccatgtgccgatgcagatgatccgcaaaaacatgaccgaagaactggaacactgccatgaagcgccgttctacaccctgggaccgctgaccaccgatatcgccccgggctatgaccatttcacatccggtatcggcgcggcactgatcggctggttcggctgtgccatgctctgttatgtgacaccgaaagagcacctcggattaccaaataaagaagatgttaaacaagggcttatcacctataaaatcgccgcgcatgccgccgatctcgccaaaggacatccgggagcacaaatccgcgataacgcgatgtcaaaagcgcgtttcgagttccgctgggaagatcagttcaatctggcgctggatccggaaaccgcccggacttaccacgatgaaaccctgccgcaggcatccggaaaagtcgcgcatttctgttcaatgtgcgggccgaaattctgctcaatgaaaatctcacaggaagtccgcgactacgccgccgggatggaagagatgtctgacgctttccgcgccaaaggcagcgagctgtatcacagcgcagaggagcgtatcgatgaatctgcctga

SEQ ID NO: 276856 - DNA, 666 bp, Morganella morganii
atgaatctgcctgacgcaccgtttgcccggacggaacataagttagggctgtatccggtggtcgattcgctaatatggattgagcggctgctggcatccggcgtgcggacaattcagttgcgcatcaaggacaaaaccgatccacaggtggatgagcagatctgtaccgctgttgcgctggggaaaaaatatcaggcgcggctgtttatcaatgactactggcgccttgccataaagcacggtgcgtatggtgtgcatctcggccaggaagatctggatattgctgacttgcgggcgattcagcaggccggtctgcgcctcgggatttccacccacgatgataccgaattgcagcgcgccaaagcgctgcatccgtcctatattgcgctggggcatattttcccgacacaaaccaaaatcatgccctcttccccgcagggactggaaaacttagcccgccaggttgcggtcacgccggatttcccgctggtcgccatcggcggtatttcccttgaacgcgctcctgccgtgatcgccaccggcgtcggcagtattgcggtggtcagcgccatcaccaaagccgctgactggcaggctgtcacccggcagttgatgacactgaccggggaagccgctgaatatcaggaggttaaccatgctgaatga

SEQ ID NO: 276857 - DNA, 759 bp, Morganella morganii
atgctgaatgatcatgattttatgcgctacagccgccagctgctgctggaggatatcggccctgaaggtcagctgaaactcaaacagtctcatgcggtgatcaccggcctcggcggactgggttcaccggcggcgctgtatctggccgccgccggtgtcggtgagctgaccctgattgatgatgataaggtacatctctccaacctccagcgccagattttatataccgaagccgatgtgccggacaataaagcccgcactgcggcagcacgtctgcgggcgctgaaccctgccctgacactcaatgtgatcaccgaacgtcagacccgggaaacgctgcaacatattgtacaagcagcagatattgtcctcgactgtaccgacaacatggccacccgccatgctatcaatgctgcctgcgtgacacagcaaaaaaccctggtcagcggcagtgcggttggtttcagcggacagcttctggtactgcagcccccgtttgagcacggctgttactgctgcctctatccggacgatgtcattccggaacgcaactgccgcactgctggtgtgctcggcccggttgtcggggtgatcggcacactccaggcgctggaagccattaaactgctggccggattgtcttccccgctgaacggaaaattacgccttttcgacggcagacagcaaagctggagcactttacagctccggcgggcagcagactgcccggtgtgtcaggaggcagccgcatgcgcataa

SEQ ID NO: 276858 - DNA, 201 bp, Morganella morganii
atgcgcataacggtgaatgacgaggtgatggatattgattcccccgtcaccgtcagtgaactgctgacatttctcggccgcccggtggcaggcattgctgtcgcggtaaatcagaccatcgttgtccgtggctgctggtcagaacacgttgtccgcgacggcgatcagattttactttttcaggctatcgcaggaggttaa

SEQ ID NO: 276859 - DNA, 768 bp, Morganella morganii
atgctgacgattgcagataccacatttacatcccatttatttaccggcaccgggaaatacaccagcagccgggtgatgcaggaagcgattgccgcctccggcagccagttagtcaccatggcgatgaagcgtatcgatctttctcaggggcacgatgatatccttgctccgctccgtgaactcggtattaaactgctgccgaatacttccggtgcaaacaatgcccgggaagcggtgtttgccgcacagctggcgcgggaagcgctcggcaccaactggatcaagctggagatccaccccgatgcccgttatctgctgccggacccggttgaaaccctggctgcggcagaaatactggtgaaagaagggtttgttgttctgccttactgcagtgcagatcctgtattatgccgccggttgcaggaggccggatgcgccgccgttatgccgctgggtgcgcctatcggctccaatcagggattacagacccgcgatatgctgcgcattattattgagcaggcaacggttccggtagtgattgatgccgggattggcgcaccaagccacgccctcgaggcgatagaactgggcgcggatgctgtgctggtcaataccgcgatggccgttgcccgctcaccggtcaccatggcaaaagcattccgtcaggccattgaggccgggctgctggcgcgggaggccgagctggcaccgaagcagcaacaggcatcggcatccagcccgctgacctcattcctgggagcattgtga

SEQ ID NO: 276860 - DNA, 1128 bp, Morganella morganii
atgagtgaaaaaaccttcagtgaccgctggcagcagctggactgggatgatctcaccttacagctcaacagcaaaaccacgcgggatgtcgaacgggcgctgagtgcagacacgctgaccaccacggattttatggcactgatctccccggccgcccggccgtatctcgaagtgatggcgcagaaagcacagactctgacccggcagcgtttcggccatgtcgtcgggatgtatgtcccgctctatctctctaacctgtgtgccaacgactgcacttactgcggcttctccatgagcaaccacattaagcgtaaaaccctgacaccggaagaaatccataccgaatgtaaggcaataaaagccctcggctttgacagtctgctgctggtcaccggcgaacatcagcgcaaagtggggatggactacttccgcgaaaccttcccgctgatccgcgattatttcagcaccatgatgatggaagtgcagccgatggcgacagaggaatacgccgaactgcgcacgctggggctggatggggtgatggtgtatcaggaaacctaccatgagagcacctatcagcggcaccatctgaaagggaaaaaacaggattttcactggcggctgcaaaccccggatcgccttggtcaggccgggatcagcaagatcgggctcggcgcgctgatcggcctgtccggtcagtggcggacggactgttatatggtcgcggagcatctgcactatttgcgccagcgctactggaaaacccgttattccatctctttcccgcgtctgcgtccgtgtgcaggcggtattgagccggaatctctgatgaatgaagcggagctggtgcagcttatctgtgcattccgcctgttcgcaccggatattgagctgtcactctccacccgcgaatcaccgtatttccgtgatcatatggtgccggtggcgataaaccaggtcagcgccggttcccgcactcagcccggcggctatgccgaagaggatgatccggaactggagcagttcagcccgcatgacaaccgctcgccgcagcaggtcgcggatgccctgctcgccgccggtcttcagccggtctggaaggactgggacaaatatctgggaagataa

SEQ ID NO: 276861 - DNA, 1437 bp, Morganella morganii
atggacacgattcttaatattattaatcagttttcagattttatctggacttatccgatgccggttttattagtcagtcttggtatctggctgaccattaaattccggtttaaataccagctgaattttcgttttaatattaaaaatacctacggcggattatttaagaaaaaaaatgccggtgaacagattcagggggcgggctcggtatccagttttgccgctgcctgtaccgcgctggcgaataccgtgggtatcggcagtatcggcggggtggcaaccgctattacgatgggcgggccgggcgcgatattctggctctggttttctgcttttttcgggattgcgaccaaagcctgtgaaattattctcggccagcgttaccgcgtcaaatatgaaaaatcgatggatgagtatgtctgtgaccgctcatttgtgatggaacatgcactgggctggaaaaaaggtgcggttgctttgtcggtgtgctgttttatgctagggccgtggacctgtctggtgcagagtgaatccgcgacgtcctctatcgaagaagcgtttaatgtcgacagttacctgacattgctggtgatggttatttttattgccagtgtcattatcggcggattaaaaggtatttcctccaaaatggaaagtgtagtgccgaaactggcgatcacgtatctgaccgttgccgttattctgctggtgatgaattatgatcagattctgcctgcatttgcgctgatctttaaatcggccttttcaccggctgccggtgtcggcggatttgccggggcaaccgtgatggaagccatccgtttcgggatcgccagggggatttattccaatgatgccggaaccggctacggtattgtggcacatgcggcggcaacaaccgatcacccgatccgtcagtccagctggggtttcggcgaggttttcctgaccattattatctgtaccgtcacggcgctggctattctgaccaccaatgtctgggtggattacgccggtattacctcatcacgcctgaccacgctggcatttaaagtgacatacggtgatgcgggcagctggtttatggcgatatttattaccctgctggcctgtaccacgaccatcggtatgtattttacctgtgagaaagcggtgaactttttcttcggggacaccagagccaataaaatcgcgaagaatctgtaccgggtttattacctggcgccgattgtgttattcactaaccttcaggccgatattttatgggcgctgaccgatattctgagtgcggtttatgtgctgatcactatgacattaatactgagccggcggaaagagattttccggttatttaatgatttctgggatcgctatattccggcgaaaaatgccggacaggatgtgccgccggtgacttactgtaagcggatagaataa

SEQ ID NO: 276862 - DNA, 1173 bp, Morganella morganii
atgaaagaacgcacacagctattgtattcaggggaaatgaatttaccgggtcatattcatccggatgcgcccgctatttttccggccaccgcctatgccatgcaggatacgcagcactattttgcggtcagcagcggcaatggtgagtatcagtataaccgtaccgcaaacccgaaccgggacagcttatctgccgcgatttcactgatggaagacggagaagtctctgccgttatggcctccgggatggcagcaatctcagcaacactgctgagcctgctcagacagggcgaccatcttgtcgtgaatgaggctatttacggcgaaaccatcgaactgattgatttaattctggttccgctgggggtaacagtaacctatgcggattttctgtcaccggagtcggtacagtccgccatccggccggaaacggtgatactgtataccgaaattatcagtaacccgctgattaaagtggtcgatatcgatgccattgccggtatcagccgggcgaatgattgcctgctggtggtggataataccttttcaaccccgtttgtcataaagcccttacagcacggcgcggatatcgtgatccacagcctgaccaaatttttcgggggccacagtgatttaaccgccggctcggtaacctgctcacaggcactgatgcagaaaattgagctgaaagcccgcctgctgggaggatgcagtgatccttatacggcctggctctgtctgcgcagcatccggacaatggaaatgcgggtatcgcgccagatggaaaatgcacagcgtattgcggaagcactcagcggtgacccgcgtgtggtacaggtgaattatccgggcctggcgtcacatcctcagcatgatttagcgaaatctctgtttctgcagggctgtggcccgatgctcagttttcgcgtcgctgatgaccagacaaaagtcgatgcttttatccgccgtttaaatcttattacttatctgggcacgctgggcggattccgcacctctctggcgcatccggcaaccgcattccgcactgaatttacaccgcagcagctgattgattttggtatgcacgaagggcttatccgtatttctgccggatgcgaagctgccgaagatttaattgctgatattactcaggcacttgatgtgtttaattaa

SEQ ID NO: 276863 - DNA, 804 bp, Morganella morganii
atgaagaaatattttactatcggggaaactgccgcgctattaggcgtttcaacgcagacactgcgtttttatgataaaaaatccattctcaaaccaggttatacggataatgaaaacggataccgttattatacatttgaacaatttcattatatcgacagaattaaatatcttcagaaaatgaatatgagcctgagtgatattaaaactattatggaaagtggcgataaaaataaattgaccgaatatttaatccaggaaaaatcacgtaaattacagcagatggcagaattaaaaaagaccattgaaacgctggactggtatctggattactttaccttcactgataataaaccgcgcaacggggctttttataccaccgaattaccggaacgctggtgtctgtttgttccctgttatccggcagatcgcccgatttcaaaaatggaactgcggctggctgaaatgaaagccagaccggaaaatcagtccctcgattatctgcggcaatacgcctatgtgctggattataaaaacattattgagcaaaccttctacccgtcgaaatacctgatttacctgaaagagaaaccggattttgattctcctaacctggtatgtttaccggccggattttatctttgctgtatctgtcattatctcagtgaaaatatcgatgctgaaatggtgaaacgttatttccacggaaaagaaaaaccacggatggttattgctaatgagtttgaagataacctggtcagttatgaatctgccccttatgaactgcaatttctgatttcataa

SEQ ID NO: 276864 - DNA, 1314 bp, Morganella morganii
atgcgcaacgtattgtttatttttatgattttattttctgtcgccggtgtcagccgggcggcagaagtgccttctgattctcaggaatggttactgaaagatgaaccgccggtactgatccaggtaaaagagccgcaggtgattttcgcaccgatcgccggtgtgatgcagggggttgcggaactgaacccgtcacacggtttttatatttatccgatgaagggcgaattccgtgaattacagtttggcaatgatcgcggttttatcggcagtgaacagctgtcagataaaaaacctaaggtcgtgccgccgctggatacactgaatgaactcaataatccgatttatgattatctgataaccatcagcaacaccaatgtgtttggcacgccggatgaatctaaatctccggttgccaccctgtttggtgacctgcgttatccggtgctggccaaaatggtcagggaaaaccgggaaggtgaaaaaattgtctggctgactatccgcctggcggacagactggcgtatatccgtttatcggatgtggagctggataaagggatcccgattctgacatatcaccatatcctgaaagacagtgaaaacaggaacttccgccatacctcgaccaccacatccgttgaagcctttaaggcgcagatggattatctgaagcaggccggttaccggacgatttcccttgatgacgtggccggttatctggcgaaggaaaataacctgccgggtaaagtggtggcgctgacgttcgacgatggcctgaaatcggtttaccgctatgcatatccgatcctgaagcagaatgatcagaaagccacactgtttgtgatttcctcgcgggtgaaatcaaagccgcagaaatgggcaccggacggcttgcagtttatgtgctggccagagctgatgcagtcacgggatgtgtttgatattcagtcacatacgcattttttacatcgactggataaccgcaaaaacccgattattttcagccgcaaggagcacacgatcctgctggattaccagcgttcgcagcgcgtgctggcgaaactgaaccctgaacagcattacctggcatatcctttcggggcatataatcaggatgcgatggatgcagcacagcaggccggtatgacgatggccgtcaccaccattcaggggaaagttcgcctcggtgataatccgtatgcgctgaaacgtctgtatgcactgcgtaccgacccgattgagaaatttgctaccatgattggcaacagtggtccggaagtggtgaataaggatattgttgtcgacagataa

SEQ ID NO: 276865 - DNA, 4227 bp, Morganella morganii
gtgaaagacttattaaagtttctgaaagcgcaaaccaagaccgaagagtttgatgcgatcaaaattggtctggcctcacctgacatgattcgttcatggtcatttggtgaagtgaaaaagccggaaaccattaactaccgtacgttcaaacctgagcgtgacgggcttttctgtgcgcgtatcttcgggccggtaaaagattacgaatgtttgtgcggtaagtacaaacgtctgaaacaccgtggtgtgatttgtgagaagtgtggtgttgaagtgactcagactaaagtgcgccgtgagcgcatgggtcacatcgaactggcatcaccgaccgcacacatctggttcctgaaatcactgccgtcccgtatcggcctgctgctggatatgccgctgcgtgatatcgaacgtgttctgtactttgaatcttatgttgttgttgaaggcgggatgaccagccttgagcgcagccagattctgacagaagaacagtatctcgacgctctggaagagttcggtgatgaattcgacgcgaaaatgggtgcggaagccatccaggcattgctgaaagcaatggatctggaacaggaagtcgaaaacctgcgcgaagaactgaatgaaaccaattcagaaaccaaacgtaagaaactgaccaagcgcatcaagctgctggaagccttcattcagtccggtaacaaacctgaatggatgatcctgacagtgctgccggtgttaccaccggatctgcgtccgttagttccgctcgacggcggtcgctttgcgacttcagatctgaacgatctgtaccgtcgtgtgatcaaccgtaacaaccgtctgaaacgcctgctggatctggctgcacctgacatcatcgtacgtaacgaaaaacgtatgctgcaggaagccgtggatgcgctgctggataacggccgtcgtggtcgtgcaattaccgggtctaacaagcgtccgctgaaatctctggcagatatgatcaaaggtaaacagggtcgtttccgtcagaacctgctcggtaagcgtgttgactattccggtcgttctgtaatcaccgtaggtccatacctgcgtctgcatcagtgcggtctgcctaagaaaatggcactggaactgttcaaaccgttcatctacggcaagctggaactgcgtggtctcgcaaccaccattaaagcagccaagaaaatggttgagcgcgaagaagcggtcgtatgggatatcctggatgaagttatccgtgagcacccggttctcctgaaccgtgcaccgacacttcaccgtctgggtattcaggcgtttgaaccaatccttatcgaaggtaaagctatccagctgcacccgctcgtttgtgcggcatataacgccgacttcgatggtgaccagatggcggttcacgttcctctgaccctggaagcgcagctcgaagcccgtgccctgatgatgtccaccaacaacatcctgtcaccggcaagcggcgatccgattatcgtaccttctcaggacgttgttctgggcctgtactacatgacccgtgactgtgttaacgccaaaggcgaaggcatggtactgaacggttcaactgaagctgagcgtgtataccgcgccggtcatgcgtctctgcatgcccgcgtgaaagtccgtatcactgaagaagtgaaagacggcgaaggtaatatcaccaagcgtaccagcatgattgataccactgtcggccgtgccatcttatggcgtatcgttccgcgtggtctgccttactcactggttaaccagccgctgggtaaaaaagcaatctccaaaatgctgaacacctgttaccgtattctgggtctgaagccgaccgttatctttgctgaccagatcatgtacaccggttttgcctacgctgcccgttcaggtgcatccgttggtatcgatgacatggttattccggagaaaaaagccgggatcatcgcggaagccgaagcagaagtggcagaaatccaggagcagttccagtctggtctggttaccgccggcgaacgttataacaaagttatcgatatctgggccgcggccaacgaacgtgttgccaaggcgatgatggaaaacctgtctgttgaaaccgtggttaaccgcgacggcgaagaagaacagcaggtttctttcaacagtatctttatgatggccgactccggtgcgcgtggttctgctgcacagattcgtcagctggccggtatgcgtggtctgatggcgaaaccggatggttccatcatcgaaacgccaatcaccgcgaacttccgtgaaggtcttgacgtactccagtacttcatctcaacccacggtgcacgtaaaggtctggcggataccgcactgaaaacagcaaactccggttacctgacccgtcgtctggttgacgtggcacaagacctcgtcatcactgaagatgactgtggtacgcacgaaggtatcgtcatgaccccggttatcgagggtggtgatgttaaagaacctctgcgcgaccgcgtattaggccgtgtggctgctgaagatattctgaagccgggtactgcggatattcttatcccgcgtaacaccctgctgcatgaaaaacagtgtgacctgttagaagaaaactcagtcgacagcgtgaaagtccgctctgtggttagttgcgaaactgacttcggtgtgtgtgcgaaatgctacggccgtgacctggcgcgtggtcacatcatcaacgccggtgaggcggtgggtgttatcgcggcacagtcaatcggtgaaccgggtacacagctgacgatgcgtacgttccacatcggtggtgcggcatcccgtgctgctgcggaatccagcattcaggtccgtaacaagggtacactgaaactgttcaacgcgaagttcatcatgaactctgcgggcaaactggttatcacgtcccgtaacacagaattgcgtctgatcgacgaattcggccgtaccaaagagagctataaagtaccttacggtgcccagctctccaaaggtgacggtgaagccgtcaacggcggtgaaactgtcgctaactgggatccgcataccatgccggttgtcagtgaagtgtccggtatcatccgctttaccgacatgcacgacggccagaccattacccgtcagactgatgaattaaccggtctgtcctcactggttgttctggattctgcagaacgtaccaccagtgcgaaagaaatgcgtccggcactgaaaattgtcgatgcacagggtaacgatgttctgatcccgaacactgatatgcctgccgcgtacttcttaccgggtaaagcgattgttcagctggatgacggcgtggcaatcaccgccggtgacacgctggcacgtatcccgcaggaatctgtcggtaccaaggatattaccggtggtctgccgcgcgttgcggatctgttcgaagcgcgtcgtccgaaagagcctgcgatcctggctgaaatcagcggtatcatctcgttcggtaaagagaccaaaggtaagcgtcgtctggtgatcacaccaatcgacggcagcgatccttacgaagagatgattccgaagtggcgtcagctcaacgtgttcgaaggtgaaatggttgaacgtggtgacgtcgtatctgatggtccggaatcaccgcacgatatcctgcgtctgcgcggcgtgaatgccgttgcacgttatatcgcgaacgaagtccaggaagtttaccgcttacagggcgttaagattaacgataaacacatcgaagttatcgttcgtcagatgctgcgtaaagtcaccatcacctctgcgggaagctctgagttcctcgaaggtgagcaggttgaatatgcacgcgtgaaagtggcaaaccgtctgctggagcaggaaggtaaaatccctgcaaccttcgaacgtgatctgctgggtatcaccaaagcgtctctggcaacagagtcctttatctctgcggcatcgttccaggagaccacacgcgttctgaccgaagcggccgttgcgggtaaacgcgacgaactgcgcggtctgaaagagaacgtcattgtgggtcgcctgatcccggccggtaccggtttcgcgtaccaccaggatcgtatccgccgccgtcacctggcagaaactgccgaggcagcaccacagcaggtcagcgctgatgaagcaacagctaacttagctgagcttctgaacgccggcttcggtggcagcaaagagtaa

SEQ ID NO: 276866 - DNA, 4029 bp, Morganella morganii
atggtttactcctataccgagaagaaacgtattcgtaaggattttggtaaacgtccgcaagtgctggatgtaccttatctcctttctatccagctggattcattccagaaattcattgaactcgatccggacggtcagaacggcctggaagccgcgttccgttctgttttcccgattcagagctacagtggcaatgcggaactgcaatatgtcagcttccgtctgggtgagccggtatttgacgttaaagaatgtcagatccgcggcgtaaccttttccgcaccactgcgcgtaaaactgcgtctggttgtttacgagcgtgaagcaccggaaggcacagttaaagatattaaagaacaggaagtttacatgggcgagattccgctcatgaccgaaaacggaacgttcgttatcaacggtactgagcgtgttatcgtttctcagttacaccgcagcccgggcgtgttctttgacagtgacaaaggtaaaacacactcttccggtaaagtgctgtataacgcacgtatcattccttaccgtggttcatggctggatttcgagttcgatccgaaagacaacttatttgtccgtattgaccgccgccgtaaattaccggcttcgatcattctgcgtgcgatgaatttcagcaccgaagacattctgaacctgttcttcgaaaaaaccacctttgaaatccgcaataataaactgaccatgaccctcattcctgagcgtctgcgtggtgaaactgcgtccttcgatatcgaagcgaacggtaaagtttatattgagaaaggccgtcgtatcactgcccgtcatatccgccagctggaaaaagacgaagtcagccagattgaagttcctgttgaatatatcgcaggcaaagtggttgcgcgtgattacatcgatgaagcgaccggcgaattaatctgtgcggcgaacatggaaatgtcactggatctgctggcgcgtctgagccagtccggtcacaaaaccattgaaaccctgttcaccaacgacctggatcacggcgcctacatgtcagaaaccctgcgtgtggatccgaccaatgatcgtttaagcgcactggtagaaatctaccgcatgatgcgccctggtgagccgccaacccgcgaagctgctgaaaacctgttcgagaacctgttcttctctgaagatcgttacgatctgtctgcggtcggccgcatgaagttcaaccgttcactgggtcgtgatgactctgacggtaccgggatcctgagccagcaggacattactgatgtcatgaagaaactgatcgacatccgtaacggccgcggtgaagtggatgatatcgaccacttaggtaaccgtcgtatccgttctgtcggtgaaatggcagagaaccagttccgtgtggggctggtccgtgttgagcgtgcggtgaaagagcgtctgtctctgggtgatctggataacctgatgcctcaggatatgatcaacgccaagccgatttctgctgcggttaaagagttctttggttccagccagctgtcccagtttatggaccagaacaacccgctgtcagaaattacgcacaaacgccgtatttcagcattaggcccgggcggtctgacccgtgaacgtgccggcttcgaagtacgagacgttcacccgactcactacggccgcgtatgtcctatcgagacccctgaaggtccgaacatcggtctgatcaactccttatctgtttatgcacagactaacgaatatggtttcctggaaaccccgtaccgtttagtgcgtgacgatgttgttaccgatgaaattcattatctgtctgcaatcgaagaaggtaacttcatcattgcacaggcaaacaccgtattagatgacgacggccacttcgttgatgaactgatcacctgccgtaacaaaggtgaatccagcttattcagccgtgatcaggttcagtacatggacgtttccacccagcaggtggtttctgtcggtgcatccctgatcccgttcctggaacacgatgacgccaaccgtgcattgatgggtgcgaacatgcaacgtcaggcggttccgactctgcgcgctgacaagccgctggttggtaccggtatggaacgtgcggtagccgttgactccggtgttacagccgtagccaaacgcggtggtactgttcagtacgttgacgcatcacgtatcgttatcaaggtaaatgaagatgaaatgtatgccggcgaagcgggcatcgacatctacagcctgaccaaatatacccgttctaaccagaacacctgtatcaaccagactccttgcgtatcgctgggtgagccggttgagcgtggtgacgtgctggctgatggtccgtcaactgacctcggcgaactggcactgggtcagaacatgcgcgtggcatttatgccatggaacggttacaacttcgaagactccatcctcgtatccgagcgtgttgttcaggaagatcgtttcaccactatccacatccaggaactggcttgtgtgtcccgtgacaccaaactggggcctgaagagatcaccgccgacatccctaacgtgggtgaagcggctctctccaaactggatgaatccggtatcgtgtatatcggtgcggaagtgaaaggcggtgacattctggtcggtaaagtgacaccgaaaggtgaaacacagttaaccccggaagagaaactgctgcgtgctatcttcggtgaaaaagcgtcagacgtgaaagattcatctctgcgcgtaccgaatggtgtttccggtactgttatcgacgtccaggtctttacccgcgatggcgtggaaaaagacaagcgtgctctcgaaatcgaagagatgcagctgcgtgacgcgaagaaagacctgaccgaagagctccagattctggaagccggtctgttcagccgtatccgttccgttctgatcaacggcggtatggaagctgacaaactggacaaactgccgcgtgagcgctggttagaactggctctgactgatgaagagaaacagaatcagttagaacagctggcagagcagtatgacgaactgaaatctgagttcgccaagaaactggaagcgaaacgccgcaaaatcacccagggcgatgatctggcaccgggcgtgctgaaaatcgttaaagtgtatctggctgttaaacgtcagatccagcctggtgataaaatggcgggtcgtcacggtaacaaaggggttatctcaaaaattaaccctatcgaagatatgccatacgatgaaaaaggtaaccctgttgacatcgtactgaacccgctgggcgtaccatcgcgtatgaacatcggtcagattctggaaacccacctgggtatggctgcgaaaggcatcggtgacaaaatcaaccagatgatcaaagagcagcaggaagtcgcgaaattacgtgaattcatccagaaagcctatgatctgggtaacgacccgcgtcagaaagtggatctgaacaccttcagtgatgaagaagttctgcgtctggcggacaacctgaaaaaaggtatgccgacagcaacaccagtattcgatggtgcaaaagagcaggaaatcaaagcattactgactctgggtggcttaccgacttccggtcagatcacactgtttgatggtcgtaccggcgagcagttcgagcgtcaggttaccgtcggctatatgtacatgctgaaactgaaccacctggttgatgacaagatgcatgcgcgttctaccggttcttacagcctggttacccagcagccgctgggtggtaaggcgcagttcggcggtcagcgcttcggggagatggaagtgtgggcactggaagcatacggtgccgcttacaccctccaggagatgctgactgtgaaatcggatgacgttaacggtcgtacgaagatgtacaaaaacatcgtcgacggcagtcatcagatggaaccgggaatgccggaatctttcaacgtattgctgaaagaaatccgttccctcggtatcaatatcgagctggaagacgagtaa

SEQ ID NO: 276867 - DNA, 366 bp, Morganella morganii
atgtctatcactaaagaacaaatcctggacgcagttgctgaaatgtctgtaatggacgttgttgaactgatcaccatgatggaagaaaaattcggcgtttctgctgctgctgctgtagcagttgctgcgggtcctgctgaagctgctgaagagaaaactgagttcgacgttattctgaaagctgcaggcgctaacaaagttgcagtaatcaaagctgttcgcggcgcaactggtctgggcctgaaagaagctaaagacttagttgaaagcgcacctgctgcactgaaagaaggtgtgagcaaagatgaagctgaaactctgaaaaaatctctggaagaagctggcgcggaagttgaagttaaataa

SEQ ID NO: 276868 - DNA, 498 bp, Morganella morganii
atggcattaaatcttcaagacaaacaagcgattgttgctgaagtcagcgaagttgccaaaggtgcgctgtctgcagttgtcgcggattcccgtggtgtgactgtagataaaatgaccggtctgcgtaaagcatgtcgtgaagctggcgttactgtacgtgtagtacgtaacaccctgctgcgtcgtgctgttgaaggtacctcttctgagtgcctgaaagacgtattcgtcggtcctaccttgattgcattttctcatgaacatccgggcgctgctgctcgtctgttcaaagaattcgcgaaagcgaaccctgcattcgagattaaagccgcagcctttgaaggtgagttaattgcagcgaaagatatcgatcgcttagcaacactcccgacttacgaagaagcaatcgcgcgcctgatggcaaccatgaaagaagcctctgcaggcaaactggttcgcactctggcagcgttacgcgatcagaaagaagcagcttaa

SEQ ID NO: 276869 - DNA, 702 bp, Morganella morganii
atggctaaactgaccaagcgcatgcgcaatatccgtgaaaaagttgatgctaccaaactgtacgacatcaatgaagccgtagccctgctgaaagaattagcgactgctaaattcgttgaaagcgttgacgttgccgtcaacctgggtatcgatgcacgtaaatctgaccaaaacgttcgcggtgcaactgtactgccaaacggtaccggtcgttctgtccgcgtagctgtgttcgcacagggcgctaacgctgaagctgctaaagctgcaggcgcagaactggttggtatggaagacctggctgacaaaatcaaagccggcgaaatggacttcgacgttgttatcgcatctccggatgcaatgcgcgttgttggccaattaggtcagatcttaggcccgcgcggcctgatgccaaacccgaaagtgggtactgtaacacctaacgttgctgaagctgtgaacaacgctaaagcgggtcaggttcgttaccgtaacgacaaaaacgggatcatccacaccaccatcggtaaagtagatttcgacactgataaactgaaagaaaacctggaagctctgctggttgcactgaaaaaagcaaaaccatcttcagcgaaaggcgtgtacatcaagaaaatcagcctgtctaccaccatgggtgcgggtgttgcaatcgaccagtctggtctgactgctgctgcttaa

SEQ ID NO: 276870 - DNA, 429 bp, Morganella morganii
atggctaagaaagtacaagcctatatcaaactgcaggttgcagctggtatggcaaacccaagtccaccggttggtcctgcactgggtcagcagggtgtgaacatcatggaattctgtaaagcgtttaacgccaaaacagacagcatggaaaaaggtttaccaatcccggttgttatcaccgtttatgctgaccgttctttcactttcatcactaaaactccgccagcggcagttttactgaagaaagctgcaggtctgaaatctggttccggcaaaccgaacaaagagaaagtaggtaaaattacctctgctcaggttcgtgagattgctgagactaaagcagcggatatgactggtgccgatgtagaagctatgatgcgttctatcgaaggtactgctcgttccatgggcctggtagtggagggttaa

SEQ ID NO: 276871 - DNA, 546 bp, Morganella morganii
atgtcggattctcctaaaaaacgttggtatgtcatccaggctttctccggattcgagagccgggttgcgcagtctctgcgtgaacatatcaaaatcaacgggatggaagattcatttggcgaagtcatggtgccaacggaagaagtcgtcgagatccgcagcggtcagcgccgcaaaagtgagcgcaaattcttccccggctatgtcctggttcagatggcgatgaacgatgcatcctggcatctggtgcgtaacgtaccgcgtgtaatgggattcatcggcggaacatccgatcgtcctgcaccgatcagcgataaagaagttgatgcgattatgaaccgcctgcagcaggtaggtgataagccgcgtccgaaaacgctgttcgagccgggcgaaatggtccgtgtttccgatggtccgtttgcagactttaacggtgttgttgaagaagtcgactacgagaagagccgcctgaaggtatcagtctctatttttggtcgtgcaacaccggtcgaactggatttcagtcaggtcgaaaaaccgtaa

SEQ ID NO: 276872 - DNA, 378 bp, Morganella morganii
atgagtgcgaatagcgaagctcaacaaaacggccgtggtgctgacattgccaaatggttagtggtcgcagttctgctgatcgctgctatcggcggtaactactacttccgcgaatttaatctcgcgctgcgtgcgctggcagttgttgtcgtcatcgcattagccggtggtattgcactgtggacaacgaaaggcaaagcgacactgacttttgcccgcgaagcacgggttgaaatgcgtaaagtgatctggcctacacgtcaggaaacactgcatacaacactgatcgttgcggcagtcacagcggttatgtcgttagtgttatggggccttgatggtatccttgtccgtcttgtttcctatataacatccttctga

SEQ ID NO: 276873 - DNA, 2865 bp, Morganella morganii
atgaatattaacctgtttatcaggggatatcagcgatcccctaattctggctataccgccctctcactgcgtggctcgttagcagcggccgggcttctcagcctgagtactgcggtctgtttacagacagcacaagctgcggatatcggcagccagagcggtaccaatattacggttaacgacggtgaccggatcaccggcgataccggcgatgcatccggaaaccgctatggtgtcctgaactcctataacaacggtgccggaaccatcaatctcggcaataacgtgactgtgaatgtgacagacacggacaaatacgccaaaggcgtggttattcagggaaataacagtgtattaaacgccaatggcttatccgtggatgtaaacggtaaaagcgccattggtattgacctgtccggtaaaaaagcagaggccaatctgggaaccggcagcagtgtgaaagtggaaggaaccggtaacggcatggcaagcggtgttgtggtcagcaacgcctccaccctgaccgctgaccgtctctctattgaaaccaaaggtaacagcggtacaggcctgtctatcgcagactacggcagtaacgtcaatctgggcagcggcagtacgattaaaaccaacggtaccggaagctatggtatccgtatcgacggcctgaacggcaccgcatccaatggccccgcctattttactgccactaatctgactatcgatgcacagggttcaagtgcatacggcatgaatatccagagaaactccattgttgatctgggtactgacagcaaaattatgaccaacggcgataacgcccacggtatctggagctttggtgacatcaaagcagatgccctgacaattatcgcccgcggaagcaatgccaacgcgctggaagttcgcggcggaaccgccaatatcggtgccggcagccatatgtattctgaactgggcggtggtctggtcaccaacggctcaggtacgaccatcaactttaccggtacggcggataaccgtaatactattttctccggtggttcttacggtgcgtctgctcagttttccggtgctaaaatcaacctggcaaacaccgatattacgattgaccgcaacggaagcctgggtctgggactgtgggcgctcggcggcggtgtcatgaccggtgataatatctcggtaacaggtgccgcaggcacccgtggtgtctatgccatgaccaacagccagattgatctgaccggcgacctgaccattaacatggcaaccgcagatcagatagccattgccacccagcacaatgacggctatgccgccagccggattaatgcaacgggcaaaatgctgatcaacggcggtattcagtcacggggcggcctgatcaatgtggatatggcttccggctcacaatggaccgggaacgcctacagcgataacgtcaacggcggcttgctgaatgtcactatggacaacagccgctggaatgtcacagatgattccaacctggataatctgacactgaataataccaccgtcgatttatcgcacagattatccgacaccggttactcaacactgagtatcgccaacctcagcggcaacggcgcattcacgctgcggactgatattgtcggtgacggtgatggtgtcaacaacgccggtgacaaactggtggtaaccggtaccagcgccggtgattattcattaacagtcttaaaccgcggcagcctggccacaaccgggaatgaaattctgaccgtcgtggaaaccgcagacggcgcagccagctttacttcaacgtctgaagtcgagttaggcggctatctgtatgacgtgcgcaagaacggcaataactgggaactgtactcatcaggtgcctatgttccgccgccggtagtcccggatcctgatccggaaccagagcctgaaccggaaaaaccaaaaccaccgatcaccaccacggcagatgcaggcggtaatttccttaacgtgggctatctgattaactacgcagagacccagacactgatgcagcgcatgggtgatctgcgtcagaacggcggggataataatgcatggctgagaggcttcggcggtaaattcaactcctttgccggcggcaaaatgagcggatttgacatgacctacggcggtacacagctgggctttgataaacgtatctcaccggacacaccgctgtatatcggtacctttgcgggcttaacccagggctcaccggactatcgcggcggggacggcactgtccgctcataccatctggggctttacaccacctatatggcggacaacggtttctatgttgacggtattgccaaggtctcccggctgaaaaataaattcagcgtatcggacagccagaacaataatgtcagcggcgacggcagctcaacgggggtcagtgtgtcggcggaagcaggccggaaattcagcctgagccgggccggtaatggattctatatcgaaccgcaggcgcagctgacttacagccatcaggattcaaccggtattcacgccagcaacggcctgaaaatcgacctcggcagctacgattctaccatcggacgcgccggtacactgatcggctatgaaaccaccaccggtgacagccagattaacgtttacctgaaaaccggttttgtcagagagtttcagggcaacacagactataaacttaacggctcccgcgaagcacacagcttcaaaggaaactggtggaacaacggactgggcatcagcgccaatatcagcaaaaaacataccctgtatgcagaggctgacagctcaaccggcaaccggtttgatcaataccagattaacggcggataccgtttcagcttttaa

SEQ ID NO: 276874 - DNA, 270 bp, Morganella morganii
atgaaaaataatcagatattactgcatgatgtaggcgcgctgatccgaaagttacgtaaagaaaaaagaatgagcggcgttgatcttggcgcagaactgggaatcagccagcaacagatttcccgctatgaaaatgccacgagtgaaatatcggtatcaacactcattaatatacttgctgtatttaatataacacccgctgaattttttacccgtatctctgatacgaagcatgactttttcagcaaatacaccaccgggaactggtaa

SEQ ID NO: 276875 - DNA, 315 bp, Morganella morganii
atgataatgaaccccctcaaaataatcgcattcccggttctgctttttatttcggcttccggttttgcacaaacggttaccgcctggggtgatacattatctgatgcggaagctaaaatagcccgccaggcagaaaaagccgggaccggatatcagataaccagcgccagagtcggctgggttacttatgttacagccacactgacaccattaccggaagatacacgcaatatttcacctgacgaaaaccaaactcagaataatgcattaccacaaacggagaatacccgtaaccactggctgacagaaaaataa

SEQ ID NO: 276876 - DNA, 603 bp, Morganella morganii
atgagcggactgacactttataccaatgcaatgtcacgcgggaataccgtcgatttatttctgaaaattctggatgtgccgtatcagcgcgtagaacttgattatggtgcggatatgcataccccggaatatctggctatcaacccgatgggtaaagtaccggcattaaccgacggagaccgtgttattacggaaacagccgccatctgcatgtatcttgccgataaattcattgaaaaaggctttgcaccagcgattgatgctccggaacgcggcacctattaccgctggttcctgttcaccgccggtccggttgaagccgctttcaccgccaaagagatgggccaggtactgacagaagaagaacagaaaatgtcagggttcggctcctttgaccgcgtgatggcctgcctggaaaccggactggctgatgcagcaccgtatttatgcggtaaaaccatgaccgccgttgatgtttacaccggctatttcctgatgttcctggccaaacacgacttaattgccatctctccggtcatgaaagcgtatttagacagcctgacgttaaacccggcatttgccgcggccttctccggagaataa

SEQ ID NO: 276877 - DNA, 699 bp, Morganella morganii
atgacacgcacccaacgcttactcaccttattacagatcctgaaagagaaccgttatccggtcacggcggactccctcgcctcacaattacaaatcagtgtgcgttccgtttaccgggatattgaaaccctgcgctgccagggtgccgaaattaccggtgaagctggtctcggttatcagatgaaatcaggattactgctgccgccgatgatatttgatgtcaatgaactggaagccttaattctcggactgcgctgggtacagagtaatgcggatgatgaactgaaagcctccgctgcccgcgcggcaaataaaattaatgctgtggtggaacatgaatcccgtgctgttttcagtgacagtacattatttgtgcccgcctcacagctgacacaggtcgataatatcattgccggggaattgcgccgcagtctgcgcgaagagctgaaaatcaaactgcattatcaggataaagaggcacagaccagcaacaggattatctggccgattgccatcggttatatgaaagaggtgcaggtgctggccgcctggtgtgaattacgtcagagctaccggcatttccggctcgacagaattcaatcctgtgaagtattaaccgacaaactgccgtacccgaaaaaatacctgctcgaccgctggcgcaaagaagtcctctgcatccctcctgacagattctga

SEQ ID NO: 276878 - DNA, 471 bp, Morganella morganii
atggatgtacatgacaaagaaacccgctcccggaatatgcgcgccatccgcaaccgggataccagaccggagcatcatgtcagaaagctgttgcatcataacggcttccgtttccggttatatccggcagatttgcccggcaaacccgatatatggatggcaaaatggcggacggctatctttattcacggctgtttctggcatatgcacgattgtgagaaattccggcttcccgccacgcggaccgcattctggcagaaaaaattatcagagaataaaatccgcgatgaaaaatatatcgcagagctgcaccgcatggggttacgcacattaattatctgggaatgtgccctgaccgggaaaaccaaactgcctgatccgatgctgctgacattaataaaaacctggctgataagcagtgctgtttcaggcagtattacggactccggattatctatcacgccaggctga

SEQ ID NO: 276879 - DNA, 1116 bp, Morganella morganii
ttgaaaaaacacccagaggacgcccctttccggcagtcacccgaggataattgcagattcacttttatcgatctttttgccggcatcggcgggatccgcctgccctttcagcaacagggcggtcgttgtgtgtttacctctgagtgggataaattcgcccagcgcacctattttgccaatttcggtgagatgcctgacggcgacatcacccggatcgcggcaaaagatattccggatcacgatattcttctcggcggttttccgtgccaggcattttcacaggcaggcgcgcgtcagggctttaacgacacccgcggtaccatgttctttgaagtccagcgcatcatgacagaaaaacggccgaaggcgtttctgctggagaacgtcaaacagttgcgcggccacgacggcggccggacattacagactatcctcgatattctgcgcggagagtatgaacagactgtgccggataatattccgctgagtgaagagacccgcagcgcgttgtcgcaaaaactgaactattgggttgatttccgcgtgctgcgtgccgccgatttcggtattccgcagaaccgtgagcgtatttttattatcggttttgatcgcgaccagtttccggatgcggattttgacaccttattttcctggccggaaccgactcatgagcctacctgtctcggtgatattctccagagcaaaaaagcgctggcggaagatgcggtgcgctataaaaaagatcgttttaccatctccgataaattatgggccggccatcagaaacgcaaaagagaacataaagccagaggtaacggcttcggatattgtctgtttaataaaaacagtgaatataccaataccctgagcgcccgctattataaagacggctctgagattctgattgaccagtcgcgggacggtaaaaacccgcgcaaactcaccccgcgtgaatgtgcgaatcttcagggttttccggaaaattatattactgatgctgtttcccaggggcagatttataaacagttcggcaattctgtctgtatgactgttgtcgaagcaatagctgaacaactcacagcggcattagtacgggccggtgcattaccccggtaa

SEQ ID NO: 276880 - DNA, 1260 bp, Morganella morganii
atgaatcacaaatccgatgtactgaagatagacggaaagaccttactgaatcatttgcaggaactggggaataccggggcggacccggtgaagggcggccggacgcggacagcgctgaccgatgcggaaaagcaggggcgtgacctggtggccggctggatgaaagcgctggatctggtgatccgtattgaccagatcggaaacattttcggcacgctgccgtcagtttccggaaacagtgatactgcgccgctgatgatagggtcacatattgatacggtgattaacgcaggggcgctggatggctgctacggcgtgctcagcggcctggcggtagtccgggccttccgggaagccggtgtgctgccgtcccgtccgatcacggtggcggcattcaccaacgaagaaggtgtgcgttttcatccggatatgatgggctcgctggtgtatgcgggcggttatccgctggaggatgccctgaatgcggtggccactgacggtgcagtgctgcgtgatgagctggagcgcgccggttatgcgggcagtatggtgccgggcagtattgtgccgcacgagtatctggaactgcatattgagcagggcccggtgctggaagcggaagggttacagatcggggtggtggagagcttacaggggatctcatggcagaaaatcaccatcaccggtacagcaaaccatgcaggaaccacaccgacacggctgcgtcatgatgccggatatgcagcagcgaagctaatcacctttctgcgtgaaggcatttctcagaaaaacgggaccacattaaccacggtggggacgattgcttttgaaccgaatgcggttaacgtaatcccggggtcggcaaccttcaccattgatatgcgggatccggacgaagagcgcctgcaatgggcggaagggcagatccgcgattatctggcggtgttatcagagcaggaaggggttacggtctcagcccgtcagctggcgcgttttcagccggtggtgtttgataaaaccctggtcagctgtgtggagaatgcggccagagccgccgggagtgcataccgtcgtatgccgtccggtgccggacatgatgcgcagatgattgcgcggatagcgccggcagcgatgatttttgtaccgagtaagaacggtatcagccataacccggcggaatataccgaagatgctgatctgatccgcggcgcgcaggtgctgctggatacggtgatactgagactggcagagccggtgtaa

SEQ ID NO: 276881 - DNA, 900 bp, Morganella morganii
atgcgacctgcggactatctgcggcttaccctgctggcggccatctggggtgccagctttctttttatgcgggtggcctccccgcagttcggcgcggttaacacggcctttctgcgtgtctttttcggctgtgccggacttctggtgatcctccttgtcatgcgccgcaccttccggtttgacggaaaattaaaaccggcattattgctgggcgtgattaactccggtattcccttttttatgtactgtctggccgcgcagtggctgccggccggttactccgccattctcaacgccaccacgccgctgatgggggcccttatcggctttgctttctttgcagaaaccctgaccacccgcaaatggctgggtgtaatgatgggactggccgggattgtggtgatcaccacggtcgggaaaagtcagtcttccgcccatttattatggggcgtggccgcctgtctgcttgccaccgcctgttacgggctggcgggattcctgacgcggcgctggatcagtgaaaaaggcggtctggatgcccgtctggttgcgttcggcagccagctcggtgccacgctgttcctgctgccgtttttcggtttcagtgtcacgaccggcccggcggttaactgggcacagccgatggtctggggcagtgtgattgcagtggggctgctctgtacggcagtggcgtatattctctatttccgcctgattgcggatatcggcccgatgcgctcactgacagtgacctttctgatcccgccgttcggtattttgtggggttatcttgtgcttgatgaaacactcagcccgaacttcttcctcggtgcgctgattgtctgtgtggcagtctggctgctggtcagccggggcaaacagcccgcagcggtaaaataa

SEQ ID NO: 276882 - DNA, 2214 bp, Morganella morganii
atgcgcatccgctctctctgtcttctgacaccctgcctgaccctgttaatcacaccggatgtcctggcggcaacttctgccgattccggcgaaccgattgtggtctctgcttcgcgcagctaccggacagtttctgaaatggcccagaccacctgggtaattgataatgcggatatcgcgcagcaggcggaaggcggaaaagagctgaaagatatcctggcgcagctgatcccggggatgagtgtcagtggccaggggcggacaaactacggcatgaatatgcgcgggcgctctatgattgtgatggtggacggtgtgcgcctgaattcatcacgcagtgacagccgccagctggattcgattgatccgttcaatatcaatcatattgaagtgatttccggtgcgacctccctgtacggcggcggcagcagcggtggtctgattaatatcgtgaccaaaaaaggtcaggaagaaaaacaggttgaggttcagatcggcggcaaaagcgggttccgcaacggttcggatcatgatgaaaacgtggctgccgcggtcagcggtggtaatgatcaggcttacggacgcttatctgtggcttatcagcgttacggcggctggtatgacggcaaaggccgcgaaatcctgatcgataacacccagaccgggcttcagtattctgaccgcctggatgtgatgggctccggaacactgacgattgatgatcatcagtcgctggagctgatggcgcagtattacaacagtgaatctgacggtaaacacgggatcgatctgggcaaagactttgcggcggtgctgggaaaaggcaccgcgcataacagcgacaaactggattctgaccggatccccggcaccaaacgccatatggtgaacctgcagtacagcaacagtgatctgctgggacaggatctggtggcgcaggcgtattaccgtgacgaaacccagaccttctatccgttcccggcgctgggcggtaaaaagccggattatgtggtcagcagcatcagtgcatcagagcagaaaaccgatttctacggcggtaaagtcacctttaacagcaaaccgctggataacctgacactgacgtacggcgcggatgccgagcatgaaaaattcagtgccaaccagaagttctttaatctgcagaaagcgaaggaaagcaacggactgacactcgattccgcctacaataccgggcgttatccgggctataccaccaccacgatggcggcgtttctgcaaagcagttatgacatcaacccgctggtgaccctgagcggcggtatgcgttatcagtacacgaaaaacaaagtggatgattttgtcggttatcagcagcaacagctgattgcggaaggcaaagccacttcagcggatgcggtaccgggcggggaaacggattacaacaacctgttatttaatgccggagtgctgctcaacctgaccgacacacaacagacctggtttaatttttcccagggctttgaaatcccggatattgccaaattctatggtaccggcacttacggttcaccggtcagtggtcattatccgctgctcaacagtgtgaatatcaatgatacgcgggtaaaaggtatcaaagtcagctccttcgaactgggctggcgttacaccggggacagcctgcaaacccagctggcggcgtactattcactgtctgacagcagctacgacatcaataagaaagatatgactatcttcctgaaagatgacaaacgccggatctacggcgtggaaggggcggcggattatactatcgcagatactgactggcgtgtcggcaccaatttcaacctgattaaatccgagacaaaagcgggcgatcagtgggaaaaatggagcgtgaagtttgccagcccgtcaaaagtcaccgcgtatgtggcgtgggagccgtcagactggacactgcgtctgcaaagccagcaatctttcagtctgaccgatgcggacggggagaaactggacggatataacaccgtcgatttcctcggcagctatcagttaccggtgggtaaagtcagctttgcggtcgaaaatctgctggataaagattacaccaccgtgtggggacagcgcgcacctatcctgtacagcccggcgtacggcgcaccggacttatacagctataaaggtcgcggccgcacattcgcactgaattatctggtgacattctga

SEQ ID NO: 276883 - DNA, 1101 bp, Morganella morganii
atgcgcatattcatagtaatgatgacgctgctgctgagcatgggagtccgtgctcagacgcaaattgtcaccgatttacagggacggtccgtagcggtgaatacgccggtcaagcggctgtttcttgcggatgcccgtgacattctggcggtggatattgcggcggggaaaacccatttttcctctctcagcggatggagtgataccctggcgcattatgcgccggacctggaagcagcatatctggaggccgcgccggaactggcgcggttaccggttctgccgaaaagcaaagacggtactttcacaacagaaaacctgctggcgctgtcaccggatgcggtactgatgcacaaatcctcctacgggctgatgaaaagcacgaacctgctgccgcaactggaagcggcgggtattccggtgctttttatcgatttccgcagtgacatgacagaaaacaccccgaaaagtattcagcttattggcacactttttgaaaccgaagggcgggcagcggagttttcggaatactaccggcttaaactggcggcactgcgtcagcgtctgccggagcaaaaaccgtctgtgctgattgaaagtaacgccggattattcggcaatgactgctgccgtttatacggacgtaccggattcggcgaactggcggagattgcgggtggtgataacctggtgcgcgacacgatgccggcaaacggcgcggaaagcagcattgaaaatattctgcatctcaacccgcagttctatgtgctgaccggtgcggactggaaacagtataaccgccgttcagaggcggtcacgctcgggtacggtgcaccggcagaaccggcgcaaaaagagatgaatgcgctgatgaaccggcagggattagcttcgctggaggcggtgaaatcgcagcgtgtgatggcggtttaccataatttctacaacagccctctgaatatttttgccgccgaagcactggctgcatttttccatccgcaggcattcagtgacctgaatccgcaggcggaaatggtgtcattccatcagcggtttacagcgatcagtggtgccggaacgttctgggtgacgatgcagtaa

SEQ ID NO: 276884 - DNA, 450 bp, Morganella morganii
ttggatattcattttgagagcgggctgttatccctgaatcaggattttgcaactccggaagagggcatccgctatgccggtgagttgctgcaaaaatcaggcgcatgtacccctgattatattgaggaaatgatccgcgtatatcatgagttcggcccggtgattgtgctggataccggggtggcgatgccccatgcgagaccggaaaaaggggcattaaaaaccgcattctccgtggtggtgaccggcacaccgctggtatttcatcatgaggagtttgatccggtcaatgtcattattgctatcagcgcgacagattcagatacccatattcatctgattcagaccgtggctgatctgattgaaaataatattactgagtttgtaaaagagaataacaaagaacagattttacagtttatccggacgtcgatagagaggacagcatga

SEQ ID NO: 276885 - DNA, 282 bp, Morganella morganii
atgattaaaataagaacagtgtgcggcaatggtatcggcagctcattaatggccgccaataacgtgaagaaaatttgtgaggagatgggcataaaagccgatgtggcttcagtggattttgcgaatgccgtgggtgagaaagcggatctgtatgtcacgattaaagagctggcatcacaatttccgccgcagtgtgaagttgccgtgatccgcagttatgtgcataaagccaaaattgcggaagatattaaagacgctttactgaaactgagtcaatcctga

SEQ ID NO: 276886 - DNA, 1395 bp, Morganella morganii
atggcttatattctctcattcctgactgagatattcagtcagcctgcctttcttatggggattatctccctggtggggttactggcattacggtcaccggtcaataaattattaaccgggacattaaaaccgatcctcggttatttaatgctgagtgcaggtgccggtgttatcgtggcaaacctgaatccgctcggtggtattattgaagccggttttaatatccggggtgttattccgaataacgaagcgattgtttctgttgcccagaaattactgggtgtggaaacaatgagtattttattgctcggctttattttcaacctggcaattgcccgtttcactaaatataaatatatctttttaaccggtcaccactctttctttttagcctgtttattctcggcagtattacaggccgcgaatttcaaaggctgggaaatggttattatcggcggtttcctgctgggtgcctggtcggctatttcaccggcaatcgggcagcgttataccaagcgcgtaaccgaagacggtggtattgccatggggcactttggttccctcggttattacctgtctgcctggattgcggcgaaagtcggtaaagcggaaaactcatttgcggatactgaaatctccgaaaaatggggcttcctgcgcgataccacagtaacgaccggtattgtgatggtcgtgatttatctggtgtgcagcattgttgccggttcagcttatatcagcaccatcactgagcagaatatggtgatcttctccatcctgaccggtctgcagttcgcggtgggtgtggcgattgtctacagcggtgtgcgtttaatcctgggtgacctggtacctgcgttccagggtatcagccagaaactgatcccgaactcgattccggcggttgactgtgctgtcttctttaccttcagcccgactgcggtggtaataggttttatcagctcctttatcggcggccttgtcggcatgctgatgctgggcggtctgggtatggcgctgattatcccgggcatggtgccgcacttcttctgcggcggtacatccggtgtattcgcagacaaactgggcggcaaaaagggctgtattatcgcctcctttatcggcggtattttcctcgcattcttaccggccatgctgttaccggcgctgggcaacctgggctttgaaaacagtacctttgcagactttgacttcgcggtgtggggcattgttatcggtgaagcctttacccacttcggtcagattgcgatttacctgatttgttttgttctggttctggcattactggcgccgtttgcctttaaatcagtcaaagtggtgggggataccctgagctatgacgaattaatggaaaaagaccgcgcacataagtaa

SEQ ID NO: 276887 - DNA, 966 bp, Morganella morganii
atggcagtaatttctgtcggtttatcctgcttcgaccagttcttctttcttaaccgctggccggaggagaataccaaaaatttctccggcgattttattgaaagcggcggcggaccctgtgccaatgcggcatggttactgggattgtggggagaggatatttattttaccggacatctcaaccacgatatctacggtcagaaaattattgatgagtttcatgatgtgggtgtgaataccgattacgttatttttaacgatgaaatgatcacaccgctggcatctgtattagtgaatcagttaaatggttcccggacaattattacgcgcaagctggtctctccgccgcgtatgacatttgaagagaaactgaaaattgatgagctgattgcccgcctgacacaggaggataaaggggaagtcatcacggtattaattgatggtcatgaaccggagctgagtgaatatattctgacccgtctgcctgatgcccgcgtcgtgatggacgcggggtcactgcgggaaagcaatttaaatctggcgaaatataccgattatctggtcgccagtgaaaactttgcccgtgatctgattgagattgataaattcaccaccgatattcagttaaaaacggcattaacagaactgaataaactggcccggggtgaggcatttattacgctgggtgagaaaggctgtgcgtatctgcaaaacggaatgctgacaatatcaccggcatttatctgtaatgcgattgatacaaccggtgccggtgatatattccacggtgcatttacgtacggggttcattataactggcatattgagaatattattttatttgccagtctgtcagccgctatctcaattgagaaaaaaggggtgcgcgaatcaatgccggatttggcggatgtccataatgcggtgaataaatacgaaagaaatctgaaacactattttgattaa

SEQ ID NO: 276888 - DNA, 864 bp, Morganella morganii
atgttagtttcgatggagaatatgctcaatcgtgcctttgcacgccagtacgccgtcggccagtttaatattaataacctggaatggaccggaacggtattaaaagttgcacagcaactgcgttccccggttattttaggtgtctccggcggaaccataaaacatatgctcgggctcaaatgtattcacgatattgtggtgaatgcgatggagtttctggaaatagatgtgccggtggcgctgcatttggatcacggtcagtcttatgaagcctgtgaagcggcaattaaagccggtttcagctccgtgatgttcgacggatcacatatgtcgtttgccgaaaacctggcaatcaccaaacgtctggtgacttacgcgcaccgccgtggtgtgtctgtggaagcagagctgggtaccatcgcgggcagtgaggacggaattgtgaattctcacgtgatttatgcggacccggcagagtgtcagaagctggtggaagaaaccggggtggattgtctggcggcggcgctcggctcgactcacgggctgtataaaggcaaggcgaagctcggttttgcggaaatgcagcatatcgcgcaactggtgaaagtgccgctggtactgcacggcggaaccggtatttcagacgaggatatgaagaaagcgatttcactcggtacggcgaaaatcaacgttaatacggaaaatatgtatgcgtggtgcctgtccgtgaaagagcagtttgaacagcagggcgcgcatgatatcaacgacccgcgcaaagtgattatgaaaggactgcagccggtcgctgagcgggtggaagagcggatgcgtctgttcggctctgccgggcagtctctgtaa

SEQ ID NO: 276889 - DNA, 903 bp, Morganella morganii
atgaagaatgtcgattataaatcactgagattgctggatctgattatcaaagaacagggattcgagaaagcctcagcgaaactctttatcacgcagtctgcggtgtcccagcgggtaaaacagctggaaaatcaggtgggttccctgctgctgacacgcaccgtgccgccgaaaccgaccgaactcggacaaaagctgctgggccttctgtatcatgttgatttgattgagcatgatgcctttgataatgaaagcggcaaccatgtggtcaccatccctatctccattaacgccgactccctcgcgacctggtttttatccgctatcaagccgatactggatgaccgcgccattcgtctggatattaaagtggatgatgaaagccggacactcgactacctgctcaaaggggaagcggtcggggcaatcagtatgcagccgctgcctgctgtcggcggaacctgtgattatctgggggcgatggattatatttttgtctcgagcccggcctttgcggaaaaatatttcagcaaaggagtgaccaaagagaccctgctgcgggcaccggtggtgtcatttaaccactcgtcagatatgcaccatatctttttgcaggagtatttccgtttaacgccgggaagcctgaacagccatatagtgccttcttcggaagcctatattcagctggtactgcaaaactccgcctgctgtatgattgcggaacatcagattaaacatgaacttgaatccggacggatgatcaatctggtgccggaactggtgcagcaaaaacagctttactggcaccgttaccagccggaatccggcacattacagcggatttcagaagcgattattaataatgccaaagattatctgacccaatccccggtgaccgcctga

SEQ ID NO: 276890 - DNA, 864 bp, Morganella morganii
atgaccaagatcctccgttatctcactgtgctgaccactctccttttatttgtgctgcctgcacaggcaacactgtacagctatattacccgctctgaaggtaaaccggcagatatcgattattactaccggattactgcctggactccgccgccggcaggcagcgtgcatccttgtgtgaaagtcggtctgacaaaaaaatgctacgccaatattaatcaccgccacacaaacgcagaccggggtggggtatcctcccgtaataacagcgaatttgaggggcgctgccggaatatgaacctgatgacactgccggatgccacagctgtttataactatatttataataactgttttggcggactgccgtttgaggggcagaccaatcacaaaggtgacgctatccgtaacgaatgtgtgaccctctttttaaccagcagcccgaccggtggtaacggttatatgtatccggattctgtctgcggcgtagctcccccgccgggcggaatttgcagttttacggctgactatccgagcgccattctcgatcatggccggataccggataatgaaattaacggcaatcaggccagccagtatctgagaatgaaatgcagcaaagatgccactgtccggatctactccgtgagtgatacggaatcccggctgagactgaaaaacaatctctacagcagactgacactgaacggctatccgctgaactcgtccggcggtggtgtaccggtttatgtacgcggggattatgaagcaaacgcactgctgaaaagcacactggaaaccaccgggccggtggaagccgggccttttatcggtaatatatccattattatgaccattgactga

SEQ ID NO: 276891 - DNA, 543 bp, Morganella morganii
atgaaccaccctgctgatttcagtctgttattcagcgctgcactgatattctccgctgcctttattccggcgggatatgccgccgataacctgcgcgtgatcggcgaactgtacaatgacccctgcacgctgttaccggaaaataaagatctggtggtggatttcagtgatgtttctctgccggatttgtatgagggggttgaggtccgcaaatcattctctctgatcctgtctgactgcgatatcacggatatgaaccggtttaagattaaattcaccgggaccgggaccccggatatgccgtcctacctggcgctggatccgtccagtgacgcaggcgggtttgccatcggagtgcggacagataatattccgctgatcccgctgaatcagttttccaacgccattactatcgccggaaacggtgagaacaacatccgttttaccgcttttttgcaggttgatccgaaagcaaaagccggtaaaaccattaagtacggcgcgtttaattccaccgcgtttctgactatcgactatttctga

SEQ ID NO: 276892 - DNA, 492 bp, Morganella morganii
atgcgacatttaatcacagccctgatgctgtcctgttttgctctgccggtgtatgccggtacaggggtagcacacagttccgccaatatccggatcaccggaaggcttcagccgccaccgccctgtaaagtgaataacaacgaggaaatcctggtcgattttcagcgcatccagataaaaacgctggaaaaatcagatatccgcagagatgtggatatcccctttgtctgtgagcaggactcagagaatttcaaatatttcctcaccgttgacgggccgcgggcacagttcaataacaaactggtgaaaaccaaccagaacaacctgggctttaatattgaactcgccggggtaagactgaatttgggcaaggcacagctggtgaacagccaccatctgacattgaccattgtgctgaccaaaaacccggacggggaagtcacgcccggctccttcagcggcatcggcactgtgacaatggagtatttctga

SEQ ID NO: 276893 - DNA, 492 bp, Morganella morganii
atgacactgaccatgcttttccgtaccggctgcgcggcactgttgtgcctgccgctgatggtctccggcggttcttacacttatatcgatgtgtatgtccggggggagatatttatcgcgccctgcaaaattaatcagggcaataatatcctgattgatttcaaagatgtcaccaccacccggatagacaacgataattaccgtgaaaaactggattaccggatcgagtgccaggataaccgcgcccgggccatgaagctgtatatcaccggcacctcatcctccgtcgattcccgctatctttccaccagcgtcagtgacctcgcggtgaaattcctggcagataacaaactgatgccgctgaatgaaaagatgaccattcagtatccggtacaacccgaaattatggtgattctggcaaaaaaaccgtcggtgaaactgcctgccggtgaattcaatgccacggccaccatccatatcgattatgaataa

SEQ ID NO: 276894 - DNA, 735 bp, Morganella morganii
atgagaaaagtgaccaccttattctgcgccgcactgactaccctggccgccattccggtaaccgccggagccgccatcgcactcgacagaacccgtgttatttataacgaaggtgataaagctgtgccgctgacggtcaccaatgagcacctcagcaaaccgtatctggcgcagtcctggattgagaacagtaccgggcagaaaatcacatcaccggtatttgtcactccgccggtgcagcggattgagcctgaccgcaaaagccagattaaagtgcagctctctccggaagccgcctcattaccggctgaccgcgaatcggtcttttatctgaatgtccgtgaaattccgccggccgttgagaaaagtaacgtgctgcagattgccctgcaaaccaagatcaaactgttctaccgcccgaaagcgattcaggttcaggagcggatggaaaaaatcgccggggcggatggcatccgtctgtcgcagaacggcgggcagtacaccattgaaaacaccacgccgtaccatctttcagttacccgtctggatgccaccggcggaaaagaagtgaaatttgagccggtgatggtatcaccaaaagcctccgcgtctttcagtgctccggcgctgggtaatgcgccggttgtttattacgtcaatgactacggtgataccaaaccactgaaattcagctgtgccggcagcagctgtaccgtgcagtcagacagtaaataa

SEQ ID NO: 276895 - DNA, 2499 bp, Morganella morganii
atgaagctcagaacaacaattaaaatatttacagcttctgtggttgcagctattcagataaataccgcatttgctgaagaagccgttaactttaatacatcatttttagactcagacagtcaggaaattgatttttcaaaattcagccgggctaattatgttatgccgggtacttatcttctggccactaaacttaataatagtgttattaccagtgatgaaaatatccttttttatatccctgaatatgatccggaaataacagtcccctgtattactcctgaattatttgcacaacttgccatgaaagaagagtggcagaataaagtcagctggacagcacaggataaattgcagtgccttgatatccgtaccattcctgatatgcaggcaacgggtgatattgcggataataaactcaatatccggatccctcaggcctatatggtctacagcgatccgtcatgggatccaccggagcgatgggatgacggtatagccggatttttattcgactataacgccaccgccacgcacagcaaataccagccgggcagtgataacgataaaagcagcaagacggatgtagtcagctacggtgataccggcgttaacctcggtgcatggcgtgtgcgtgcggaatggcaggcgaccggcggcgacagcgcggaacactcaaaacgctggcgctggaaccagatctacgcttaccgggcactccgcgatctcagcgcccgtctgatgttcggtgaacagtatctgacctccgaactgtttgaaagcttccgctacatgggcctgagcatggaaacagatgaaaatatgttcccgccgctgctgcgcggttatgcaccggaagtcgccggggttgcccgcaccaacgccaccgtgatcatccgccagggtgaacgtatcatttatcaggagcaggtcagtaaaggaccgttccgtatccgtgatatgaactacatcggcgacggtacgctgaatgtcactattaaagagcaggatggcagcgaacagcatttcaccatcgaaacatcccgcctgtcgatgctgacccgccccggccagttcctgtttaaactggcggccggtaaaccgctgtcagacgatcacaaaaccgaaggcccggaattcggtacagggagtttctcctggggaatgagcaacaacaccacgctgttcggcggggtactggcggcaacggattaccagaacgtatctgtcgggataggccgggatatcgcaccgttcggggtattttccgcaaaagtctcctactcccgggcaaacatgggtgattttgcagataaacagaataaaaccggcggctcttacagcatcacctattccaaggaattcgatgccattaacagtcagctgaccttcgccggttaccgcttctcagagcgggattacatgaccatgaaccagtttgtcgatctgcgttaccgcggcggtaataccgacaacagcaaagagatgtataacatcatctttaacaaggtgttcccgtctctgcgcatgaacgtctatctgaactacagccatcagacattctggaataaagcgagcatcaataactacagcatgaccctctcccgcaactttgactggggagagaaaaagaacctcagcatgagtatgtcagcctaccggacagaatcggattcaacgaaagataacggcatctacgccagcctctctgttccgctcggtgacaataaaggcatgttcagctacagcggtagttacaataagaactctcacagtaataacgttaactattacaccgatattgataactcgagtaactattcactgtctgccggtgaaggcgacggcaaagtcaacctggccggtttctataccaatgaagggggaaataactacctttcactgagcggaacctatattcaggataacgttcttacggtatccggtcagtcacgcggcggctttaccctgacccgtgaaggtgcggcattccaccgcagcggcaacagtatggcaccgcgcattctggtggataccagcggcacaccggacattgatgtgcgcggtaccggcaaagcggtgcggagcaacgccttcgggaaagcgattatcccgaccgcgacggcctactcacgcggccagctgtctcttgatctcgatgccatgccggataatgccgaagccctgacatccatgcagcaggcaacactgacctccggcgcgatcggttaccggaaatttaatgttgtcgaaggctataaaatcatgggtattattgctatgaatgataatactcatccgccattcggcgcctctgtcatgaatgacaaaaatgcggagatcggcattgtggccgataacggatcggcttatctgaccgggatacaaccgggccagaagctgactgtagcctggaacgggcagacacaatgtactgtccggatcccggaaataaaggatgataacgttcagtttaatatgctgctgccatgccagtaa

SEQ ID NO: 276896 - DNA, 591 bp, Morganella morganii
atgaaacttcagaaagtattactctcagtagttctgggatctttatttgctgcgggtactgctatggcagaagatcctgtgcaaccaccagaagtaaaaagcggtctcggtaccgtgcattttaaaggcttcattaataacgtgccttgctctatcgacagtaaattcctggatcagacagtggatttcggtgaaatcagccgtaacgaactgactaccggcacttaccgtacagatagcaaaacattcaatatcgaactgaaaaactgtgataccaccacgtataaaactgcgcagattcaattcactgcaccaacagttgaactgaaagacggtactgcaacatccaaatatgttggtctgggttcaatccagaatgccggtatcgcactgacagacagcggcggtaaagctatcgaactgggttcacgtttccctgccgaaaaatacaccctgaacggtggccgtgatcaaatcactccgctgaactttgcagcgtatgtgaaaggtaaccagtctgcagttgccggtgaacaggctactaccggccacttcgataccccggttaacttccagattttctatcaataa

SEQ ID NO: 276897 - DNA, 918 bp, Morganella morganii
atggctgaggaattttcggaatattgtcaggaaaacagtcccgcaggtagtatgaatatggaaagggtacgttttttatataaatacacacgagtaattctcaataacaattcctataaaggtaacactatggatatattaaaagatagtaagttgcttttggttagcttatttatcattcttcttgcggaagcgatagggcaaattaaaatcagtctggtgatggtttttccgatgctctactccatgctgatgggtggtattatcagctttccgaaatttaaaatcctcaacgaaaagaacatggcgcatgcgacctctatcatgagtgtggcactggtgatcctgatcgccaagctgagtacttccgtcggggcctcctgggaaaaaatcattcaggccggtggtgcgctggttctgcaggaagtgggccactttatcggtaccatcatgctgggtctgccgctggcgattatgttaggtatgggccgtgaagcggtcggtgccacctattctgtcggccgtgagccgaacatcgccatcatcgaagccaaatacggcttaagttcaccggaaggccgcggtgtcatggcaatgtatatctgcggtacgctgtacggtgctgtctggatggggatcctcgcgagtgtgatcgccggtctggacattctcagtccgcttgccctggcaatgggtgcgggtgtcggcagcggctcgatgctggcggcagcggttgcccctctgctggaactctatcctgaccaggctgcggatattcaggcgttctcgtcttccgcgaacctgatgtcttctgtgttaggtctgtacatctatattttcttctccttaccgtttgcgtcttatctgtacaacaaactgaaaagaaaacgtgcaacggcgtctgcggatactgaataa

SEQ ID NO: 276898 - DNA, 477 bp, Morganella morganii
atgaaaaagatgacagaaatagccataatcctggttctggtggtgttctttaccgcgctcggcgatgcagtcggcgggtcaatgtacggccgtggcgagttcggacaggtgttcagcgatacactgctggcgatgacactgctgggcggtatgtccttcgcggcatacctgatcgcgatgatcccgccgttaggcaaactgccggtgatcttctgggtttccctgatcgccgccggtctgtgttcaccgctgttcccgtatgacaaagaaatgattgccatgaccggtaaagtctctatcgcggttatcagtaccacagtactggccttcgcgggtctttcactgggtaaagatatcgataaattcaaagcgatttcatggcgcattatcccggtgtcactggcggtattctccgggacattcttatttgccgcacttatcggccaactgacgctcacatggagtggcgttatctga

SEQ ID NO: 276899 - DNA, 1326 bp, Morganella morganii
atgacaatgaccaaagaacaactgaaagccaaagtctgcgaagcgattgccgcccgcaagggtgacattaaaaaactggcagagaatatctgggcagagccggagctgggttataaagagacccgcacagcgaagaaggtcgaagcggcatttgattctctgggtgtcagctaccgtaatcagctggcgctcaccggggtcaaagcccgcctgaaaggcggaaaaggcagtaaacgcagtgtcgcggtaatcggtgagctggatgccattatctgtgctgaacaccctgatgcggatgaccagaccggcgcggcacactgctgcggtcacaatgcgcagatcgccaatatgatggcggtcaccatggggctggtggattccggggcgatggaatatctggcgggggacgtggtgcccttcgccgttccggccgaggaatatgtggaactcgcgtaccgcaacaagcttatcgaacagggtaaaatcagttatatcggcggtaagccggagctgatttccctcggtgagtttgatgatgtggatatggcgatgcaaatccacctgaccagcgtcaaaccggagcgtgacaacggatttattgaaatctccaccaccaccaacggctttatcggcaagctgattaattacaaaggcaaaccggcacatgctgcggcggcaccgcatatggggattaacgccctgaatgcggcaatgatgggtatcatgggtgtgaatgctatccgtgaaacctttcaggagaaggattatatccgtttccacccgatcatcacccagggcggtgatctggtgaacgtgaccccgagtgatgtgcgcatggaaagttatgtccgtgcctcaaacgtaccggcgatgatcgatgccaacgagcgtattacccgtgcgctggtggccggtgccatgtctgtcggtgccgaagtggaagtgaaagatttaccgggctatctgccgctgtacaacaatgacgtactgaatgatctgttacagcagaatgcggaaggtctgattggtgatgaaaatgtctgggttgccgagcatatgaccggcagtactgacaccggggatctgtcccacatcatgccggtcagccatccgtggattggttcagtgcgcggcgggttgcacggcaaagattatgtcgtttttgatgacgatatggcctatatccgcccggctcagatgatggcaatgacaattattgatttgctgtttgatgatgccgccggtgcggaagctctgatggcggaatataagccgctgatgagtaaagaagagtacctctcgtttatcagttcctttaagaactga

SEQ ID NO: 276900 - DNA, 477 bp, Morganella morganii
atgaacaatacaatgacatcatccgtaccggatctggtgacagtggcgcctgccacacagaatgattatgcgggctggctgccgcactggctggcctatcaggaattttataaagtcagctttccggaagaagtcacactgaccagctggtcacgtttctttgatgaaaaagagccggtgttctgcgccgtggcgcggatgaacggcaaagtcatagggttcgtgcattatctctatcaccgctccacctgggcggaaaaagagttttgttacctggaagacctgtatgtggatccgtctgtgcgcggtcagtatatcggcaaacagctgattgagtttgtacagcagcaggcgctggcacgtccatgcggccgtctctactggcacacccataaagataatacccgtggccagcgtctgtatgactgggtggcaaataaatccggtgctatcgaatatattatgccgctgaagtaa

SEQ ID NO: 276901 - DNA, 1488 bp, Morganella morganii
atgcgaaaatccggtgcggcagcgtttcccgaattactgaccggtaacgggatcatcaaagatcaggtgtatcacgctctgcgtgaggctatcctcagcggccgcctgcatgcgggaagcaaagtgccgtccggacgggcgctggcggagatgatgggtatctcccgtaactcagtcattgccgggtttgagcggttgcaggatgagggctatctcatcacccggcgcggtgcggggacctttgtggcggataatctgccggatcacgccatcagcggaccggtggcatttccggcggatgaggccggggagcaggtgaccgccaatatcagtccgctggcagaaatattgcagtcacagcgtgttgcatccggtgtgccgtccgatgcactgtttatggtcggcaccggatgtgtggatctgtttccgcatgatgtctgggggcggctgctcggccgtgtctggcgtcagtcccgttatgcgctgcatgcgcacagtgagccgcacggctacccgccgctgcgccgggcaatctgtcattatgtccgggccacccgcggattgcagtgcgatgaggatcagatcctgattgtcaacggcacccagcaggcgattaacctgacggtgcagacgctgttacagcccggggatgaggtctggctggatgatccggggtatgacggtgcgcgcggggcgtttttatcacagcggctgacagtgcgtccggtacgggcggatgaagagggcatggatgtgtatgacggcctgcgccgctggccggacgcgaaactggtgttcaccgcgccgtcacatcagtttccgggcggcggtacactcagtctggcgcggcgatcggcgctgctctcctgggcggcaaagcaccatgtctggatcctcgaggatgattataacggtgagttccgttatgccgatcgtccgcttcaggcattgcaggggctggacaggcatcagcgggtgatttatgcgggaacattttccaaaatgctctatccggccttccggctgggatttctggtcgtgccgaaagcgctgctccctgcctttgaggtgacaaaatattatgccgataccggctgcggctatctggagcaggccacgctgacccggtttattaacgaagggcactatgcacggcatgtgcgccgggtgcgcaaagcctgttatgagcggcggcaggcggtggcggatgacatcagtcagtatctccccgcgctgctgacgattgtcccgagtgactcggggatccacctgttatgcaggatgaaaaacggtgttccggcacagacggtgattcaggcgggacggcagtgcggcatgggcatgcagccgctggcccgttactgccgtccggatgcaccgcaggaaggggtgttgttcgggtttgccgcctatccggcggagaaactcaccgacggcatccgccgcctcgcggaggcgttacaggcacagggcgtggtcacggtttaa

SEQ ID NO: 276902 - DNA, 783 bp, Morganella morganii
atggccattatcacaacactgatcacaggcgccttaaccgggctgattatcagcaccaccggtgtcggcggcggagtgatagtgctgccaatcctgacgtatctctacggcatgaatgccctgatggccgtcgccaccgctaatcttctctccatgctgatgaaggtcgcctcctcctggctgcattataaactcggcaatattccgctccggcgcgccatgattgtgctggggattatgctgcccgccaccttcggcgccagtctgctggtgacatggcttgcctcggtgccggcctggcaggcgatcacagaaaagagtattaatctgctggtcgtggcggcgatcctgttttcactgtggctgtttattcagcggatgtttttcccgcctccgttaccggcggatacggctgaaattcccatgtcagtaagggagttgctgctgccggggatcactgccggtgtggtgctgggggcaacgggtgtcggcggcgggattgtggtgctgccgatgctgctgcgctatgcaaagatggatatccgtcaggctatcggcacctctatttttgtcaccaccctgctctccggctcttccgctattgcctatatgcaggacgggcacacggatgtccgcctcgcgttgtggctgtttgccggttccctgctcagtatgccgctgaccaaaattctgctcacgcggatgccggatcgcgcttttcagtatgccacgctgatccttatcctgtgcagcgccgtgatgatgacactgaatctgttttaa

SEQ ID NO: 276903 - DNA, 993 bp, Morganella morganii
atgaaaaggggcgtatttttatctgtggtgattgcattgctggccggatgtaaggaaaccccgccgcctgcaccggacggatattatgtgattgatgatattactgtcacgtatgataacccggcggataatgcgccggagaacagtgatccggaaaaaaatgtcaaagccgccatccgcgacaccatgatcagcctgaaagactccacattcttctggtttgagccgggcagagtcacggtggataacagcggcaaccgttttgacagtgatattcatggcgatacctttgatctgaataatatacagacgacctggacatcaccggacagcggacaaaccgtctatctgaccacggaaaaagagggcgcgtgcggcttctttaactgcaccctgaaaatgaccctttcccgcgccgatcacacctccgaaaaactggccggaatgaaagcggtgtctgatgtcagagccgcctcctatgaagcttatctggaaacacagcgtcagtattacaaagagaacggcttcccgccggttcccggtgacaccatcagaatgacagaaaatatctcagtcaccctgccggaaacgatggctatcgacctgaaaaagcaggagggcggcgattatgtccgcgatatcggcggccttcatattgaaagcgatgatgataatacggagatttaccgcttccgcgatccgctcagtgatgcggaaggtatcattcatctggtaaaagtcccgaaataccgctggcgttttgatgaatggctgaatcagcagaaaggcattatctatcaggaagagaacggcgcgatctattacaaccgctggggtaagccggaatgcacctatttccgctatgaccagaaagagcggcgctatgtgattattgtggcggaaactgcggatcagatgatgatgcagcagatgtacagtattgcgcgatctgccgggaaaaacccgccacctgaagcgaaaagcaataaataa

SEQ ID NO: 276904 - DNA, 1485 bp, Morganella morganii
atgattaaactgaaagatatagaacaggctctgcgtcctcagccatcctacaaaatgctgattaacggccagtgggtcgaaagcagtgatcacgccaaaagccagacatttaaccccgcaaccggtgaattactggcagattatccggccggtaccgcgcaggatgtcaacaccgcggttgctgccgccaaaaagacctttgaaacctggcgccatacctccccagttgaacgtcagcaactgttactgaaaattgccgaccgcctggaagccgaaaaagagcgcttcgccaccctggaatccctcgataacggtaagccgtataatgaggctatttccatcgatttaccggccgcaattgaccatttccgctactttgcaggggctatccgcgcccattccgaccaggccgatgtgctggatgaaaacaccctgagtctggtgatccgcgagccgctgggcgttgtcggtcagattatcccgtggaacttcccgctgctgatggcagcctggaaactggcgccggtcattgctgccggggataccgtggtgatcaacccggccagcctgaccccgctgaccctgctggaactgggccgcatcctgaatgatgtgctgcctgccggggtgattaatattgtcaccggtcgcggctctgtggtcggccaggcgattcttgaccatccggatgtggataaagtggcgttcaccggctccaccagcgttggttacactgttgctgccgctgccgcgaaaaaactgatcccggcaactctggaactgggtggtaaatcggcgaatatcgtgttcccggatgccaatatggaaaaagccgtcaaatatgcggctatcgcgatcctgatgaaccagggtcaggcctgtgaatccggctcacgcctgttcctgcacaaagatatccacgatgaattcctgaaaaaactgaaagcccgttttgaatctgtcaaagtcggtgatccgatggcgaaagacacccagatgggcagccaggtcagtcagggacagctcgataccatcctcagctatgtggaactggcgaaaaaagagggtgccaccatcctcaccggcggtgaacgcctgaccagtgacgggctggatgccgggttctttatgaagccgacgattatcaccaatgtcaccaaccagatgcgggttgcgcgcgaagaaattttcggaccggtactggtggtgatcccgttcagtgatgaagatgaagttgtcgcgatggcaaatgattccgagtacggactgggtggtgctgtctggacacaggatatcaaccgcgcactgcgtgtggcgaaagcagtcagaaccggccgtatgtgggtgaatacctatcatgagctgcctgcgcatgccccgttcggcggttataaaaactccgggctgggacgggaaacccataaaatgatgctggatgcctataccgaagtgaaaaacatctatatcagcaccaaagagtcataa

SEQ ID NO: 276905 - DNA, 636 bp, Morganella morganii
atgaatctgttcaaccagagtgaatttctggcgcttgcgctcgtccattttttcattgttgtctcgccgggaccggactttgccgtgacgctgcgccagagtatttatcacggacgcaaagccgggctgatgacagcactcggcattggtgccgggatttccgtgcatgtggtgtacacgctggctggtgtcacggcactgatgcaggccacaccgtggctgatggataccgcaaaatacattggtgcggcttatcttatctggctgggcattcagtttctgcgcagcaaaggcgcaagtgccgctatcaccccggagagcccggatacctgcccggcacaaacggccggaaaggcattttggatgggatttctgaccaacgccaccaacccgaaagcgatgctgtttttcctggccatgttcaccacactggtcagcccgtccacgccggtgacggtcaaactgttctacggcgtgtggatgtgcggcgtaaatgcggcctggtttatggccgtctccgttctgttctcacaccagcgtatccgtgagcggttcctcgcacacagccggttgttcgacaatgtcatcggcactgtcctgctgctgtttgccgggcggcttttgctggcgctctga

SEQ ID NO: 276906 - DNA, 633 bp, Morganella morganii
atgacagaaaaatgctatctgaccagccgcgccttacagggtaccgccactgtcctggaatgccgtccggcagagaacgggcgctatgcagttattctcgataaaaccctgtttcatccgcagggcggcggacaaccgggtgacaccggcacgcttggtgatgccactgttattcacaccgcttttatgccggaaggtatcattcattacacagatataccggtcgcccccggtgaagttcagatgaatgtcgatgcagagaaacgtcagttgcactcgcggctgcataccggcggacacctgctctctcatgtgatggaaactttcggctggaaaccgaccaaaggacatcactggccggatgaaggacggatccagtatattcctgccggttccccggtgatcgtggatccggaagatgtccgccgtcactgccaggcgctgatcgacgctgatcacccctgccatcactatcaggatgaggacggtatgtttcagatccggtttgcggattttgagccttactcctgcggcggcacgcatgtgcagtcactcggtgagatcggcacactggtgctgaaatccgtaaaaaccaaaaagggcgttctgtccgttcagtacgacgtcatctga

SEQ ID NO: 276907 - DNA, 912 bp, Morganella morganii
gtgatcacaaatgaaaccctcgcattactcgaggaaatggcggtatttgccaaagtggtggaaaccggcagtttctcggaagcagcccggcaactcggcgcgacaccgtctgcaatcagccgtgcggtctcgcggctggagcgcgcgctgaatacccggttattgcagcgcacaacccgcaagctgcgtctgaatgagagcggcaaggcggtgtatcagcactgtcaggcgctggtcaattctgcgggagcggtgatgagtgccagcgggcagttcagtgaaacaccgtccgggctggtgcgcctgggggcaccgaaagcactgggttactttatggtgcatccgcttatcaatgaattcctcgccatgaattccggtgtgaatgtgatgctgcgcctggaagatcgctatatggatctgattgatgaggagatcgatctcgccatccggattaccaatgaaccgccgccggggcttatcggtaagcggctgtttacggtcagtcatattttatgtgccacgccgcaatatctggcggagcacggtaccccttctcatccgcaggagctgaaggagcacagttgcctgtttctcagtgaggaagcggcagatacccgctggcgttttcagcaggggaataaagtggtgtctgtgaatgtgcacgggcgttattcatcaaaccacagcggggtacgactcggcggggtgaaatcacatctggggatcggcgggctgccggtgtttacggcgcgtaaatcgctggagagcggggagattgtgcaggttctgccggactggatctttaaaacccgttacagcggggatgcctggctgttgtatccgccgtcgcgttatcagccgccgcatatgatggtgtttattgattatctggtgaaaaaactgcggacataa

SEQ ID NO: 276908 - DNA, 543 bp, Morganella morganii
gtgaataaactccgtccctatctgacattaaccccttctgtcggcaaaaacgtcatgatcgatgactcctccgtcattatcggtgatgtgcgtctggctgatgatgtcggtatctggccgctggttgttgcccggggagatgtcaattacattcagattggtcagcgtaccaatattcaggacggttccgtattacatgtcacccaccagacggcagataacccggccggtcacccgctgattatcggtgaggatgttaccgtcggccataaagtgatgctgcacggctgcactatcggtaaccgtgtcctggtcggtatgggttccattctgctggacggagtggtggtggaggatgatgtgattatcggcgcgggcagtctggtctctcccggcaaacgtctggaaagcggctacctgtatctcggcagccctgccaaagccgcccgtccgctgaaaccggaagaatatgaagggctgaaatattcagccaataactatgttatgtggaaaaatgattatctgtcacagggcaaccggtaa

SEQ ID NO: 276909 - DNA, 264 bp, Morganella morganii
atgaaccagtccattcagtttccggaccgcgaatcacgggatgatgaccgggagtgcattgtctttccggtgatgattaacggctttttattggattgccgcgtctctgcacaatacctgcaatcccgttacggaaaggctcccggggaggatatgctggttctcttccgccggaaccgctgggatctggaggaagagtttgcggaattcattgaaaaaggtgaggcggatgagccgccttaccggttgccctgtgacagataa

SEQ ID NO: 276910 - DNA, 819 bp, Morganella morganii
atgaaaaaatttgccgtttttggccatccgattgcacacagccagtcaccttttattcatcaggaatttgccgggcagtttggtattgagctgagttatgaacggatcctctctccgctcgatggctttcgcgacagcgtctctgcattttttgctgcgggcgggctgggggcgaatgttacactgccttttaaagagcaggcgcatgcgctggcggatgagctgagtgaacgggcacaggtctgcggcgcggtaaacaccctgtatctgacagaagataaacggctggcaggggataataccgacggcgaagggctggtgattgatttgcagcggttgatgtttatccgtcccggtgacagtattctgctgattggtgcaggtggcgcggcccgtggtgcattgctgtctctgttgcaggcaggttgcactgttaccgttaccaaccggacattcagcaaagcgcagtctctggctgagcggtttgccggtcacggaaaagtcagtgcaatgccggtcagtgaaaccggaacgaccggattttcactgattattaatgccacatcatccggggtggacggcgcggttccgcagatcccgctgtcattactgaatccgtctgttgcctgttacgatatgttttaccgtaccggtctgacaccttttctgcaacttgccgcagataacggtgtgacccggtatgctgatgggctgggtatgctggctggtcaggcggcttttgcattcaggttatggcatggcgtattgccggatattgcaccggtgctgacaaaactcaaacagaagatgacatcatga

SEQ ID NO: 276911 - DNA, 573 bp, Morganella morganii
atgaatcataatcaaaccacagcaaatttcgacacaattataaaagccctgaataaccacgaagttatcgcatatccgacagaggctgtttttggcctgggttgtgatccggacagtgagcaggccgtgatggcgctgctggatctgaaacagcgtccgtgggaaaaagggctgattctgatcgcagataactatgaccaggtaaaaccttatattgatgactcacggctgacagatgaacagcgtgaagcgatgtttgcctcctggccgggcccggtgacctgggtgatcccggcaaaaccctccacaccaaaatggctgaccggccgttttgactcgctggctgtccgcgtgacagatcatccggtggtcaaagcattatgtctggcatacggtaaaccggtggtctccaccagtgcgaacctgagcgggctggaaccgtgccggacaactgatgaagtaaatgcacagtttaacggacggatcccggtggttgacgggctggtcggcgggcggaaaaacccgtctgagatccgtgatgcactgacagggcagttataccgccagggctga

SEQ ID NO: 276912 - DNA, 546 bp, Morganella morganii
atgtcaaaatcaatggcggaatgctgtccggaatgcggcggagagctggttatccgcaatggtgcccacgggcctttcttcggttgctctgcttatccggaatgtgattacatccgtccgctgaaagccggtactgacggacatatcatcaaagtgctggacggacagttgtgtccgcagtgcggcgggacactggtgctgcgtcagggacgctacggaatgtttatcggctgcggaaatttcccggagtgtgaatatattgcatctattgattcaccggatgaaacaacagtggcctgtccgcagtgtcatgatggtaagttactccagcgtaagtcacggttcggtaaagttttttatgcctgtaaccgctatccggcctgccagttttcactgaacagcaaaccggttgccggtgaatgtcagtattgcggttatccgctgctggtggaaaaaagggcatcaacaggcgtaagattaagttgtgcgagtaaagcctgcgcaaaacgacaaaaagaacaaaatgagaataatgatgaatcataa

SEQ ID NO: 276913 - DNA, 1101 bp, Morganella morganii
atggatgaaagggaaatttggttacgtctggcgtgtatcaggcggttaagtgcacatcatgctgtcagtgctgccactatactgacagagacctgcacacagaaaaacggtgagattcgtcagcagctgcatcagtgcggactcacactggtgcagtgtcagcaatttatgaatgtgaatacatccaggctgaaaacggcacttatatgggctgatttaccgggtaacatgatattacccctgtcatcaccacactatccgtttttattaaagcagatctattcccccccgcttgtgctttttgtggcagggcagtgtgaggcgttatctgccccgcaggtcagtatggtgggcagccgtgcagttacccattacggcgaaaagtgggcgggctgttttacccggcatcttgtgcagcacaatctggtgataaccagtggtctggctgcgggagtggacggatgctgccataaggcggcgctggcatcaggcggaaagacggttgcggtatccggcagcgggttatctcatatttatcccgcaaagcaccggtctctggcagtggagattacagaaaatggcgcacttatctccgaatattttcctgatgtgccgccgctggccaaaaattttccccgccgtaaccggataatcagcgggttaagccgcctgctgattgtgattgaggccggacggcgaagcgggtcattaattacggcacaatgtgcgctggagcagggacgggatgtatttacgttaccggcggtgcttggtaatccggcgtatgagggcaaccactggttgttgcagcagggtgcctatattgcgacagcaccggctgatatcacggatcatctcgcgctggatatgcactggctgccgctgatcccggaagcaccggaagtgatcatcacaccggtacaggaggaactgccgtttgcacatgtgctgattaatgtggatgatgaaccgacaccggcggatattattgccgcgcggtgtgagctgccggtcacggaggtgacaacacaactgctgcagctggagttatcaggtaaaatagccgtggtcagcgggggatacatccgcctgcatcactga

SEQ ID NO: 276914 - DNA, 510 bp, Morganella morganii
atggcgttattaactgtattacattatcccgacgagcggcttcgcaagattgcaaagccggttgaaaaagtcgatgccggcattcaaaagattgtcgatgatatgttcgaaaccatgtacgacgaagaaggtattggtctggcggccactcaggttgatatccaccagcgcattatcgtgattgatgtgtcagaagagcggaatgagcgcctggtgctgatcaacccggaactgctggaaaaatccggagaagccggaatcgaagaaggttgtttatcgattcctgagcagcgggcattcgtaccgcgtgccgagcacgttaaaatccgggcgctggactataacggcgagcctttcgagctggaaaccggcgatctgctggcaatttgtatccagcatgaaatggatcacctggaaggtaaattatttgtcgattacctttccgctatgaaacgccagcgcatccgtcagaaagtcgaaaaactggacagactcagagcccggtcttaa

SEQ ID NO: 276915 - DNA, 945 bp, Morganella morganii
gtgtcagattcattacgtattatctttgcaggaacgcctgattttgccgcacgtcacctcgatgccctgattcagtcagagcacaatgtcgttggcgtcttaaccatgccggatcgccctgccggccgcgggaaaaaaatcaccgcaggcccggtaaaagaactggcacagcagcacgatattcctgttttccagccctccacgctgcgcaaagaagaaaatcaccagtggatacgtgaccaacaggcggacattatgattgtcgtagcctacgggatgattttgccgcaggcagtgctggatattccgcgtcttggatgcctgaatgttcacggttccctgttaccggcatggcgtggtgcggctcctatccagcgtgcattgtgggccggtgataccaaaaccggtgtgaccatcatgcagatggatgccggtctggataccggcgatatgctgtataaagctgagtgtgatatcacatcagaagataccagtgcgtcactgtatgaaaaactcgccggtatcggcccgcaggcactgttatatacactgtctctggtgtgtcagaatgcactccgccctgaaaaacaggatgacaccctggttacctatgcagaaaaactgagcaaagaagaagcccggctggactggtctctttctgccgcacagttagagcgttgtatccgtgccttcaatccgtggccaatcagttatatggtgattgatgagcaacctgtgaaagtctggcaggcccatgcgattgcggaacagacttccgcagcgccgggaacggttatccgtgcggataaaaatggcattcaggttgccactgcagaagggatcctgaatatcacacagttacagcctgccgggaaaaaaccgatgtcagccgctgatattctgaattcccgcaaagaatggtttaccccgggaaattcactgtaa

SEQ ID NO: 276916 - DNA, 1293 bp, Morganella morganii
atgaaaaacagctataacttacgcagcattgctgcccgtatcatcagccaggtcctggatcagggacagtcactcagcgcacttctgcctgaatatcagcgggatatcaacccgaaagataaagcattgctgcaggaattatgttttggtgtgatgcgggtgctgccggagcttgaatggtacagccagcaactgatggcaaaaccgctgaccggtaagcagcgggtactgcattatctgattctggtcggtttttatcagctccgttatacacggatcccggcacacgccgcactatccgaaacggttgacggtgctgtggcactgaaaaaaccacagctgaaaggactgattaacggggtgctgcgtcagttccagcgtcaggagcaggtgctgtccgaacgctttgccaataatgaaagccgctggctgcatccgaagtggctgttatcccgtattcaggcggcatatcctgaaaactgggaagccgttattacggcaaataatgaaaaaccgccgatgtggctccgggttaaccgtaaccatcactccgctcaggaatatcaggcgctgctggcagaaaaaaatattgaagccttttataatccggcctatccggatgctttgcgtctggcagctccctgcccggtcactgatctgccggggtttgccgatggctgggtcaccgtgcaggacagctccgcacagggctgtgcattactgcttgatccgaagaatgatgaggctattttagatttgtgcgcggcacccggcggaaagaccacccacattttagagatagctcccagcgctcatgtcatggctgttgatgtggataaacaacgcttaacccgtgtcaatgagaatttacaacggcttaaacaaaacgcggtggtgaaaaccggtgacggtcgttatccggagcaatgggcagaatcacagacatttgatcgcattttgctggatgcaccttgctccgcgaccggcgttatccgccgccatccggacattaaatggttgcgccgtgataatgacattaatgagctggctgcactgcaacgggaaattctggacgctgtctggccttatctcaaacccggcggcacactggtctatgcaacctgctcggtattaccggaagagaatattcatcagataaataatttcatctcttcgcatcgtgatgctgtattaaccgatacaccggcaacaggctaccagatgctgccggatgcgcagagcggagacggatttttttacgctaaactggttaaacaggcacttcctgcctga

SEQ ID NO: 276917 - DNA, 1377 bp, Morganella morganii
atgaaaattattattctcggtgccggtcaggtcggcggcacactggcagaaaacttagtggatgaaaacaacgatattactgttgtggataccaacccggacaggctgcgtcagttacaggataaattcgatctccgggtaataaacggtgccggctctcatccgcgggtactgcgggaagcgggcgcggaagacgcggatatgctcgtcgcagtgaccaactccgatgaaaccaatatgatcgcctgtcaggttgcatacacgctgttcaatacgccaaataagatcgcccgtatcagatcttctgaatatgtccgggaagctgataaattatttttaccggaagcgatcccgatcgatcacctgatcgcccccgagcagttagtgatcgacagtatctataagcttattcagtaccccggtgctctccaggttgtgaattttgccgaaggacgcgtcagtattgtcgccgtgaaagcctattacggcggctcgctggtcggaaacgccctttccagcctgcgcgagcatatgccgcatattgaaacccgggttgtggctatcttccgccaggacagaccgattcgtccgcagggttcaaccatcatcgaagccggtgatgaagtattctttgttgccgcatccgagcatatccgtgcagtaatgagtgaattacagcggctggaaaaaccgtataagcggatcatgattgtcggcggcgggaacgtcggtgccggtctggcactgcgtatcgagaaagactataacgtcaaactgatcgaacataacgccaaccgggcaaccgacctcgcggaactgctgcatgacactattgttttttatggagatgcatctgaccaggaattattagcagaagaacatattgagcaggttgatgtctttattgccctgaccaacgatgacgaagccaatattatgtccgcgatgctcgccaagcgcatgggggccaaaaaagcaatggtgcttatccagcgcagtgcctatgtggatctggttcagggtggtgtgattgatatcgctatctccccgcagcaggctaccatttctgcattactcggccatgtgcgtaaagctgatattgtcagcgtatcgtcattacgccgcggtgttgctgaggcgattgaggctatcgcacatggcgatgaaaatacgtcaaaagtcgtcggacgcaaaattgccgatattaagctcccgccgggcacaattattggggcgattgtcagagatgagcaggttattattgcgaatgacgagcacagtattgaacagggagaccatgtcgtactgttcattactgacaagcgccacgtacccgaggtggagaagctcttccagccaagtccgttcttcttataa

SEQ ID NO: 276918 - DNA, 408 bp, Morganella morganii
atgagcttcataaaagagtttcgtgaatttgcgatgcgcggcaatgtcgttgatatggctgtcggtatcattatcggtgcggcattcggcaaaattgtgtcctcattagttgctgatgtcatcatgccaccactcggtttactgatcggcgggatcgacttcaagcaatttgccgttgtgttgcgggaagccagcggaaatgtgcctgctgttgtactgaattatggtgtattcctgcaaaccgtctttgatttcgttatcgttgcgtttgctatcttcattgccatcaaaatgctgaataaattacgccgcgaacaggctgaagcacctgctgagccgccggcaccgtcagccgaagaaacattactgactgaaatccgtgatttattaaaagaacaaaagaaataa

SEQ ID NO: 276919 - DNA, 201 bp, Morganella morganii
atgacaaaatatgctcacaagcgtggcgtaatacaagataacgccctggaagcactgctatccgatccgctgttccggcagagagtagaaaaaaataagaaaggtaaagggagttacaaccggaaagaaaaacacaacaaggcagattaccgggaggccagtagtaaacgattagataatcttttactactggctttttag

SEQ ID NO: 276920 - DNA, 450 bp, Morganella morganii
atgtaccgaattggtcagttagcaaaacttgcagaagtgacaccggatacgatccgtttttatgaaaaacagggcatgatggatcatcagacccgaacggatggcggctatcgtttgtatactgagcaggatctgcaccggctgcgttttatccggtatgcaaaacaattagggtttacactggaagcgatcacggaactgttatcgatccgggttgatcctgaacatcacacctgccgtgaatcaaagcaaattgtggatgatcggctgaaagatgtggaaacgaagttagtcgaaatgcagcgaatgcgggattctctgaagatgctgagtgatgcctgttgcggaacggcacatgtcagttcacaatgcaccattctggagatcctggaacaaggtgcgacagagccctgtggctgttcacaaaaagagagtaaacataatcaatga

SEQ ID NO: 276921 - DNA, 387 bp, Morganella morganii
atgcgccatcgtatgagtggtcgtcaattgaaccgcaacagcagccatcgccaagctatgtttcgtaacatggccggttctttagttcgtcacgaaattatcaagacgactttgcctaaggcaaaagaactgcgtcgcgttgttgagccgttgattaccctggctaaaacggatagcgttgctaaccgtcgtttagcattcgcccgtactcgtgataacgaaatcgtggcaaaactgttcaacgagctgggaccacgtttcgctcagcgtgcaggtggttacacccgcattctgaaatgtggtttccgtgctggtgacaatgccccaatggcttacattgagcttgttgaccgcgctgaatcccagactgaagcagcagcagagtaa

SEQ ID NO: 276922 - DNA, 990 bp, Morganella morganii
atgcagggttctgtgacagagtttcttaaaccgcgcctggttgatatcgagcaaatcagttcgacgcacgccaaggtgacccttgaaccattagagcgtggctttggccatactctgggtaacgcactgcgccgtattctgctttcgtctatgccgggttgtgcggtaactgaggttgagattgatggtgtactccatgagtacagcactaaagaaggtgtacaggaagatatcctggaaattctgctcaacctgaaagggctggcggtaaaacttcagggaaaagatgaagtcatcttaactctgaataaatctggcattggccctgtgactgcagccgacatcatccatgacggtgatgttgaaatcgtcaagccggagcatgtaatttgccatctcactgacgaaggcgcatctattaatatgcgcatcaaagttcagcgtggtcgtggttatgttccagcttctgcccgaattcattcggaagaagatgagcgcccaatcggtcgtctgttagtagacgcgtgctacagcccagttgagcgtattgcttacaatgttgaagcagcacgtgttgagcagcgtaccgacttggataaattggttatcgaaatggaaaccaacggcacgattgatccagaagaatcaattcgtcgtgcggcaaccattctggccgaacaactggaagctttcgttgacttacgtgatgttcgtcagccggaagtgaaagaagaaaaaccagaattcgatccgattttactgcgcccagtagacgatctcgaattgactgtccgctctgctaactgtctcaaggcagaagcaatccactacatcggtgatctggtacagcgtacagaagttgagttgctcaaaacccctaacctcggtaagaaatctcttactgaaattaaggacgttctggcatctcgcggcttatctctgggcatgcgtctggaaaattggccgccggcaagtattgctgacgaataa

SEQ ID NO: 276923 - DNA, 621 bp, Morganella morganii
atggctagatatttgggtccgaagctcaagctgagccgtcgcgaaggaacagacctcttcctgaagtctggtgttcgcgcgattgacaccaagtgtaaattagatcaagcaccaggccagcacggcgcccgtaaaccgcgtctgtctgattatggtgttcagttacgtgaaaaacaaaaagttcgtcgtatgtacggcgtgctggaacgtcagttccgtaactactataaagaagcaactcgtctgaaaggcaacacaggtgaaaacctgctgtctctgctggaaggccgtttagacaacgttatttatcgtatgggctttggcgctacccgcgcagaagcacgtcagatcgtcagccacaaagctgtcatggtaaatggccgtgttgtaaacattgcttcttatcaggtttcccctaacgacgtaatcagcattcgtgaaaaagcgaaaaaacagtctcgtattaaggctgctttagagctggctgagcagcgtgaaaaaccaacttggttggaagttgatgctgcgaaaatggaaggtgtgttcaaacgtattcctgagcgtactgacctttctgctgatattaacgagcacctgatcgtcgagctttactctaagtaa

SEQ ID NO: 276924 - DNA, 390 bp, Morganella morganii
atggcaaaagcacctgttcgtgcacgtaagcgtgtaagaaaacaagtctctgacggtgtggctcatatccatgcttctttcaacaacacaatcgttaccattactgaccgtcagggtaacgcattaggttgggcaactgccggtggttccggtttccgtggttctcgtaaatcaactccattcgcagcacaggttgcagcagaacgttgcgcagaggctgtgaaagagtacggtattaagaatctggaagttatggttaaaggacctggtcctggccgtgagtcaaccgttcgcgcattaaacgcggctggtttccgcatcactaacattactgatgtgactccgatccctcataacggttgtcgtcctccgaaaaaacgtcgcgtctaa

SEQ ID NO: 276925 - DNA, 357 bp, Morganella morganii
gtggcccgtatagcaggcattaacattcctgatcataaacatgctgttattgcattaactgcaattttcggcatcggcttaacccgttcacaggctatctgtaaagcaacgggtattgctgaagatgttaagatcagtgagctgtctgaagagcaaatcgaccaactgcgtgacgaagttgctaaatacgttgtagaaggtgacctgcgccgtgaagtgaccctcagcatcaaacgtcttatggacattggttgctatcgtggtttacgccatcgtcgtggtcttccggtacgcggtcagcgtacgaagactaacgcacgtacccgtaagggtccgcgtaagccgatcaagaaataa

SEQ ID NO: 276926 - DNA, 1332 bp, Morganella morganii
atggcaaagcaaccaggtacagatttccaaagtgctaaaggcggaataggtgagttaaagcgtcgtttactgtttgtgctcggcgcactgattgttttccgtattggctctttcattcctatccctggtattgatgccactgttcttgcgaaattgctcgaacaacaacaaggcaccatcattgagatgtttaacatgttctctggtggtgcgttgagtcgtgcttcaatctttgcgctgggtatcatgccgtacatttcggcatcgattattatccagctgctgagcgtggtgaatccgcgcctggcggagattaagaaagaaggggaagctggtcgtcgtaagattagccagtacacccggtatagtacgttagtcctcgcggtgttccagtctgttggtatcgcgatgggcttaccgaatatgcctggtatgcagggcctggttattaaccccggctttgcattctacttcacggctgttgtgagtttggtgacagggactatgttcctgatgtggctgggtgagcagattactgaacgtggtatcggtaacggtatttcgatcattatcttcgccggtattgttgcgggtcttccgtcagcaattggccataccattgagcaagctcgtcaaggcgaactgcacttcctcctgttgctattggttgcagtcttggtatttgcggttacttgctttgttgtctttatggagcgtggtcagcgtcgtatcgtcgttaactatgccaaacgtcagcaaggccgccgtgtttacgcggcacaaagtacacacttaccgttgaaagtgaatatggcgggtgtaattcctgcgattttcgcttccagtattatcctgttccctggtacaattgcatcttggttcggtgatggtactggctgggattggctgacgacaatttctatgtatctgcagccaggccagccgctctatgtgttactttatgcctctgcaatcatattcttctgtttcttctataccgcactggtatttaatccaagagaaacagcagataacctgaagaagtccggtgcatttgtaccaggaattcgtccgggagagcaaacggccaagtacatcgataaagtaatgactcgtttaactttagttggcgcgttatatattacctttatctgcctaatcccggagttcatgcgtgacgcaatgaaagtacctttctactttggtggtacttccctcttaatcgtggttgtggtcatcatggactttatggctcaagtgcaaactctgatgatgtcaagtcagtacgagtctgcattgaaaaaagcaaacctcaaaggttataaccgttaa

SEQ ID NO: 276927 - DNA, 435 bp, Morganella morganii
atgcaattaaatactctgtctccggcagcaggtgctaaacacgcaccaaaacgtgtaggtcgtggtattggttccggtctcggtaaaactgcaggtcgtggtcacaaaggtcagagctctcgttctggcggtggcgtacgtcgtgggtttgaaggtggccagatgcctttatatcgtcgtctgccaaaattcggctttacttcacgtaaagcgatggtcactgctgagatccgtttatctgatcttcagctgatcgaaggcgatgttatcgatcttaatgtattgaaagccgcaaacgttattggtccacagattgagtacgcgaaagtgttcctgtctggtgaactgactcgtgcagttactgtacgcggcctgcgtgttactaaaggcgctcgtgctgttatcgaagctgctggcggtaaaatcgaggaataa

SEQ ID NO: 276928 - DNA, 180 bp, Morganella morganii
atggctaagacaattaaaattacacaaacccgcagctcaatcggccgtctgccaaaacataaggcaactctggtcggtttaggtctgcgtcatattggccacactgtagaacgcgaagatacaccagcggtccgtggtatggttaatcgtatttcctatatggttaaagttgaggagtaa

SEQ ID NO: 276929 - DNA, 501 bp, Morganella morganii
atggcacacatcgaaaaacaggctggcgaactgcaggaaaagctaatcgcggtaaaccgcgtatctaaaaccgttaaaggtggtcgtatctttagcttcaccgcactgactgtagtgggtgatggcaacggccgcgttggttttggttacggcaaagcacgcgaagttccggcagcaatccagaaagcgatggaaaaagcccgtcgcaacatgaaaaccgttgcacttaacaacggcacattattccacccagtgaaaggcacacacaccggttcccgcgtgtttatgcagcctgctcacgaaggtaccggtattattgccggtggtgcaatgcgtgctgttcttgaagttgccggtgttcgtaacgtcctggctaaaacttatggttccacgaacccaattaacgttgttcgtgcaacactggatgctttagacagcatgaagtctccggaaatggttgcagctaagcgtggtaaatccgtcgaagaaattctggggtaa

SEQ ID NO: 276930 - DNA, 354 bp, Morganella morganii
atggataagaaagcagctcgtatccgtcgtgcgacccgcgcacgccgcaagcttatggaactgggtgcaacccgcctggtggtacatcgtacccctcgccatatctatgcgcaggttattgcaccaaacggttctgaaacgttggtggccgcttctactgttgaaaaagctatcagcgaacaagttaaatacaccggaaacaaagatgccgcaatcgcagtaggtaaagctattgctgagcgcgcactggaaaaaggaatcaaagcagtatcctttgaccgttcaggtttccaatatcatggtcgagtccaggcactggcagatgctgcccgtgaagctggcctacagttctaa

SEQ ID NO: 276931 - DNA, 534 bp, Morganella morganii
atgtctcgtgtggcaaaagcacccgtcgtcattcctgccggcgtagaggtaaaactcaacggtcaggttatttcgattaagggtaaaaacggcgagctgagccgtaatatccacaacgctgtagaagttaaacatgcagacaaccagttaacctttggtccgcgtgacggttataccgacgcatgggcacaggctggtacaactcgtgcactggttaacgctatggttgttggtgttaccgaaggcttctctaagaagctgcaactggtaggtgttggttatcgtgcagccgttaaaggtgatgtggtaaacctgtctgtaggtttctctcacccggtagagcacaaactgccggctggcgttactgctgaatgtccgacccaaactgaaatcgtactgaaaggtgctgataagcaggttattggtcagatcgcagcagacttacgcgcctatcgtcgccctgaaccttacaaaggtaaaggtattcgctacgccgacgaagtcgtgcgtattaaagaggctaagaagaagtaa

SEQ ID NO: 276932 - DNA, 393 bp, Morganella morganii
atgagcatgcaagatcccatcgcggatatgctgacccgtatccgtaacggtcaggccgcgaacaaagttgcggtcaccatgccttcctccaagctgaaagtggcaattgccaacgtgctgaaggaagaaggttatattgaagattttaaaatcgaaggcgacatcaagccagaactggaactgactcttaagtatttccagggtaaggctgttgtagaaagcatccagcgcgtaagccgcccaagtctgcgtatttataagcgcaaagacgaactgccacaagttatggcaggtctgggtatcgcagttgtttctacatctaaaggtgtaatgactgatcgtgcagctcgccaggctggtcttggtggcgagattctctgctacgtagcataa

SEQ ID NO: 276933 - DNA, 306 bp, Morganella morganii
atggctaagaaatctatgaaagcacgtgatgtaaaacgtgcaaaattagctgagaaattcttcgcaaaacgcgcagaactgaaagctaccatctccgatgtcaacgcatcagatgacgatcgttgggatgctgttctgaagcttcaatctctgccacgtgattccagtccttcccgtcagcgtaaccgttgccgccaaaccgggcgtccacacggttttctgcggaagtttggcttaagccgtattaaagtccgtgaagccgctatgcgcggtgaaatcccgggccttaagaaagctagctggtaa

SEQ ID NO: 276934 - DNA, 540 bp, Morganella morganii
atggcgaaactgcatgattactacaaagacgaagtagttaaacaactgatgactcagtttaactacaattctgtcatgcaagtccctcgggtcgagaagatcaccctgaatatgggtgttggtgaagcaattgctgataaaaaactgctggataatgcagcagctgacttagcagcaatctctggtcagaaaccattgatcaccaaagcacgcaaatctgttgcaggcttcaaaatccgccagggctatccaatcggctgtaaagtaactctgcgtggcgaacgcatgtgggagttctttgagcgactgatttctattgctgtaccacgtattcgtgacttccgtggcttgtccgctaagtctttcgatggtcgcggtaactacagcatgggcgtacgtgaacaaatcatcttccctgaaatcgattacgataaagtggatcgtgttcgtggtcttgatattactatcactaccaccgcgaaatctgatgatgaaggtcgcgcactgttatcagcgtttaacttcccgtttcgcaagtaa

SEQ ID NO: 276935 - DNA, 315 bp, Morganella morganii
atggcagcgaaaatccgtcgtgatgacgaaattatcgtgctgaccggcaaagataaaggtaagcgcggtaaagtaaaacaggttctttcttctggtaaagttatcgttgaaggtatcaatctggttaagaaacatcagaagccggttccggccctgaaccaaccaggtggcatcgttgaaaaagaagctgcaattcaggtttctaacgttgcaatcttcaatgcggcaaccggcaaggctgaccgtgtaggttttagattcgaagacggcaaaaaagtccgtttcttcaagtctaacagcgaaactatcaagtaa

SEQ ID NO: 276936 - DNA, 372 bp, Morganella morganii
atgatccaagaacagactatgctgaacgtggccgataactccggtgcacgtcgcgtaatgtgtatcaaggttctaggtggctcgcaccgtcgctacgcagctgtaggcgacattatcaaaattaccatcaaggaagcaattccgcgcggtaaagtaaaaaaaggtgatgttctgaaggcagtagtggtgcgcaccaagaagggtgtacgtcgccctgacggttctgtcattcgcttcgatagcaacgcttgtgtattgttaaacaataacagcgagcaagttatcggtacgcgtatttttgggccggtaactcgtgaacttcgtaacgagaagtttatgaaaattatctcactggcacctgaagtactctaa

SEQ ID NO: 276937 - DNA, 255 bp, Morganella morganii
atgaccgataaaatccgtactctgcaaggtcgtgttgttagtgacaaaatggagaaatccattgttgtgactatcgagcgtatggtgaaacaccctctgtatggtaagttcatccgtcgtacgactaaactgcacgtacatgacgagaacaatgaatgtggtatcggtgacgtggtagaaatccgcgaaacccgtccactgtctaagactaagtcctggaccctggttcgcgtcgtagagaaagctgtactgtaa

SEQ ID NO: 276938 - DNA, 192 bp, Morganella morganii
atgaaagcgaaagagctgcgcgaaaaaagcgttgaagagctgaacactgagctgctgaacctgctgcgcgaacaatttaacctgcgtatgcaagcggcaagcggccagttacaacagtctcatctgttaaaacaagtgcgtcgtaatattgcacgtgttaagactttattgactgagaaggcgggtgcgtaa

SEQ ID NO: 276939 - DNA, 411 bp, Morganella morganii
atgttacaaccaaagcgtacaaaattccgtaaagtgcacaaaggccgtaaccgcggtctggcagccggcgcggatgtgagcttcggcacttatggtctgaaagctgttggccgtggtcgtctgactgcacgtcagatcgaagcagcacgtcgtgctatgacccgtgcagttaagcgtcagggtaaaatctggatccgtgtgttcccggacaaacctatcactgaaaagcctcttgaagtgcgtatgggtaaaggtaaaggtaacgtggagtattgggttgccttaatccagccgggtaaagtcctgtatgaaatggacggcgtatcggaagagcttgctcgtgaagcattcaagctggcagcagctaaactgcctatcaaaaccacctttgtaactaagacggtgatgtaa

SEQ ID NO: 276940 - DNA, 702 bp, Morganella morganii
atgggtcagaaagtaaatccaaatggtattcgcctgggtattgttaaaccttggaactctacctggtttgcgaacaccaaagaattcgctgacaacctggacagcgactttaaagtacgtaagtacttaactaaagaactggaaaaagcgtcagtatcacgcatcgttatcgagcgtcctgctaagagcatccgtgtgactattcacactgcacgccctggcatcgtgatcggtaagaaaggtgaagacgttgaaaaactgcgcaaaagcgtttcagatatcgctggcgttcctgcgcagatcaatattgccgaagtacgtaaacctgaactggacgcaaaattagttgctgacagcatcacttcacagctggaacgtcgtgttatgttccgtcgtgctatgaagcgtgcggtacagaatgctatgcgtttaggcgctaaaggtatcaaagtcgaagtcagcggccgtttaggcggtgctgaaatcgcacgtactgagtggtatcgcgaaggccgtgtgcctctgcataccctgcgtgcagacatcgattataacacctctgaagctcagactacttatggtgttatcggtgttaaagtgtggatcttcaaaggtgagattctgggtggcatggctgcagttgaacaggcggaaaaaccggctgctcaacctaaaaaacagcagcgtaaaggccgtaagtaa

SEQ ID NO: 276941 - DNA, 333 bp, Morganella morganii
atggaaactattgctatgcatcgccacgctcgttcttctgctcagaaggttcgcctggtggctgacctgatccgcggtaagaaagtgtcgcaagctctggaaattttaacctttaccaacaagaaagctgctggtttagtgaagaaagtcctggagtctgctattgctaacgcagaacacaacgatggcgctgacatcgatgatctgaaagtagcgaaaattttcgttgacgacggcccaaccatgaagcgtatcatgcctcgtgctaaaggtcgtgcagatcgtattcttaagcgcaccagccacatcactgtggttgtgtccgatcgctga

SEQ ID NO: 276942 - DNA, 279 bp, Morganella morganii
atgccacgttctctcaagaaaggtccttttattgacctgcacttgctgaagaaggtagagaaagcggtggaaagcggtgacaaaaagcctgttaagacttggtcccgtcgttcaacgatctttcctaacatgatcggtttgaccatcgctgtccataatggtcgtcagcatgttccggtttacgttaccgacgaaatggttggtcacaaactgggtgaattcgcgccgacccgtacttatcgcggccatgcggctgataaaaaagccaaaaagaaataa

SEQ ID NO: 276943 - DNA, 825 bp, Morganella morganii
atggcaattgttaaatgtaaacctacgtctccgggccgtcgccacgtcgttaaagtggttaaccctgagcttcacaagggcaaaccttacgcaccactgcttgagaaaaacaacaagtctggtggtcgtaacaacaatggccgtatcactacccgtcatattggtggtggtcacaagcaaaattaccgtattgttgactttaaacgtaacaaagacggtatcccggctgttgtagaacgtctggaatatgatccaaaccgttcagcaaatattgctctggtattatacaaagacggtgaacgccgttacatcctggctcctaaaggcctgaaagctggtgatcaaatccagtctggtgttgatgctgcaatcaaagcgggtaacgctctgccaatgcgcaacatcccggttggttctactgttcataacgtagaaatgaaaccaggtaaaggcggccagctggcacgttctgccggtacttacgttcagatcgttgcgcgcgatggtgcttatgtcactattcgtctgcgttccggtgaaatgcgtaaagttccttcagactgccgcgcgactttaggtgaagtgggtaacgctgaacacatgctgcgcgttctgggtaaagctggtgcaagccgctggcgtggtattcgccctaccgttcgcggtactgcgatgaacccggtagaccacccacatggtggtggtgaaggtcgtaactttggtaaacaccctgtaacaccatggggcgttcagaccaaaggtaagaagactcgtaaaaacaaacgcactgaacacttcatcgttcatcgtcgtactaagaaataa

SEQ ID NO: 276944 - DNA, 303 bp, Morganella morganii
atgatccgtgaagaacgtctgctgaaagtactgcgcgcgccgcatgtatctgaaaaagcgtctaccgcgatggaaaaaacaaataccatcgtgctcaaagttgctaaagacgcgactaaagctgaaatcaaagctgcagttgaaaaactgttcgaagtcaaagttgaaggtgttaacactctgctggttaaaggcaaagtgaagcgccacggtcagcgtttcggtcgtcgtagcgactggaaaaaagcttacgtcaccctgcaggaaggccagaatctggacttcgtcggcggcgctgagtaa

SEQ ID NO: 276945 - DNA, 606 bp, Morganella morganii
atggaattggtaatgaaagacgcgcaaagcgcgctgactgtttccgaaactaccttcgggcgtgatttcaatgaagcgcttgtccatcaagtagttgttgcgtatgcagctggtgctcgtcaaggtacacgtgctcagaaaactcgtgctgaagttactgggtctggtaaaaaaccatggcgtcaaaaaggtactggtcgtgcccgctctggttcagttaagagcccaatctggcgctctggtggtatcactttcgcagcgaaaccacaggaccacagtcaaaaagttaacaaaaagatgtaccgcggcgcgctgaaaagcatcctgtccgaactggtacgtcaggatcgtctgatcattgtcgaaaaatttgctgtagaagcacctaaaaccaagctgctggtacagaaattgaaagatatggctctggaagacgtgatgatcgtcacacacgaagttgatgagaacctgttcttagcagctcgcaacctgtacaaggttgatgtgcgtgatgtcactgcaatcgatccggtcagtctgatcgcgttcggtaaagtagtgatgactgctgaagcagttaagcaagttgaggagatgctggcatga

SEQ ID NO: 276946 - DNA, 630 bp, Morganella morganii
atgattggtttagtcggtaaaaaagtgggtatgacccgcatcttcactgaagaaggtgtgtcaatccctgttactgttatcgaaatcgaaaataaccgcgttactcaggttaaatctgacgaaactgacggttatcgtgctattcaggttaccaccggcagcaaaaaagctaaccgcgtgaacaaacctgaagcaggacatttcgcaaaagctggtgttgaagctggtcgcctgttacgtgaattccgcctgtcagaaggtgaagagttcactgttggccagaacatcagcgttgaaattttcgctgacgttaagaaagttgacgttactggtacatctaaaggtaagggcttcgccggtactgtaaagcgctggaacttccgtactcaggatgctactcatggtaactccttgtctcaccgtgttccgggttctattggtcagaaccagactccgggtaaggtatttaaaggcaagaaaatggcaggtcagctgggtaacgaacgtgtaaccgttcagagcctggatgtcgttcgcgttgacgctgagcgtaacctgctgctggtaaaaggtgctgtcccgggtgcaaccggtagcaacctgattgttaaaccagctgtcaaggcttaa

SEQ ID NO: 276947 - DNA, 312 bp, Morganella morganii
atgcagaaccaaagaatccgtatccgccttaaagcttttgatcatcgtctgatcgatcaatcaactgcggaaatcgtagagactgctaagcgcactggtgcgcaagttcgtggtcctatcccgctgccgacccgtaaagagcgttttaccgttctgatctctccgcacgtcaacaaagatgcgcgcgatcagtacgaaattcgcactcacaaacgtctggttgacatcgttgagccaactgaaaaaaccgttgatgctctgatgcgtctggatctggctgccggcgttgacgtgcagatcagcctgggttaa

SEQ ID NO: 276948 - DNA, 483 bp, Morganella morganii
atgaaaggcgataaaaaaatgatctcgcatctgaacaaattgctgggaaatgaactggttgctattaaccagtattttctgcatgcccgcatgttcaaaaactggggtctgattaaactcaacaacaaagaatatgaagaatccattgatgagatgaaacacgctgatgaatacattgagcgtatcttatttctggaagggatcccgaaccttcaggatctcggtaaacttcatatcggcgaagatgttgaagaaatgctgaagtctgatcttcagctggaactggatggcgccaaagatttacgtgaagccattgcctatgccgattccaaacatgattatgtcagccgtgatttgatgataaaaatactggcggaagaggagtctcatatcgactggctggaaacccagctggatctgatagcccgtgtgggtctgcagaactatcagcaggcacagatggcggacgcagacacagaataa

SEQ ID NO: 276949 - DNA, 192 bp, Morganella morganii
atgtacgtatgtttgtgtaatgccatcagtgataaagccatccggaatgccgtgcgccagaataaggttcattccatcggtgaactgcgtaaaattatccctgtcggtactgaatgcggcaaatgtatccgccacgccaaagccgttattgcagaagagcatatgtctgtcccggttgaccgcgtcgcctga

SEQ ID NO: 276950 - DNA, 969 bp, Morganella morganii
atgaaaaataaaataattgccatggcattggttgtgttgtcgggcaatgcgtatgcacattatgtggtcgaaaatgtaaaaacgaccaccaggatattttcatttgaactggttcataaatatctggccagtcatgagtttcatcaaaatacatgcagaagcacttatacaaataacaagctggaatcctgtgtgctgaattataaagtgacatccggcggtaatagtaaagtaattaaaaccggctttgttgatttgcggggagacggcagttttgatcaggaactgatgagtgcgacatctcattataatgcattacgggtggcagaggctcatggtgttgatttaacgcagcttgttgagattccgcgtgaagatattacgtcactgaccggcggcaacaacagatatacagtcgatacgtcatcggcggggcgcgtttgcaatgcagattcgccgtcaacctgtaaagattatgcagagtcaggttataccaataacacattagattttacgacgatgaaagatttgcaggttgcctgcgaatttaccagcaaagacatatcggttaaaacgtcattatctgaggataatctgtatttgtatgatggtgcagccaatcagaaaatactgccttataactatgatgtggataatgtgtcggttgactgtgttaactggctttcaaccgcaatatcaaaagatgtcacgctgaagtatgaggttctggataaaacagcggctgatggcgacactcagctgacctgtaaattattcggtaataatgccggaacaacatcaccgtcatcatcaacgaataagatgactattcagggattctcgacgaaggacgagaattttaaaattccggaagcatttctgggattttatgtctcatcaccttcaggaagtgcgcaaacatcggtttcatttgactgcaacttcccgttatcaacagagattaaataa

SEQ ID NO: 276951 - DNA, 5643 bp, Morganella morganii
atgcgcgattacgacgaacgcccggcaaacgggtttgatatccgcgcagaaggctatctgcctgattatccgcagttaggtgcatttgcaaaatatgaacagtacttcggcgacggcgtcagcctggccagtaccacctcttccggtgaactgaaaagtaacccgtcggtctccaccatcggcctcagttacaccccgttcccgctgatcacgttcaaaggtcagacatcccgtggtgattccaatgacagccaggtcggtatggagctttcctaccgtttcggcgtgccgttatcacaacagctggataccgataatgttgacctgatgcgtaacctggcaggtaaccgttacgatttcgtcgacagaaactacaacattgtaatgcagtaccgtaagcaggaactgctgcggattgccctgccgccgacactgcgcgctgaagcagcacagacagtgccggtaacggtcagtgtgctgaaagccaaatacggcctgaaatctctgcgctggtcagcgcctgaactgctggcaaacggcggtgagatcaaacagaccgggctgaccacggcggatattacgctgccggcttatatctttgctaaccgcagcggcgaaccacagggctaccgcgtgacagccgtcggtgaagataacgagggtaacccttccaacaccgcagaaatgtgggtgaatgttattccgtctgtggaaactattactaaactgaccgttacgccgaaccagtcactggtggcgaataaccgtgatcagttcaccgctgtggcgctgttacagaatgacaagggcgaagtactgccgaataaagcagtgaccttcagtgtttccggcctgaaaaatccggaaggtgtcaccatttatgatgcggacggcaacaacggccagacactgaccgtgatctccgggccggacggcacggcgaccgtgaaaatcatcagtaagtccgccggtaaagcatcactgcaggcgaagatgcgtaacggtaacagccgttcggaatcgatcatctatattgcggatctcagtaccgcaaaaatcaaaacccttgagttaaccaataacaaagcagtggctgacggccaggcgaaaaacatcgccgtggcaacagtgactgaccagtttgataaccaggtggaaaacttcccgttaacggccagagcggataacggtgcaacagtcgttgatccgaaccagcagactgacgataacggccaggtcactatccgcttcagcagtgagaccgccggggattccaaactggtggttgaaggaacgggtacttcgaagagtgtgaccgcacagtttgtcgcggatatgagcaccgcacaaattcagagtgtgactactgaaaatgacggtgcggtggcaaacggacaggcgaagaacagtgtgctggtgacagtaactgataaccggaacaacccgctggcgggtgcaccggtcaccataagtgtcccgggaactgcccgttaccagactcagccggcaagcggaatgacggataaccaggggcgtctgcgtgtctatatcaccaataccaaagccggttctgaggattacaccttcagcattaataacagcagtgtcactaaacagctgttgtttaagccggatgaatccactgccaccattactgactcgcaactgaaaatcgtggctgacggtcagaaagctgacggcacatcggtaaaccgggtgcaggcgactgttctggatgcttatggtaaccgtatcccgggctacaccgtacagttcattactgacaacaatgcccagccgtcacaggctcagctgacaacggacggcaacggtgaaaccatttttgatctgacgaataccaaatccggtaaaacgaaggtcactgcacaggtgaacggtaaaacggcatccgttaatgtgacattcaccgctgacagcgccaccgcaaaaattgcggatatgactgtcacggcggatggcatgccggcaaacggcgaagcgaaaaacgcggtggaagttaccgtaacggatgcttccggtaacatcgtgccgtttgtggcggttcttttcaccgcagataacagcgcacagccgccatcacagtcactgatgacagatgagaacggtaaaatcttattcagtatgaccaataccgtggccacgcaggtcaatgtgactgcgaaagtgaacaccagtgagatgagtgcggtggtgacgtttaaggcagataccactaatccggatgccggtaaatcatcgctgtcggcaaatccgatggtcattgtggcggacggcagcactgagtcagcactgacgcttattctgaaagataaattcggcaacaatatcccttctcagggtgtggaatttaaatctgacctgacgggcagcacagtaagtacaacgacggaaaatccggacggaacttacagtgcaacactgacgggaaccaaatccggtaacgctaaaatcacgattgtactgaacggtaaagcgtttgcggttgcaccggttattgtaaaactgactgccgacagcacgaatccggatggcggcaaatcagcgatgagcgccgcgccggcaacgattgtggcgaataattcacaggaatcggtactgaaactgatcctgcgggatgctaacgataacctgatttccggccagacagtgacatttaccactgtactgaatggcgtgactatctccggtacggcagaggatcaggacggtatttataccgcaaacctgaaaggtactgttgccggtacggcaccggttaaggtgtttgtcggcggtactgaactggcggtaaatgcagtgagtgttgaactgacagcagacagttcaaaaccggacagcggtaagtcagtcctggaagccgcacctgcgactatcgtggctgataatacaaaggaatcagtactcacactgaccctgcgtgatgtcaacggcaacctgatcccggggcagactgtcctgttcaaatcggatctgaacggtaccgttatcagcggcaccggtgaagataccgcaggtatctataccgcaacactgaaaggaaccaaatccggagatgcacatattaccgtcacactaaacggtaatgcattcaacgtgacaggaaccaccgtcacactgaccgcagacagcacgaatccggacaacggtaagtctgagctgacagcaacaccggacaccattgtcgcggacggcgctgacaaatcggtactgaaactgatcctgcgtgatgccaacgataacctgatcaccggacaggatgtggtgttcgttaccgacccggctaatgtctccgtcaccccggcagcagagaacaccggcggaacatatacagctgagctcaaaggaactcaggcgggtgttgtggctgtgaaggtcaaagtcaatggtactgaactgcctgcaacctcggtgaatgtgacactcatcggtgataaaacgcatccggatatcagtaaatcagaactgacagccactccggagacgatcgtggctgacggtaaagacggctcggcactgaaactcatcctgcgtgatgttaacggcaacctgatcaccgggcagaccgtcctgttcagcacggcgctcggaaataccgcaataacggacaatgcggaagcacagggcggtacctataccgcaacgctgaagggaacaacggccggaacagcgaccatcaaagtcagcttaaacgggactgaactgaccgggctgaccaaagatgtgacactgattggtgataaaactaaccctgatatcaccaaatctgaactgaccgccacaccggatacgatcgtggcagacggtaacgacggatcagcactgaaactcattctgcgcgatgtcaacggtaacctgatcaccgggcagaccgttctgttcagcacggcgctcggaaataccgcaataacggatgatgcggaagcacagggcggtacctataccgcgacgctgaaaggcacgacggccggtacggccaccatcaaagtcagcttaaacgggactgaactggcaggtattaccactgatgtaaaactgattggtgataaaaacaatccggacagcacgaaatctgagctgaccgcattaccgggccagattgtggctgacggcaaggacggggcagtactgaagcttatcctgcgcgatgtcaataacaacctgctgccgggccagaccgtggagttcattaccgcgctgggaaatacggcaataacggataatgacgaacctcaggatggcgtttataccgcgacactgaaagggacaactgccggtacagccacgattaaagtgaaggtaaacggtactgaactgacgggtatcagcgctgacgtgatactgattggtgacaaaaataatccggacgggactaaatcggaactgacggcattaccggatacgattgtggccaacggtactgctgaatcaaaactgaaactgattctgcgcgatatcaacggtaacctgatcaccggccaggaagtcattttcacatcaacgctggaaaataccacggtcggcggtacatctgaaaataccggcgggacatataccgccagcctgacagggacgacatccggtaaggcaacgatcggtgtgacggtcaatggtaccgcactgacgatcactgcggcagaggtcactctgacagcagataaggataatccggacagcggtaaatccgaactgacggcagctccggagacgatcgtggcaaataatacggatgaatcagtactgaaactgactctgcgtgatgtcaacggtaacctgatctccggacagacagttgagctcaaaaccgcgctggaaaatacagtgatcactatgacaccgggggatcaggatggtgtctataccgcaaccctgaaaggtacaaaagccggaacggcgactgtcactgtgacagttaacggaacggaactggcggggctgaccaaagatgtcacactgatcggagacaagaacaatccggacagcagtaaatcagagctggtggtaacaccggagacgattaccgctgatgatacagatacgtcagcactgaaactgattctgcgcgatgttaacaataacctgatcaccggacagacagttgaattcagtactgcgttagccaataccactatcaccgctaaaccggaagcaccgcagggttcgtacaatgctgtgctgaaagggaaaacagccggtaatgcggagatcaaagtgaaagtgaatggtgcagatttcggcgttgcatcaaaaacggtgaaactgatcgcggataagagtacggcaaaaatgattatcacgaacttaaatacggataaacatgcggttgccgatacggtatcggtcaataacttagagataaaagttgttgatgccaatgataacccgattagtggtgtgaatatcaaagttaccgaaaaaacacagcctgcaatggtgatgatagacaatgcggaaggtgttaccggtgcggacggggtatttaaaccgggcgtcagaagtaaaattcagaatgtcagtttatctgtatcggcaaaagatgcaggcggaatcgatatcactgaagattatgcactgatatttgacctggtgaaatttactctgaagtcagccatcgtaaccaattaa

SEQ ID NO: 276952 - DNA, 1038 bp, Morganella morganii
atgtccctcaaacctgctgattcactccgccagttacatacatttggtatcgaagccggtgcccggcatattgatgtcgcagagaccattgctgatctctgccgcttatggctggctgcacaaacggaaaaatcacccttcctgctgttaggaggtggcagtaatgtactgtttactgaggatttcaatggcaccgttgtcattaaccggatcccgggcaagaccgtccgggaaacaccggatgcctggtttatcgaagttggtgccggcgaaaactggcatgaattaatccgctggatgctggcgaacagtatttacggcatggaaaacctggcgctgatcccgggctgtgccggtaccgcaccgattcagaacatcggggcatacggtaccgaatttaaagacgtatgtgactatgtggatgtcacctctctgtcagacgggcagacaacgcgcctgacagcagaggaatgtcgctttggctaccgtgacagtatttttaaacatgattatcagcagggatatgccattacagcggtagggctgaaactgccgaaagtatggaaaccgaatctgagctacggtgatttgaaatcgctggatcccgcgactgtcacacctcagcaggtatttgatatggtctgtcagatgcggatgagcaaactgccggatccggctgtaaccggcaatgcaggcagcttttttaaaaatccggttgtgactgctgagtgtgcgcagaaaatcaaagcacaatatccggactgcccgcagtatgtggtggcggacggaatcaaactcgctgccggctggcttatcgaccagtgtcagctgaaaggccatcaggaaggcggtgcagcggtgcatatgaatcaggcgctggtattaatcaaccgtgataatgcaacaggtgatgatgttatccgtctcgcccgttatgtccgtcagcaggttgctgcccgtttcggggttcagctggagccggaagtccgttttatcggcacggacggtgaaatcagtgccacagaggctattgcatga

SEQ ID NO: 276953 - DNA, 981 bp, Morganella morganii
atgaaagattacagtgtaccgctgacgctgatcggcattttatccgacggtgagttccattccggtgaacagctcggcgatcagctgggaatgacccgggccgcagttaataagcacatccgcaccttacgtgagatgggtatagagatggaaacggtcaccggtaagggttaccgcctctttgcaccgatgaatctgttaaagcccgatgttatccgcacgctgctgcccgggcgaaatgttgaggtgttgccggtcatcggctctaccaatcagcatatgatggataaagtgggggaactgacatccggtgacgcttgtgtggcggaataccagtatgccggacgcggtcgccgcgggcggcagtggatctctccgtttggccgcaatctgtatctttctctgtactggcgccttgagcagggacctgcagcggctatcgggctgagtctggtcgtcggtattgtgcttgcagagacactgcatgagctgggtgcgaccggtgtaaaagtcaaatggccgaatgacttatatctggatgacaaaaaactggccgggatcctggtcgaacttcagggaaaaaccggggatgccgcgcatgtggttatcgggatcgggattaacctgaccatggaaagcagcggtacagatcagattggccagcagtggatcaatctgcagcaatccggtattcagatcgaccgtaatacattatctgcagagtttattaaacatctgacagatgcgctgcatctgttcgaaaaaagcggactgaccccgtttattgaacgctggtatgcttttgataattaccttaatcgtgaagtaaagctgataattggtgagtgtgaggtctttggcgtttcccgagggataaatgggcagggggcgttattattagaccagtttggtgaaattaccccctatatcggcggagaaatatcacttcgcggtgtgaattcaaaaaacaaaccggcctga

SEQ ID NO: 276954 - DNA, 945 bp, Morganella morganii
atgtataaagaaaaatcgctctctccttatctccatttcagccgcagtcagtgggcgaccctgcgtaactccgttccgatgacgttgtctgagcaggaaattgacgatctgcgcggtatccacgatgaaatctcgattgatgaagttatcgcgatttatctgccgctgtcccgtctgctgaacttctatatcagctcaaatctgcgccgtcaggccgtactggagcagttcctcggcagaaatgaagcgaaagtcccttatgtgattggtattgccggcagtgtgtcagtcgggaaaagtaccaccgcccggttattgcaggcgctcctgagccgctggccggaacatcgcaaagtggatttgattaccactgatggttttcttcatcccaattctgtgctgaatgaacgcggtattatgaagaagaaaggattccctgaatcctatgacatgcataatctggtgcgtttcgtttctgaagtaaaatccggtaccccgcgggttctggcaccggtttattcgcatctgacctatgacattatcccggataaacagttagtggttgagcagccggatatcgtgatcctggaaggcctgaatgtgctgcagagcgggatggattatccggaagccatgcaccatgtgttcgtgtccgattttgtggatttctctatttatgttgatgcgccggaagaattactgaagagctggtatatcgggcggttcctgaaattccgtcagggcgcattcagtgatcctaattcctatttccatcactatgcgcagcttgaggaaagtgaggccgtcagtattgcctcaacaatctgggatgagattaacggcctgaatctgcatgaaaatattctgccgaccagagagcgggccagcctggtgatgaccaaaggcaccaatcatatggtgaccaatgtgaaactgcggaaataa

SEQ ID NO: 276955 - DNA, 948 bp, Morganella morganii
gtgtcattttttgatacgaacggattaagccggacgcagcaaataaatgattatgcagaatttatgggggcggcaaaagcggtaattcataaaattcatacctatattgatgctctggcgagtccatcccgtatggccgctgctgagctacgttctgtagcgagaaaagcaacgacgtacggacttaaaacagccggcggtattggcggggttgcagcaggtgttgcagttgcggcttctgttactgttgcacttcctgtcgtggcgccggttgttatcggtactgcagctgtggggggaatcataggggggatagccgccggagtcgccagtgaaaaagcatttgatctgggggtcaatgctatttttgataaaaataaattccagccgacccgggttcagacccggaaaatgcaggaatcactggcacgggccggtggaaatttctttgccaatcaggttaaagaccagcttgatttaagagaacaaataaaaatacacgggtcagcaaaagcagcttcagcactggaagaggttctggatctgggcgttaagcttcctgtaaaagcacttttggatacaggattggagctcaatgatttcagaggaataacgatagccaaaagggataaaatcacaggtgttctggatgcagtctcttccggactgtcatctgataatcacaatgaaattatgggactgtttgatgataaagggactaacagtgtcagaaaatatggtacgctgaacacagggcggattttccgtatgagttatacaaaagatggactttcggatatgcggactgaattactgaccagagttagtgatgtcaggagaatgctgaataacccggatatttacaaaggaaaagcagcaaaagctcaggtttccggggaagcattgtttttccatcagaaaacaataacccgcagagcatcaatttga

SEQ ID NO: 276956 - DNA, 1239 bp, Morganella morganii
atgaaaaaaatcattagcgttagctattatgctgatttttcaagatactttagagcgttacatggtaattttcataatcccaatatcgaatggataaatatttgtctataccatagcgcgtatgtttttgatctattacataatgtaaaaactatatttttaccatcggaaatacgcaagagaaaattcaaaaatttaaaatcaaaatttgacattggctcaattaattatacttacttaaagaatagcgacactaaaataaatgatattgctttactctactctaattactttgagtatttcctaaaaatagaaaagccagaccttattatattaagtggagatgaacgcttacctataaaaattttacgccatgtagcatttaatctaggtataaaagttttgtattttgagcaaggaccatttggtacaaccattttagataaagatggtgtaaatgcaaattgctcatttagaagaaattgcaatcaggaactccaatcagaaaaaaaattatttttattggaaaacaaaaaagaaaaatggcaaggatataaaaaatatcgtttattagatataatttatcagcttttatttccaaatacttacccagaattaataaaatataaattatcaataccaaaaaataaaaaaaatagcccaataataaataaaatcactacaggtacttatacaaaaaaatatattttactaatattacaagttcccgaagatgttaatatggtttgccatagtccatattttagtaatcatacagaaattataaaaaaaattcacacatctattccttctcaatataaattagttgtaagagagcatcctctatataaaggaaaatacgaatcatctttatatgactacataaacagtaataaaatttcattagattgcaatggtaatcttgttaatttaataaaaaatagtattctcgttattgtaaataactcgactgttggcttagaggccatgttacataaaaaaagcgttttaattttaggtaactcttactatgataatgaaaattatatttataaatatcatggggaaaaactaagagagaagatattagaagccataaataaaccaatcgacattaatgaagtagatatgagattaaattatttatttaatcaccactttctctctgggcactttagggataaagacctatcatcgattcctgaacacgtgagaaaaatcaatgagtttattttataa

SEQ ID NO: 276957 - DNA, 534 bp, Morganella morganii
atgagtttattttataaagtttcatggtatttaagagctatattccttaagtttttttttaaaaaaataggcaatttttctattataggaaaacctatttttttgcataaccctaaaaaaataaaaattggcaataaagtcagaatatttcctggatctagatttgaatgtcacaattccggtgaaatagtaatcttagataacgtatctataggtcaaaattttcacgtaatatcttccaatgaaccattatatatacaccctggcgttgtaatctctgcgaacgtttgcataacaaatgttgaccatgaatataaagatataaatttatctattagtgaacaaaaaatcatattcaaaaaaacagagattggcaaaaattgcttcattggttatggagctatgattcaagctggtacgatattaggaaatcattgtattgtaggagcaaatgctaccgtcaaaggtatttttccggactactcaattatagttggtaccccagggagaatattaaagaaaataaaagaataa

SEQ ID NO: 276958 - DNA, 912 bp, Morganella morganii
atgatcaccggtgctgcacagatggacggcgctatcctggttgttgctgcaactgatggccctatgccacagactcgtgagcacatcctgttaggtcgtcaggttggcgttccttacatcatcgtattcctgaacaaatgtgacatggttgatgatgaagagctgctggaactggttgaaatggaagttcgtgaacttctgtctcagtacgatttccctggcgacgacactccaatcgttcgcggttcagcgctgaaagcactggaaggcgagccagagtgggaagctaaaatcgttgaactggcaggctacctggattcttacatccctgagccagagcgtgcaattgacaagccgttcctgctgccaatcgaagacgtattctcaatctccggccgtggtaccgttgttaccggtcgtgttgagcgcggtatcatcaaggttggtgaggaagttgaaatcgtgggtatcaaagatactgcgaaaaccacctgtaccggtgttgaaatgttccgcaaactgctggacgaaggccgtgccggtgagaacgtcggtgttctgctgcgtggtaccaagcgtgaagaaatcgaacgtggtcaggttctggctaaaccaggttcaatcaaaccacataccaaatttgaatcagaagtttatattctgagcaaagatgaaggtggtcgtcatactccattcttcaaaggttaccgtccacagttctacttccgtaccacagacgtaacaggtatgatcgaactgccggaaggcgttgaaatggtaatgccgggcgacaacatcaaaatgatcgtcaccctgatccacccaatcgcaatggacgatggtctgcgtttcgcaatccgtgaaggcggccgtaccgttggcgcgggtgttgtagcgaaagtgatgggttaa

SEQ ID NO: 276959 - DNA, 426 bp, Morganella morganii
gtgagttttgtagtcaatgccgctgtccgcatccgccaccagcaccgccgtaccgccgaacggatagtattcctcctgactcagcaaattaccgtcgccgtccgtttccaggccgctgctgccgatcagattgtcgtaactgaaccgctggtgatctttcttaccgtcctgccagtgcagcagccgtacctgtgcccgcccggcaacaccggcgcagatcacctgatagttttcttttccgcttcgcagctccagccccggcagatagatgacctgctgtgtctgtgtgctgttaccggttttctgcacggcagttttcaggatacgccggctgcccgcatcataacggtagctttcgcagtcaccggcggcaccgttacgcaccaccggcgtaacctgttgcagttcgccgcgcgcagtccatga

SEQ ID NO: 276960 - DNA, 594 bp, Morganella morganii
atgaatagtaaaaaaattgacagcgtttcttttccgggcgtaacaaaaacaacatttaaagacaggctgaaagcattgattggtgaccgaagtgtcaggggagcagcaagagactggaacttatctgtttccacattaaataactatctgaacagaggtactgaaccaacgctaagtgtattaaataccatatcaaatatagaaaacgtgtctgttgattggctagtaaaaggacaaagtagcgctactgaaacagccaaaaatgaagagcgtaaagaagaggcgaggcaagcgtggatgatgatctatgattcattatcatcaggagaagccgaaagtataatgcgtgcaattcacagacatggcgtactgaacgcattcaaaataaatcacatggattacattgagcgcagcgagactatggatgctattgatgccatgcacataagaccgacactgaaacaagccattagacttgcaatggctggtgatgaatcactagaccaagagattttgcgccgtattgaagagaagaaaaataccgatgagactggtcatttaagccaggaagaagatcaccaaaaagtgggatga

SEQ ID NO: 276961 - DNA, 372 bp, Morganella morganii
atgaccactactgagcaggttaagcgttatttttccgagtcagggctgtctgacggttttatcatccaggactatgagtggtcagaatccggcggacatgaccatgatgcgtacatggtttttcagcagcgggacggaaccggaagaatcaatgatcttggtggtgatgattttttcactgtgtcgttaatttctggcaagggctgggttgaattcgtcgctcagagagcctatgcaatacttgattatgtcaggtgccatgctcagtctcatggtcttaatttcatcatcaatacatctgggttcgtgaatccggttcagacggcagaggggaggtattggattcccctgaccttccgctgcacatcctaa

SEQ ID NO: 276962 - DNA, 756 bp, Morganella morganii
atggcacaatgccctgatgataaaggcctggtgatgggtaatgcggggattcttcgcatcgcgcccggctgccccggtacggttcctgaacagtcagcgtttctgcgtctcggcgcactgactagtaaagggctggattacggtactgaaacggttacttccaaagcagacgacacaaaagggctgggcgaagccatcgtgaccggtctggatttaaccattaagtttgatggcgagctgaagcgcaaaggtgccgatggttccacgtctgcttttgatatcgccaaagaaatccttgctgaagtcaaggccagccgtcagccgtcatattgggtgcagctcgacatgaaaggtgatggcagtgatgtgattcaggggtatatgaacttcacatcatggtcgatggagttccctaccaaagaaatctccacgtactccggtgaactgaaagtcgcagacgctgacagctttgaatggctgcaggaagaaatcgtggttcagagcatcgcagccaaccccgcgacactgactgtgaaagccggtgaaacggcaacattcacggtcggatttaatccggttaacgcgacaaacaaaaattacgaggtggtcagcgataagcctaacttcgctaccgtcagtaagctactgaatgttgtcactgtcaccggtgtcgcagccggtaccgcgaatattacagtcacatcggaagatggcagtaagacggcgaaatgtgtcgttacagtcactgcggcctaa

SEQ ID NO: 276963 - DNA, 693 bp, Morganella morganii
atgacaccgcgtttagaatacggcgagatggtgatatccactgccgaaaatgattacctgttccgcccgtcgctggatgccatgacgcgaatcggtgagcctaaagagattgtgagtgcgtttacgcgattaaatggctcagaggtacaacaaattatagcgtctgccgtagacgcttacggagtggttcctgaatggctgattgcactgttaaataaaccggtttatgggcgcagcattttatcgacagcaatggacgtgatgcaggcatgttgtaacgatgactgttctgaggttatcggtgaatggctggttggcaaatccggcatggtgtaccggcgcggcgctatgcattatcgcgatatcatcctgctggcgcgcgagctaatgacccacggcattatcggtaaagccaaggtgcgcaaactccagcgcaacgaaggtaaagacgaatactccgacgagttccgcgccgtcgattacatcagtgccgcccgtgtgcatttcaacatcacccgtagcgaagcggaacaactcacaatgaccgagttcgtgatgatgctgaaagtgaaatatccggatgagaaaggcttcacgaaagatgagtatgaggctatcaccaaggccgatgatgcccgtaacgatgacttgattaagggcaagcgccggttggtgagcaggaagacagtctaa

SEQ ID NO: 276964 - DNA, 3324 bp, Morganella morganii
atggcaaacgtcggtgaaatcgtatatcaggtgcagatggatgttgctcagttgctgacatcacagcgtcaactggatcagcggctgcggaatatggaaggcagatttaaccgcacaacgaccgccgtcaatggcactgagcgctcaatggcctcgctgtcgcgggttgccgtatctctgactgcttacttgtctgtatcagccgttaccagctacgcggaagcttggacggtgctgaataacaaactcgtcaactccataaaggccggagagacgctggcggtggtgaatcagcgcgtgtttgatattgctcagaacagtcgttcaagccttgacggtatcgcaacgctgtattcacgactggaaagagcgatgcgcagtaccgggctcagcggcgaagagttagggcagataaccaccactatctcaaaggcaatgaccgtttcaggtgccacagcagcagaatcagaaggtgcacttgtccagttatcacaggcactggcatctggtgtactgcgcgggcaggaatttaactcaatgagtgaacaggctccggcactgatgaaaggacttgcggattcactgggtgtcagcatcggcaagctgagggcgatggccgcagaaggcaaattaaccacggatgtactgttaaaagcattccgtgaaatgggaccagctattgagaaggagtttgcgaatacaacacaaacaatgtcgcagtctcttcagatcgccagcaataatattactaaattctttggcgaaaacaccactgttaagacatttataaacatcttcaacgacgctaccgtatctgccagcaacaatctggaatcactggctaacgtattgcttattgcagccggtgtcatggggtctagatatgttggcgctcttacgctatcagctaccgctcaggcaaagaaagttaaagagacacttgccggtatggcggcgacaaaacaagcggtcagagttgagatcgaagccgccacggcaacaatcaacagaattgcagctgagaagactctggctgtgacagttcagcagtcgctgggtgcgcagctggcagcagccactactgaagcgcagagaaccagaattcgccgtgaattggcagtaaactcatcagtaataacaggattaacacagcaggaaaccgcagctacaaatagtctcgctgcggcacagaacagacttaacgttgcaagtgggttggcaagcaaagctctatccttgattggtggaccggttggtgctgcgatgttggccggagccgctgtgtattattttttccaaaaagctgaagaagcaaaaagatcagcacaagagtttgctgattcactaaatgaattgcgtgccagcatggataaaatgtctcgcaccgaactggcagcaaaaatagcagatgccagggacgagctcgaagttctgacggatgctcagcgcactgcagagcaggaggttaaaaatctcaaaacagcatacaaagcatattctgatggggtattacactttggtagtacccaggagaacctcgaaataatatccagaaaattagcaaaagcagaagccaatcttgagcgcgtgcaaaatgacagaagcaagactgtgaattttatcagtgcagcgcaagcgaagttaaacggggaattgttgcagggcgaggagctgctaaagcgagaggcgagtactttgctacctaatgccggagcagcacttcgcgcttacggacttgaccttgacggagccacaaaagcaaaacaaaagttcaattcagcaagcctgaaagttgaatggtcagatgctggcgctgacatgaaaaagacgcttgaacgtgaaattgaaatggctggagcgaaggatgacgtagtaagacgtcaattacaggtcaagtattatgttgaagataaagggatatcagagcaggaagctgaaaaacttgctgaattagctgctaaagctggcgaggcaagcgaagcaaaaaaaaccggtattaaaatatcaagggaggcggtatccgaagcaaaaaaagaagcaacagaagcgaaaaaactcaaacagaagataaccgacctggctaatgcgacgaaagttgcagagctggaaacaaaagggctgtcccgcgaggctgcaattcttgaagcagtacagaagcttggttcaaaagctaattccgctcagatcgccgaagttacagcactggccggtaaagagtacgaccttacgcagaaaatcaaagaccgcaaagaggcatttgagcagaacccgcaggcaaaagctgatcaggatatgaaactggccggagagcaactcgaacggcaactgaaaggtaacctcatcaccgaagaacagtatcagaaacgcagcattgagttaaaagcggaacacgccagaaaaagagcggaaataaatgcgaaatctgctgtatctcctgtccaggaaatggcggctcaggttgatcctgttcaggcgctggctaatgagcacgctcagaagttggcattgattaaaaattttgaaaatcagaaagttattacggcacagcaaagtcttgcgctgataaatgcagcaaacactgagtatgaggaagcaagactgaatgctcagtgggaaatctggcgtaatcagagtcaggccaatcagtttctcgcagatggtcttgatgctctcggtcagcgctcatccaacgtactgacagggcttattaccggcgcacagagtcttaatgatgcattccgtaatgtagcatcaaccattgttgatgaggctgtaggggcgttagttcagatggggatgcagcagattaaaaatatggttgttggtgaggccatgtcaacagcagcgcaggcatctactgttgctcaggccgtggcagcacaatcagcatgggctccagcggcaatgagtgctgctattgcaacgatgggggcggcggttacagctggttcagcgtcttacatgtcagccatggcggcgagtaaaacaatggctgtcgccggtgcccgttataacggtggccccgttgacgctaacaaaatgtatcgcgttggtgagaacgggcagcctgaaatattcaaggcgtcgaacggtcatcagtacatgatccccggtgacagcggaaaagtaatcagtaaccggcagatgggtggcgatggtggtgtcagcataggggatatgcacttcaattttcaggttcaggctcccaatggcatgacagaaaaggaagcaacaatgataaccaggatggttaaaggtactgtatatgacgttctgatgacagaaatcagaagcggtgcaatacaaggtaatcagcgctattaa

SEQ ID NO: 276965 - DNA, 330 bp, Morganella morganii
atggatgaatttaaatggcgtcctgaggatgcctgccaaattaataatgaaccgaaggtcagggttgcaaaattcggcaatggctacgagcagagagccaaagacggaatcaataatcagcttaaaacatataacctggcattcatcaaaccggtttctgtcggacgtgaaatagataattttctcagtcagcgtggggccgtggaatcattcctgtggctgacaggggatgacagaaccctgcggacattcgtgtgccgtaactggcaggtaacgaggaaacagtctgtctggcagattgattgtgtatttgaggaggtggttgcgtga

SEQ ID NO: 276966 - DNA, 699 bp, Morganella morganii
gtgagagatattccggcagatatgcggattgcggttactcagattgaacaatcagcaatgcttgatttgtatgaggtggatttaagtcgcttcggcgggaatgtataccgctttcatgacggaatgaacggcctgttgaaaccggtgatttggcagggtaaccgatatgatccgtatccggttcaggtaaccggactcagcatgacagcgcagggagcgtcagcaaggccgaagatgacattcgccaacattgatgggttgctgactgcaatcaataacgattatgacgacgcactgggggcgattgttaccagacggcaggttatggagcaatatcttgatgcggtaaattttccggatggaaacaatcaggcagatccgtcccgtgaggctgtacagaaatttgtcattgagcaacgtgaaaattcagactcagatttcgttacatatgtgctggcgctgccgacagaaacagataatgcacaaattcccgcccgggttattcaggctgatatatgcccgtggcgatatcgtggacaggattgcgggtatgacgggcctcctgtcgcagacgaaaaggatcagccgaccaatgaaccgacaaaagatcagtgctctcataagtaccgtggctgcaaacttcgccactcctcagtattgccgttcggtgggtttctcggctccaataaactaggttaa

SEQ ID NO: 276967 - DNA, 714 bp, Morganella morganii
atgattgaaagtaacattatcgcacatgcaacaacggaaggtgtgagggagtcgtgtgggctggtttcagggggaatttatttcccgtgtaccaatattcaccctgacccggaaaattattttgaaatcagctcagaggaatggttgagagctgagagtcatgcagaagtggaagctgtcgtgcacagtcatccggctggactgccatttttaagcgcgggcgacagggatatgcaggttaaaaccggattaccgtggtggctcgtttgtgatgaccggttactgaaatttaatcctgttccgcgattgctggggcgtgagtttaatcaccgtgtgcaggactgctacagcattatccgggatgcttaccatttgtgcggcatcagtcttgatgactttgagcgacatgataattggtggtacaccggtgacaatctgtatctggataacatttccggacagggtttttatcaggttgatgaagtacaggatggcgacgttattcttatctgcctgggtacatcaaaaccttgtcatgcagcgctatatatcggtaatcaggagattcttcatcatcgccctgatcgtttgagtaagcgggatgtttacggtggctactggtttaaattcacacacagcatatggaggcacaaacagtggtcagactacagtttgcaggctatttacgccgatatggacgccggtttgaattag

SEQ ID NO: 276968 - DNA, 567 bp, Morganella morganii
gtggtcagactacagtttgcaggctatttacgccgatatggacgccggtttgaattagaggtcagcagtgcaggtgaggcgttaagatgtctgtgttatcagattgacggattaaaacgggaaataaaccgtgggcagttcagggtacgcgttgccggtcatgatatgacagaggactgcatagtggcaggattacacactccacttaatgacaatgatgttatcacgatagtgccggttataggtggcgcaaaatcaggtggcttccttggcattatcggcggcgcagcgctaattgccggggcattctttattccgggcggttttctggcaacgatgacatcgacggctatgtttgctgctggtgtcggaatagcggcagcaggggtggcaacgatgctgacaagaacaccgggcgcaccaaatttcagtgaaggcaattcagaaagtaaccagtatttcagctcactttccaacagaatcgggcaaggatatcccgttccgctttgttatggagagatggtggttggctcaaatgtgatttcacaggggttggagacagtataa

SEQ ID NO: 276969 - DNA, 3135 bp, Morganella morganii
atgggcaaaggtggtggtggcggaagcacgccgagtctggttgatgacaacctgaaaaataagcagtttctgaacattattgatttggtgtcagaaggtcctattgaaggaccggttggcggaatgcagggattcctgctgaacggaacgcctatagtcgataaacaaggtaatccgaatattcgcggggtcgaagttcagtggagatcgggtacgcagtctcagtctccgctcgatggtttcccgtttgttgagaaagaaatacctgtaaacgtggaagtgaaaaaagaaacaccgatattgcgtacggtatctgatcaggaagtcgatcgcattcgctttacattaggtgtttcggcgctggtaaaacaggacaacaaaggcaaccaggaaaacacttctgttcagatgcttgtcgagattaatgctggcagcggatgggtgacagaaaaaacaatcacaataggtcccgggaaaataagtggtcagtaccttgaatcacatattattaacgcgccaaagcaaaagccgtttcagataagagtatcgcgcctcactgatgacagtaaaagtgaccttcttaaaaacgggacggtgtgggccagctatacagaaattacggatgctaaattttcatacccaaactccgctgtggttggtatgcgcattgataaatctcagtatggtgacacgcctaaacgtacatatcatatcaaagggctgattgttcaggtcccggataattatgacccggaaacccgcagctataacggtatttggacggggaggtttaagcctgcatggacagacaatcccgcatggattttttacgatctggtgaccaatgggcgttacgggattggttccgtgatggggcgttttggttgtgaccggtttgctttgtatgcgatagccaggtattgcgatgaaatggtttcggatgggtttggcggcaaagagccacgatttactttcaatgcctatattacctcacagcggaaagcgaaagacgttattgatgatttggcatccgtatttcgcggaatgcctttatgggatggagtgcagttaacctgctttcaggacaggcccgcagatccggaatggacatacacaaactcaaatgttatcggcgggaaattcaattatacatcaacagctaaaagtgcaaggcataatgcagttgaagtttcatggattaacccggataacggctggaaggaagagagggagtttatacaggatgatggtcagatcataagatttggcggactgaatgttaagaaagtaacggctttcggttgcaccagcagggggcaggctcatcgtgttggtaaatggattctggaaacagagaagcttgagactgaaagtgtaacattcacgactttcagggagggtattaattgtcttccgggtgacatcattgaaatagcggatgattcatttgcgggttcaaaagtcggtggccgggttttagatgttgttggcagcagagtaaaaacagatgcacctataaaatggtcttctggtgataagggatattttgcttacctcggcggcagcgggaagttcatcagaacagaaatatcatcagtagatggcgacattgttatcctgaagagcgaaccagccggactgcaaaaattcggtgtgttttctgtatcgaaaaacacgctgattacgcgaatgttccgggtactgactattactgaagataaagacgggaactatcagtttaactgtattctccatgaaccaaaaaaggagcgcattgtagatgatggtgttaatttcaccggtaatccgtctgcacaaaatacggttcgaatccctgacattgaacgcctttccgtagcttatatcaatgacagctctcaggttcaggccagagttatgtgggccatgacaacagctaaccgcaatatttcttacgttgtttctgtttataaagatgacaaggttgtccttactggtgaaacgtctgatcttgaatattatttcaacggattggccgctggggaatatctggttggcgtacgcggcaaagataaaaatggaatgctgggaagcgagtcgaaagtgctgatggttattggtgcgccagcggccccttcgtttatcagcgttgagtcaggcttctttgaggtgaaattgataccacatatcagtgccccgcacacactgaatactgagtttgaattttggttttccggcgagcaaagaattaccaacattaataacattgaacaggaggctgaattccttggcagagcaaaagtatggtcaaaaggtcagttaaagcccggacatgattactggttttatatccgaagtattaatgagtatggtaaatctcattttattgaagaaaaaggtcagtccaataaccatgcggatgaaatattcgatgtagtgcaaaaagagctcgaagactcagccatcattaaaggcctgcagtctcaggcgaatgataacttcgaggctattatcaacaacgccaataacgtttacggtcagtggggttactggcagcgtgaaaacggtgttatgaaagcagaaatcatcgatgtccgcaactacacggttacggaaacaacggcacttgcggagaaactggacgcggtacaggttaaagcagaagacggactggcgctggcgcagaactccatccgcgcgcagtgggatatggcatccggtcaggcatccgtggtccacgatatgaaagtccggatccgttataacggtgaggattattccgccggtatggtgatcggggctgagctgaaaggtggtcaggtgaacacccttatcggttttaacgctcagcagtttgcgttttataatccggtgaaaaaatcgatggacatgttcatgtacatgaaggacggacaggtctttatgcgtgaggcgttcattaatcaggcatggcttaacagtgtggttgtcactgacaaaatgcagtcggagaactatgtgccgggtaaacagggttttattctggatgcaaaggctaataaatttgagttctttgacggaacaacaacaaacggtaccggtattacagcgggcggtattaaagtatatgacaataaccggctgacggtcattattggtgatatatcggggtattaa

SEQ ID NO: 276970 - DNA, 321 bp, Morganella morganii
atggctcacgggattattgtatatgatgatcgcggtaataaaatattagattccggtaaaagactcggtcggttcgtcggctggcatgatattaatcctgcaccggtcggtcagtttaaatacagctgggatcaccggaacctgctccctatgggggagatttttgtctgggttaatccgagcttttggttcaatcataacggctggtgcgattgccgggttgaaaatggcgttattatttttgagggtaatttaaggcgaaacgacgaacagagagccagggaaacttatatgcgtatattatatggtgtaaaatcatga

SEQ ID NO: 276971 - DNA, 687 bp, Morganella morganii
atgaaacacggttttatatgttttggtgacaccggccggatgcaaattgacggcactaatatagcgttagggctaatcagaaaacagtcgtttcattgtccgaaagtgcaggatgcaggacagggaaccattaaagaggtttattttcctgccagagttcatccgaaaacacaaatgatcgcagccagagcatcattctgggtcagaataggcggtcaggcgtttgacaatacgaataacaatgcttttgtctcgatgcctttccgcgacggtcccggcggaaatatagaaatctgggagtttggcaacgctcctgttaaggtgcgtaatcaaagaacgggaatagttgtgataaacccggtaaccaatcaggtggtatataatactaactggggcgttgcaaatatactgcatgttcagcggcttaaactatggcctgatacaatgtggtctatgacaatgcctaataatggtaataactgtgcagttgtatttggcggtggtgctcagaaaagaacaaattatgatgaatatatggaattcgagtcttatttctggcgaatgaacggttctaaactggaagtacgtctgttggttgatacgtattccagaccgcatgcatcacaatcttttgaatcatgtgatataccgctatatataatgataatagatacaacggggatataa

SEQ ID NO: 276972 - DNA, 267 bp, Morganella morganii
atgaatatatcaaaattaatcacattagctgcaataaccacgctgacagcctgcagccataacgtatacaccaaaccagtggattgcaccgggcatatgtttgaggggctggataaccggcattactcagctaagctgacaaaatatgcgccggacagtaaacggtttttcagtacaggtgatcctgttctgggtttgcatggctggatccgcatggatgcgtttgacaaaattacatgtgttaaaggcaagagtacagaggactga

SEQ ID NO: 276973 - DNA, 1557 bp, Morganella morganii
atgatttacaccgacggcaccatagccattaaagccggttcaccgattgtgatcggcaccggtacacagtggaaaaagaacattcacggtgtggcacccggccagcttatcagcatcgagaacggcacagcaccggtcagcatgatgatccgcgcggtaaacagtgataccgaactggtgttgtcattcaatgccccggtgacgctcagcggcgcgaaatattcaatcgccaccacggtaccggactcaatttcagatgcagcccgcaccatgtcagccaatcagggctatatcgtttactttctccgggcaatgcagcagtggatgacagacaccggccaggtggaaattgaactgccgaacggccagaaggtgacactggaggatgtaaaagggctggcttcaagggaatgggttaacaatatgctcctgacaagcggggagctgacacagattcagtcaccggccaaaacgagagggatttatgttaatgataacggggatatcggcggaaacctcggtccacatcagaactggaaggtagacgggaatgcaaaagcccatttccgggaattagaagtaaaaagtccgggggattacaccggcattaatctggtaaaaggtgatggccgatatgtactgatagaaaccaatccgcatgccggtagtgtatcgatgctgacgtttgcatacagaaatgcatcaggagaaaaccagcacgttattactataccgtatgactcaggtgcgttggccacgcagacatatgtgaaatacagtacaggttttggtatcggttctgaggcgggtggtaaaggaattacagattttaatagtttcgtcacgccaaccggtcagtactggtacggaaattcctcctcaaatattccccggactgttgtgggatttggtaccgcactggttacacggtattccaataatatttcgcatcatctgattattccgaactatggcggagggagttatctcgctatcagacgtaacaatggcggggcgatagaggatgtcgttgccctgacatccaatatgtatatcgtagacggcagtggatattataaaaaatcgtcgccaatcgttcagatttaccctgatggccattatgaaaccaacgacgaatccgaaggcgcggaagtccgccgtaccggcaccggccaatatcacattaccggcattctcggttataactcagatggcgcatggggtgtaaacggtggaatttccgtaccgaaagacaataacggccttgagctggtttatgtcgatgaccgcgtacagaaagatggcagtattatcatcgaaacctgtcaccgtcagcatgcgcatttgccggaacgtttccagaactggcggctgaaagaggtcaccccggaaggtgagcgcattttctatcaggacggcgaaccgtgtgacctgccggaatccacccgtctcgatgtacgtgttgaaatgccgcagggctctgtgtggaatgtgaaacagcgcgaactggctgaacagatggagcgggaggcacaggaaatagcggaggagagataa

SEQ ID NO: 276974 - DNA, 243 bp, Morganella morganii
atggaaagtgaggcaagagaacaccatgctaatggtgtaaccactgttcgtcaaagcaactgcaatggcagcagtcaaactcatagtaacagtcgtagccgtagccgctccagccgtgtcggctttagtgtgagtggacctgtcggggctggtttggggttgattgatcaaataaaagatattaacaaatctcacaataatgatgttattggtaaagatatgtttaatgagttcggtttttga

SEQ ID NO: 276975 - DNA, 336 bp, Morganella morganii
atgaaatcactgatcactaccaccatgtttagcttagggattttattctccggattctcaactgcagctgaaggtgatgaaattaccaaagtgtcttatgcttgtgcaaataatcagacaatggaagttatctatgtcaacacagaaaaagatagctatgctattatcaatcaaatgaacgaaatgattccgatgaaaataatgaaaatggcctcaggcgcaaactatgaagccatgaataaaaattacacatacaaactttatacaaaaggtaataacgcaaatttagttgaagggaatgataaagctgtgttaacagattgtaatgcagattga

SEQ ID NO: 276976 - DNA, 1263 bp, Morganella morganii
atgtttgcgctggtggatgtaaacagcttttacaccagctgtgaaagagtattccggcccgatctgacaggtaagccggttatcgtcctgagcaataatgatggctgcgtgatcgccaggtcagcagaggcgaaagccctcggcatcaaaatgggggcactgtattatgagtgtcgcgatttttgttataaaaacaatgtgacagtattcagctcaaattatgcgttgtacggcgatatgagcagccgtgtgatgacatttctctcatctttcgcacccgccacagaaatctattctatagacgaagcctttctcgattttaccggcatgaccaggatattcagcccggaagattacggctgtgagatacaggctgctattctgcagaaaacacaccttccggtcggtgttggcattgcaccgacaaagacactcgcaaaacttgccaaccatgcagcaaaaacatggaaaaaaaccggcggagtggtcgacctttctgataggctgcgccagcgtaagttactggcactgataccggtcagtgaagtgtggggtatcggtcggcgaatatcggccagactgaacaccatggggattcgcactgcattagatttggcgaacgccgcaccggcgactatccgtaaaactttcggtgttattactgagcgtacgctgcgggaactgaacggagaaccctgcatcaagctggaagaagtcagaaaggtgaaacagcagatcctctgctcccgatcattcggtaccaaagtgacggatattgtcacaatgagaaaggccgtgtgtgaatatgccgagcggtcagccgaaaaactccgggaagaaaagcagcgctgccggatgatcgggttgtttgtgcagatcagcaggcacgcgaacgggccggattatgcgaacagtgcaaatatttcactcgagtatcccagctgcgacacgcgggacatcatcaatgctgccacgagagcactggatagtatctggtgtgacgggtaccggtattataaggcgggcatcatcctgtcagatttcactgattcagccgtcactcagttcgatatgttcgccaccaggcagccattcaaaaacagcgacgagctgatgaagaccatcgacacaataaacaacagtgggctgggccgtgtgtggtttgccggtaaaggcagtgacagcggatacaagatgaagcgcgaaatgttgtcaccggcatacacaacaaattttagtcagttgccggtggtaaaaagttaa

SEQ ID NO: 276977 - DNA, 585 bp, Morganella morganii
atggctaatttgaaaataactgttgtctgtttagtggcattatctcccttattattcttgtctgatgctttggctaaaaattgcaagaaaggaattccctgcggcaactcatgtatatcagtaaacaaagtttgcaggataggaacagcaaacagttacagcacaaagaattatagtaataaatccatatcaactaatagtaaaaaatctctgcacggctcaacagtggcagcaacaggcggagtaagcgcggcatcattggctggcaggtcttctggcagtggcggttcaatcggttctggtgttgcttataattgtatttattctaaggctgtgatcgttggtgatgccatgggccctatgcaaggccgatttcactccacggtatcattgagcaactcagcattcactgcgttcaggcctgacggcagtaaaatctccagtccgaagatgaaaacaaaaaagaatggttattactttgagcaggatgataaaactgtttatgtcatgtcagtggattataaagaatacgctgtttcagatttcaaaactaaaaccactgagcaatgggccgagtgccagtga

SEQ ID NO: 276978 - DNA, 1077 bp, Morganella morganii
atgtctgacataaccaaaatcatcattgccggtcgtaacatcagcggttttggaggcatggaaaccgtattcagtacattcagcagattactgactgaatccgggaaaaactatcagatatctttcgtcttttttaatgaactgaataatagtgttgacgatacgtggctcggtaataacccgtttacacgcttcagttcatcactaaaaaacgggaagctgaagagagtttattttgcctgtcaattcgcttctgttattaaaaaaataaatccggattatgtcattgcctttgattctgttggttgttacatttcaagactggctttgcgcttcgcatttaaaagaattccattgttctcgtggaatcatttctctgtcaccggctcatataaagccaaatatatcaggctgacggataaacacctgtctatcagtagtggtatagcaactcagttatcagaaatgggtatcaaccctgcggatatttatacgatctacaacccggttccggaacaatctggaacaatcagctgtggcaatgcgataaattttttatatgtcggtcgcttaatgtgcggaggacaaaaaaacatgagggagttgttcagcgcattatccggtgttcatggtgactggaaattacatatcgtcggctccggcgatgactccgaaataaaaaaattaactagcctggctcacgatctgaaaatagacgataaaatcatctggcatggctggcaatcaagcccgtggaattacatagaacaagaaataaaaaatgtctctgcgcttattttaacatccgcatacgaaggattgccgatggtgctgtgtgaggcaaacagctatggtatttatactgtcagttcagactgtccgacaggacctgcagatattattcgtccgtatgtaaatggtgaattatatcctgtcggagataataaaaaactcgctgacattctgaataaaatcgtttccggggaaacagaaataaatcataccgtgataaaaaactccatttcaccgttttatgaagataaatatcttgcaagggtttcggatatatttaaatga

SEQ ID NO: 276979 - DNA, 432 bp, Morganella morganii
atgagcagagacattcagacgatactgttgcactggggcggttgggcagcgggtggtcactgtgcgggcatgggctgggcccgtgtttcatccggattccgggaacttgctcagaacagcagtaaacagagaccctcatgcagcgatgaggatggccgggttatcgatcgttgtgtatccatgctggggacggccggtctggaacgtgaacgcgactatattacggattattacgtgaaagggatgagcaagcgggcgatcgggcgtaaatataaagtccgcgaggatgaaatccgtaaacaggtacagagtgcggaaagttttatttttggttgtctggaaacactggcagtgcaactggatatggatagtttatataaagcctatcctgatgtccggagcacattggtgcggccgcaaacggcatgctaa

SEQ ID NO: 276980 - DNA, 525 bp, Morganella morganii
atggataacgattacaacagtaaatcaacacaggaattggctgatggtttagcgctgtacctgaaacaaggttatatcaacccgttatatttcaactgggattgtgaagacgagggtgcagaagaagcgggtttttatctggatgcgctttctgtacgtgaccctgatttatcctgtgaattccggaaaaaaataatggaatcgccggtaatcagtaatgattattttaaatcccaatgtatggaatatttactgctgtcatcagataaacaccgtgagtatgttattcagtatttatccggccattacgatgtattaccggtttctgtgctgcaaaaagcgatgttttatttttattgtgcaaagcgtgatcctgatgacaatgatgttgttccggattcattgatagtaaaactcaaatcccgctatcataccgttaaagataacaaagacgtcatggcttatgaactgactgaactgaaagaaaccggcgacgacttttgcgcggcatatccttcaccgtaa

SEQ ID NO: 276981 - DNA, 516 bp, Morganella morganii
atgaatgataaagacattgaattaattatttataaccagctggttactgagctgaaaaatcacggtattaccacgggcgttaaggcgggtttctttccggaaaatcatatctccggagaggattttattgccttttatcctgttggtgagacaccggcaggatggcagaaacgcagttatgccgtccgcgggcagaatgccaatcataccgaaagccagataactgaaaaaaaataccgggttcaggggtttattactgaatctcagacacataccgccggtgatattgtggccgcagtcaggatgattgtgaattcactgccctttaccggtgtgctgaataaacagggagtcggcgttcagcgcgccggtgctatccgggtgccgtatctggctgatgaccaggggcattacagacaggcaccttcttttgatttcaatgtgacgtttacccgtacactccgcccggagaccggcgttgtttcagcgctgttcccggatatttactgcatataa

SEQ ID NO: 276982 - DNA, 1488 bp, Morganella morganii
atgccaattaaacaaacacgttatgtcgatatcgcctctgcggtcatcggcgcttctgctgtgcctgagcgtaagctgaccgcacggttattctctgctgatccgaaaattccggccggtcatgtccttgagtttgcgccgggtcaggttgatgaactgctgggggcggattcaccggaagctcagtttgcccgtcagtatttcagttatgtcagtccggcaccggtcagtaaaccgaaagaactgcagattgccgcatacgcgccggtcggacgcacaccggcactgttcggtatcaaagcggccgcgctggctgatctgactgccgtcaccgacggcacactgtccgtaaccatcggtcagaccaccaaaaactataaggatctggatttagcggcggccaaatcctatgccgatattgcctcactgatccaggcaaaactgaatgctgagagtgagccgcagttcgcgggcagttatctcacttttaatgcacaaaagaatgcgttcgaactgaacggcggtgtacaggagcatgtctccgccggtgtggcgtattccgttctcgcggatgccatgggactttcttccgggctgtcatcagaagggcatccggcgcagacaccactggaagcttttatggtggcagagcaggtatctgactcattcggcagtgcgacgttcctcactgaattaccggcggagcaggctgtgccgctggcgcagtatgtcgccggtgagaatgtgaaatatcagctgcatctcagtgtgtctgccgacaatgcagaggaattaaattccgcgctggcaggaacggcatctgttggtctgaacctgaaaacggacaatggttactttatccaggcgctgccgatggcagtgatggcagcgaccgattatgaccggacgaatgctgcgacaaactacatgttccgtcagctgggtgtgaccttcccggcacaggtgaccaaagacgcggatgcggatcgcttcgacaagctgcgcgtgaactattacggcgaaacggcggtggccggctcgcaaatccgtttttatcagcgcggcttcctgtgcggcggagcatctgatccgctggatatgagtgttcacgccaacgagcagtggctgaaagcgtatatcgcacagcagtggttcagccttctgttggccacccgcggtgttccggccaacaaagacggtgaggcacaggcgctgatggtgattgccggtgcagttaccaaagcgctggataacggcactattctggccggtaagaacctgacagaagtacagaaaatcgcagtggcagatgcctccggtgatgatctggcctggcacgatgtgcaggacaaaggttactggtatgacgcgaaaatcaccgaaaacaccggcaaaaacggtctgccggagtatgtcatgaaatacgtgctgatttacggcaaaggcgactgggtccgtaaagtcgaaggctcacataacttagtgtaa

SEQ ID NO: 276983 - DNA, 453 bp, Morganella morganii
atgattgaagtatcagcaaccggtctcgcgctggtggtgaaagccagcaaaacctttccgtcaggtattcttatcaccgcctttgcggatgatgcggatccgctggatctcccgccgaccgagattgttaaaacaggcgtcgatatcaacggtaacctgctgagctggtcagcaccggcaccgcagacggtcacaattaacgtgccggcgggcagtgaggaagatcagaacctggctatcctgctggacgccaatacggcgaaaagaggccgccgcgccgctggggataatatcacgatggttgcctcttacggcaacggttcgaccaccaccgcacgtaacggccgtatcaccaacggcagccgcggaagctctgtcgccggtgcgggccgtctgaaatccaaacagtacacatttgtattccaggattttgattttacacgtaatcgttaa

SEQ ID NO: 276984 - DNA, 459 bp, Morganella morganii
atgctgatcaaacctaaagaagtggcggtaaaagatgccgatggtgttgagaaaacattcattatcagccgtcttccggcaattaccgggcgggaaattctcgccaaatatccgctgtccaatgcgccgaaaatcggtgactacgaagtcagtaaagatgccatgctgaaaatgatggcctatgtgtgtgtgccggtcagtggtgaagagatcccgctgaagacacaggctctgattgataaccatgtgccggacggggaatcgctgatccgccttgagctggaaatgctgaagtacaacaccagttttttcggcaaaggcgggagccggggtttcctcccctccctgctcagcagggcaggcagttcactcccgtcggttataaaaacgctgatagcttctttgcagtcatcatcagcgaaaaactcgccaccctcagcgaactcaaaacctcagtag

SEQ ID NO: 276985 - DNA, 1971 bp, Morganella morganii
atgtctctgacggaaacctttgttcagttaattgaatctgatatcagtcagacaaacggcgcacttgataatctccggcgttccacggatgacatcgttgacgatataaaacaggcgcagcaaaacacgctgacgttcggcagcctgctgaaagagatgtggccgtggcaggagcaggtaagcggcggacagtatattgagtttgagagtaatgccggggaagtgacaaaacagaccggtgaaatgagtacgaaactgagtgccattgtgacctcgctggtgcagtttaccggtggggaatctgacgctgtatttaaggcgctgaagcagaattatgacgacctgcagaacagcatctctgaaacccggcgtaccggcgaggcggcagcggcggcagaaataagtgcccagaaaaaagtacagagcgctctccgtgattcggatgccgcctggcaaagtgcatttgataacgttgcggcactggcggaaaaatccctcaatttcgccggtatttcaacgacaatcaccggacttatcagtgatgcgacagcccgcgccgctgaaattgaatccattgataaactgggcagggaaatcaatatcaccacgcaggatgtggatgcgttttccggctcggttgctgctctcggcggaacacgcagtgccgcacaggccgatttatccgcaatggcaaaagcattcggttttgccggggattcgatggaaaaggtgttacagactgcggataaagtgcagggcatgtcattcagtgaggccaaaaagacactcggcggactgggtgttgaggataacggcactgttgagctgctgatgaaaggccgggaagagttatcccggatgatggaaacgcagaaagactatggcggtatcacccgcgaaagtattgagcaatccatcagttttaacaatgccatgctgagcctggaacaatccgccggtctcctgaaaaacagtctgatgggtatgctgatcccggcgctggctcaggggctggactggctggaaaaaatcgttgtttttgcgaaagaaaacaaaaattttgtcaccggcttttttatcgcggtggccaccgtcgtgacaggcaaatatgttcacgctatgaaactggcacagatcagtacatggaccgccatgctgccggttatggcggtggtggcggggatccttctgctggcggcggtttttgcgctggtgtatgacgacatcatgaatttcatcgacggtaacgactcgatgatcggacggatactcgacagctatccgggactgaaagcggtcattctcacggtgtgggaggcgtttgtcgtcctgtttgacttcattatgtcggtgattggcgttgtggcggatattgtcgtcgcggcttacaacaccatgaacacggcactcaatgagtttattgactggctgactgccagtattcagggggtgatggcctggggcgctgaatttgaagcggtctttgataccgtgtcagatgcggttgtcggtatcttcacatggctgtgggagcagattgaggagatcctcggctggatcagtaaagggatggatctggtcaaagagggctggagtacagtgaaaggctgggtcggtatgggggattcggcagagattgaacagaacgttaaccgtaccgtgaccacgaagggcaaactggagtacagcatcccggaaaccccgtctctcagtgaagaggaaacactgaaacttgccggacaaatcaccggccatgtcaccacgctggcggctaacccgatggcatccctgaccagcggaacgatcagtaatcagtctgcggtcagcaatgaaaatattatctctgtcggtgagatcagtatcgttgccaaagacggtgatccgcagactattgcggcggatatcgttgaggtgctgcggcagcacatcgaaaatatgggacatgaatataattcggggatggagaaatga

SEQ ID NO: 276986 - DNA, 540 bp, Morganella morganii
atgataacagaagtcaaaatctttgatgtgaactcatttgccacgctgtttgattcagcaagcccggtaaaactgacagtctctgatacccataaagccacatcgtttcaggtggaatccggtgaaacccgcagtgatcatgtcgtggttaatgcggtaactatcagtatggatttaatgctcaccggcgaaacagaagatgagtttaaggcaatgcagcaggcgtatgactatcacaagctggtgtgtattcagaccagggtgagagcctacgggccgatgctgatcacctcttttacccatgatgaaaatccggaaatggctgatggtctcagcctctcgctgacctttaccgagtggcgggtgattgaaccggaatacggcgaactaccgccgcgcaaggtggtgaagaaaaaacagagcagcacagtgaacagcggcaaagtgcaggctcagacggcggcaccgccaccggcgaaaaaaagttctgttgccgtaaaacttgccggcggggctgccggtaaaccggggggcaaatga

SEQ ID NO: 276987 - DNA, 294 bp, Morganella morganii
atgaaaattataccactgaataccgtgccgaatcagcgcctgcgggtcacgctgaatgaacaggaatgggaactgacaatcaaaaccgcgcacggagtgatgtgctgtgatatccgctgcgatgatgagattgttgtgcaggggatgcggatgctgccggagcagccgctgatcccgtaccgctatcttacgtcaggcggcaattttacgttactgaccggcggggacgcattgccctggtgggaacagttcggaaaaacacagacactggtctggcggggggatgatgattga

SEQ ID NO: 276988 - DNA, 816 bp, Morganella morganii
atgattgacttacgcaggatccgctgcgccatcgaggttaacggtcgtctgcaatggtatgagggcatgcgtatgcatgcttcgggcacgaaatacgccaatccgttacagaatgactgttcattcagcattgatggcctgaatacacaaacccgcaacatgctgctgacggaaaccagtccctttacggagagcaaaacaccacaccggatcattctggaagccgggcggcgcagtaccggcgtattccgcatctttaccggcgatattgtcagcgcggaaattgcgtcaccgccggatgtgacactgacgctgaaagccaaaaccggcaatgccggcacccgcgatattgtgacttccggggggcaggcgatgtcaaaaatgagtgagatcgctgcaaaaatcgcaaaagactgccatgtttcactggatttccaggcgaccgataaaaatgtcgctaactggtatttttgcggtcccgcgctgaagcagattgagcggctgcaggacgccgggaatgtgaaagcctttattgatgacgatgtgctgtatgtgaaagacagggataaagcgctgtccggcaaactgcgtattctgagtcagaaaaccggcatgatcgggatcccgaaagcgacagagaaagggcttgaagtgtcatatctgatcgacggtgaatcctgcctcggcggtatgctgcggctgaacagcaaattcaacccttcgctgaacggggattacatcattgagcagctgaaattcgatatcgcctcacatgaggatgcctttttttatacggcaacctgcaaacgggcctga

SEQ ID NO: 276989 - DNA, 693 bp, Morganella morganii
atgaataaacctaatagtgatatggccagtgacggcagtctggccgggcagtttgcggctgcgttccgcagtctgctgatgaatattgacgacatgctgccggccacggtggtcagttatgacgacaccagtaaccgggccgtggtgaaaccgctggtgatgatggtgacgaccgccggaaagaaagtcgggcgcggtgcgctggctaatataccggtgtttcgtttcggcggcggcggtttttttatccgcatgccggtaaaaccgggggatttcggctggctgaaagccaatgaccgggatatcagcctgattttccagcgcggcggactggaagacgaacccaataccgcacgtctgcacacattcagtgatgccatgttttttcccgatacactcaaaggctgggtaatcgacggcaaaaatacggatgccctggtggtgcagtctgcggatggtgctgtgtgtttatcgctgcacggggacaaagccgtattggatacgccgttgtttgaggttaatgcaccggaaaccatttatgccgggaatgtaaccattaacggtaatcacgctgtgaatggtgacagtaatgcggcgggcggcaccctgaaacataacggcaaagacatcggttcaacccacaaacacagcggtattcagcgcggacatgaggattcaggagaaccgctatga

SEQ ID NO: 276990 - DNA, 345 bp, Morganella morganii
atgatgacatttgatgtcagtgaaaataatgatctgttcaccgggggagacggtaatctcgccatcgcccgcgatgaacaggcagtaaaaaacagctgtgctcagtatatcaaagcactgcgcggcgaaatgctgcataagcaggacaagggcattccgtattggaaaaccacgttcggacggcaggcggatctgccggtatttgaaaccgcattccgtgaacggataggggagatcccgcaggtcacagaagtgatttcattcacggccacgctgaaagataacaatctgagctataccgctgttttacaaactgaatacgggagtatcaggttaaatggctga

SEQ ID NO: 276991 - DNA, 1188 bp, Morganella morganii
atggctgaatataactatattacctcatccggcgtgattatcccggatactgctgagcagcgcacagccgttgaaaatgagtttaaggcggtgtttggtcaggatctggatatttcgccggaaaccccgcagggggtgctgatcacgatggaaacagagaatcgtgatgccattgtgcgtaataatgcggaactggcaaatcagataaacccggatcttgccggaggcgtgtttctggatgctatctgggcactgatgggaggggagcgccgggatgccacccgctcgattctgacgcaggtacagttcggtggtgtgccgggcactatcattccgaaaggggcacaggcagaaacactggccggtgacacgtttttcaccacaaaatcgctgattatcggtaaaaacgggactgtcagcggcgatatgcgtgccgttgaaaccggtcccgcggagtgtccggccgggcaactgatgacggtggccagctctgttctcgggtgggaaacggtcactaacccgaccggtgcggttaccggccggattgcggagtctgatttacagtcccgccgccgccgtaaactgacgctggcaaaaaatacggtcagtgttggtgaggccatgacctctgcattgtatgaactggagggtgttcgctctctggtataccgggaaaattataccaataccccgatggcagcggacggtatcacgcttgtaccgcacagtgtgtatgtctgcgtcgagggcggggagagtcaggaaattgctgccgcactgctgcggaccaaaaccatcggtgccgcctataacggcagtgaggaggttgaggtgacggagccggtcagcgggcaggtttacacggtaaaattcgatcgcgcaaaagaagtggtgctgttttgtcgtgtgacggtcaaaaaaaccgccctggatgcacaaacgcttatcccggcggcggtggaagcctgggcaaacggcgataccgggggggatggcgggctggtggccgggcgggaagtttcaccgtttgagatttctgccggtattaatgccgctgagccgcggttgtttatcaaccgtattgaattatccgcagacggcacacactggtcaccggatatttatccggtaaaactgacggaagttgccaaaattaaccgcagtgcggttcaggtggtgtttgtatga

SEQ ID NO: 276992 - DNA, 663 bp, Morganella morganii
atgacagactccatccagtcgttttcatttcattcagatctgctgcgggcactgttatggcagtacgaagaggcggaaaacctgaaagcactggcccgccataaatcggactggtttgagcgggcgaccgtcagcttctggcagaactggtacaacgatgtgtttaatatcgacaccgccactgattttggcctcggtatctgggcgcggatcctggatgtgccgctcggggtggatattccgccgcatgataaaacaaaaatcggtaccggttttggtaataaaaaggccaatttcagggcgaatttccggcgtaacagtgattacacactgtcactgacacaggaacaaaaacggctgattatccgtatgcgttatttcaatctgacgcaaagcccgactgtcagcaatattaatgaattccttgaacggtttttcggcaataaagacagcagggtatttgtgctcgatccgctggatatgacctatctgtattatgtgtttaattttaatccggatgaacgcctgcgcgttctgctggagaacttcgatcttatgccgcgcccgtccggtgtcggcgtcaaataccggattgtgaccaaaaaagcctttggtcatggtgaaaaccggaaaaacttcctgagcagtaacttcggagcataa

SEQ ID NO: 276993 - DNA, 1347 bp, Morganella morganii
atgactaaattatttaaagtcccctttgcaacacaaggggaccgcgctgctattcctgatgaagtccgggccgatggcgcggtttcctatacccagggttacgggtatgactacgagcgggaccaggccacagatccggctgccaaagatattgaacgtgagaagatgaacagcctgttccacgatatcacggaagcggtcggcgaaatgcagtccttcggagtgccggtctggcaggaggccggtaaaccgtatgctgtccgcagtattgtgtaccacaaaaataaaacctggcagtcaaaaattgaaaataacaccaccgaaccggttgccggaacggcatgggcagtactgaaagcagatttgaccgccggagaggtgggcgcttacagcaaaggtgagtctgatcagaaattccagcctgcgggtaattatctgccggaaggttacagttattccaaagcggaatctgatactaatttccaaccgaaaggtaattatgccactaaatctgaattgattaacgggttggcaggtaaacaaccggttggtgattatgcaactaaaacagagagtaacggaaaactagctaaagataaaaatggtgcggatataccggataaaagcgaatttatcaataatctcggtttgagtgaaaagtttcagccgaagggaaactaccaaccggcggggaattattatgtttttagtgatattacaacaatgccggaacgcggtttcaatggggttttttcaggcggagtgagtgttaaatatatcaaagggttttcaatatcatcaggaagcggagggtctgatacagcgcagctatatattgaccataaagcagggctgacagttagatatttaaataataatggggcagtaaatgaggataagattgtcggtattcctattggcgccactattgaatggcagtcagcagtagccattcctgacgggtttttaataaatgatggtcgcgagtttaatgcatctttatacccaatgcttgccaaagtttttccggatctgaaactccctgatgacagaggactttttaaacgcgcattagacaatgggagaggatatgattccggacgaaaactcgggagttttcaaaatgatgcaatgcaaaatttaaccgggaattttggtaacccgacaattgaaggcggtgatttctcagaaggagtattccggcattcagtaaataaaggcggacgtgctgctggtgccaatgcaaactcaatttcgtactcttttgatgcttcccggcaagtaaggacagctcatgaattcagaccggtaaataaagcggttatttatattacaagggttatttaa

SEQ ID NO: 276994 - DNA, 627 bp, Morganella morganii
atggcagaatacaatacaaaaattcagtacgcaaaatttgacaagaatggcctggcaatcactcccggatgggcggaggtttattgttgtcatccccttacaagagaatataccggcaaaagccaggatgaagttccgttaggatttagtttaaaagccgatgtttatttggataaaccagtaatacctgctcccggatttgcagttgttcgcagtgaagatggtaaacattgggtgcatactgaagatcacagaggtaaaactggttatgacaaaattacgaaagaaaaaattcaaataagtatgtttggtactttaccagaaaatctgacattacgtgaaccactgacaccttttgataaatggaatggtgaggagtgggtcacagatgagtccgaaaaattaaaacatgaaatcaccatagcgaatagtcgaaaacaatccttgctgtctgaagcagaacagatgattgttatgcttgagagaaaaatacgcctggggatggcaactgctgaagatcaggttaagctgacaaaatgggaaatttttagtatagaagtcactgatactgatacatcagcaggtatcgctacaacatggcctgtttttccggattcggtggattga

SEQ ID NO: 276995 - DNA, 1125 bp, Morganella morganii
atgtccaaaaaacttaaacataaactggttaatttattcttacagatttatacgcgccgccgtgatttttcgcactccgtcgctgcctttaaacagctggagactatcgacttccggaatattgttatttattcgacaacggcactcggggattttctgatgaataccccggcgattcatgaagtcagaaaacgttttcctgatgccagaattaccgttgtttccggcaataaaatggcaccttatatccgcactggtatcggtaaggactgggacgatgtggtgtgctggaacagcaaagtcaataccgtactgaaactggtcagggatttaaaagcgcacggaacaccggatctggttctgattatgcactcacataacccgtatgattatctgagcgcagtcatgaccggggcaccgtttgttttccgctgtaatcatccgacaaacccgtatatggagcgctggctgacaaactcgacccgctttgcacaccgccattcagtacaggtccgccttgatctgatcactccgctcggctgccggtttaccgaaaaaagtgttgagatgcgggtaccgtgtgaggtcacaaaagtaccgtcaccggtaagacgggttggttttcagatgggcgcttccagtgaggaacgacgctggccggttgagaattttgtcacactcgcacgcactctgcttacccggtaccgtgacctgaatattgttctggtcggcgcgccgaatgaaattcgcctgtccgatgaatttctcagtttacttgagccggaatttcacaaccggattgagcctctgatcggtaaaaccaccgtcgaagaattaacacaaatcgtaaataaccttgatcttctggtcacaaatgacaccggaaccatgcatctggcatttgcgttaaaagtccccagtgtcagcatgcatgtcagcacctgcccgcaattcaccggcccttatcaggactatgaattacatgaaattatttccgggtttgcctcaaaattactactggaagagggagagcatgaaatggcctcaatttctgcggatacagtaattgaagcaaccgttaaatcattatctgcgcggggaatattgccggcatcagaggaataa

SEQ ID NO: 276996 - DNA, 1284 bp, Morganella morganii
atggagcaacaactgcggttatggctgcaacaacaatttgaactcagtaatgactacgcctcatgggcggccattaccggggttattgtccttattctggctatcgctgttattctgcatcttaccctgcacaaaggccttctgccgtatattgaacgccgcaccggtggtgctcagcgtccgtggggcgcgttaattacccgcacccggctgtttaaccggtttgcctttctgattcaggggatagtgtttaatatccaggcgctgatctggctgggacgcggctctgccgcacaggagatcctcacgaccggcgcacaggcatggtgtctgttgttcggcatgctgctgctgttttccgtgatggacattcttcagaacttctcccgccataccccgtctctgagccgccttccgctgcgcggcgtgatgcagagcctgaaactgattatcgcggtgctcttcagtatcctgattatttcgctgctgataggaaaatccccgctgattttactgagcggactcggtgccatgaccgcggtgctgatgctggtctttaaagacccgatcatgggcctggtggccggtattcagttgtcggtcaatgatatgcttaatgtcggggactggctggagatgccgaaatacggcgcggacggtgctgtgacggatatcgggctgacgacggtcaaagtgcagaactgggataataccattaccactatcccgacttacgccctgatttccgattccttcaaaaactggcagggaatgacggcatccggcggacggcgtatcaaacgcagcatgaacctggataccaccagcatccgttttctgactgatgaagagatcagccggctgcggcaatcaaacctgatagccgggtatatcgatgccaaattacaggaaatcgcagaatacaatgcgcaggaacccggagataccctgctcaaccagcggcggctgaccaatatcgggacattccgtgcgtatgcggaggcgtacatcaaagccagtccgcatattcacaagaagatgacgaccatggtgcgccagctggcaccgacaccggacgggctgccggtggaaatctacgccttcaccaatgtgacggcgtggataagctatgagcaaatccagtccgatatttttgatcacctgtttgcgatcctgccgcaattctggctgcgggtgcatcagacaccaacgggctttgatatgcgcggtattgccgcgcatttcgcccgtgaatgtgaatcagaacgccgagccgggctgtaa

SEQ ID NO: 276997 - DNA, 1203 bp, Morganella morganii
gtgctgactgatacaaaattaaaaagtatgaagccgcaggacaggctttataaagtgtctgatcgtgatggtttgtatgttgctgtcacaaaaaacggaacgatttcattcaggtatgattaccgctttaatggccgccgtgaaacggtgacgtttggcaaatacggtcctgacggtatcacgctggcacgggcccgcgaattactgaatgatgcaaaaaagcagctgaatgcaggtatatcaccggctgcaagcaaacgtgacggtatcgataagcgaaagggggcgacggtattcggtgaatataccgtcagatatctgcgtgaagcccgcctggcggattcgacacgggcaatgaaagcctcagtaatcgaacgtgagataacgccggtgttgggtcgtctgacgctggaagagataagtacccagcggttacggtcattgtgtgaaaagatccgtgaccgtggcggacgggcaaccgcattacaggtacgtgagattgttggcgcggtatttgattatgccattgaccgcggctatgagataagtaacccggcagcaggtattaaagcatccactattgccacctttgagccgcgtgagcgtgctatgtcaccaaaagagatcggcatattcttccgggaactggagaactacagctgttatccgaccctgaagctggctgtgaaatttgtactgttaactctggtgcggaaaacagaatttatcaaagctacctgggaagaggtcgattttaaacgtgctcagtgggtgatcccgaaagaacggatgaagcgccgccgggagcatgtgatttatctctcccggcaggcactggatatgatgaccggatttcaggtctgcgccatggggagcgaatacctgatcccggggcgctatgacattcgcaagccactgtcgaacgcggcactgaataatgtgattgatggtgtggttaaacggataaatgagaaggggattaattttgcaccgctgacggtacatgacctgcgccggacagccagcacgctgttgcatgaggctgggtttaattccgactggatagagaagtgtctggcccacgaacaaaaaggcgtccgtgccgtgtacaacaaagcggaatacgcggagcagcgccgcgacatgttgcagcagtgggccgatatggttgacgggtggattgaagagggtaaagcggggtaa

SEQ ID NO: 276998 - DNA, 177 bp, Morganella morganii
atgctgatccttgcactctatctgtggattgccggttatctcttcgcagaactgagcagaagcgcagatacccgcaccgacatagccgccgtgatgctttattccacactctggctgccggtcggcgcgtgttatctttcatccctgatcgccagcaaagtgttaggcgacgagtaa

SEQ ID NO: 276999 - DNA, 198 bp, Morganella morganii
atggccgatattatcgatgaagccaatgacttaaacgaactgcgactgactaccgctcttgccaaccggccaccgaagccgcagagcctgaccggcttctgtatctggtgccgtgatgaaccgattatgcccggcagcgcgtactgctcaaaagagtgcggcgacgatgacgcacagaacaagcgcaaaaacggatag

SEQ ID NO: 277000 - DNA, 603 bp, Morganella morganii
gtgaaaaaatataaattaattctcgcagacccaccctggcaatacagcaacaaatcctccaacggcgcagcagataaccactacaacaccaccgatttttattccctcacccgcttacatatcgaaaaaatagcctccgacaactccgtactctgcatgtggtacacgggtaactttgtccgtgaggcttacgaactggctgaggcgtggggatttaaagtgcgcaccggcttcgggttcgtgtgggtgaaactgaacaaaaacgcaggggatcggatagacaaacatccaccggaggatttcttcgatttcatggaattgctgaacgcagagacacggatcaatggcggcaactatacccgcgctaatgcagaggtatgcctgattgccaccagaggccggggactggaacgccggtcagccagcgtcaggcagattatttattcctgcctcggtgaacacagcgagaaaccgaaggaagtacatcaccggctggaagagctatatggcgatgtcccgcgcatcgaactgtttgccagggagaaatacggcgactgggatgtgtacggggatcaggttaacagtgacatacaactgaggtaa

SEQ ID NO: 277001 - DNA, 393 bp, Morganella morganii
gtgaaaatacaaggcaggttaatcagtagccagcgctatcttgacgataatatcgttatggataaagcactgcagtttaaggtttttattgttgatgtcattccggtcattctgcgtggcaagcaatacaccctgttatgtaatggtcatcataattatgctgctgcaaagtcaatcgggactgaaccacaattcagaacacccaagaaattagccaaagcatttaaccaatactcgcagagtgaaaaagaaacctttgtcattaataacctaaccgacagcgatttatatgatgtcgatacaggtgaggtcatacaagagttacttatgcctgacatgaataacggggtattccaaaacaaattaacaaaaggattgcggctttatcaatga

SEQ ID NO: 277002 - DNA, 765 bp, Morganella morganii
atgtcagctaacaaagagtaccaaattgttgacctaatgaggttaacgctatctattatttttggacttgttgttttatttctgatattgaaatttctttgggactctgaagttgattcagttactagattttcagcatttttcactgcaatatcatcgctaggaattttagccactataggtgtttatttttggcaaagaaaagacaatgaaagtcaaataataaaaaaatcaaatgctatcaatattcttatttcgcgaaaatgcaaacgaattaattggttattatttaaaacatcacgtcttattgaatcaataaaaaaggacaatgaaagaataaaaaagtacactcataataatgataattataatttcattaaaataactgcatcaataaaaaatcaaaaatacaaattctatatcactgactcttatcaatataaagaaaatgttgcgagattcaaagaatacacctacataataaatagtgttgatagtaatgatttatcagtgctactttatgaatcagcaattattgatatcgatttacattatagattaattaactgcatatctactatcactgaaataaaccatattttagaaaacctagaagacttcaacaaccttataaaacaaagcattggagaaagtcttgtggaatatatggccgataccattactgatgaaataacaaatattagaaacatatattttgaatgcacaggaaatgaactattgcatacagattggtctatacgataa

SEQ ID NO: 277003 - DNA, 195 bp, Morganella morganii
atgaaaacaataaaagcacagtggctcggtgtatgtgaaaagtgtgggcatgagtcagcaacagtacaaacagaaaaaggccacgatgactggttttacgatggagataaagtcacctgtgagcattgcgggcatgccggtgatattgaggctgacggtgaatgtgcatggtgcatatgggatgcggttgattaa

SEQ ID NO: 277004 - DNA, 153 bp, Morganella morganii
atgaacagcgcgcgctttgatatcgctgacgcgattctgtcactgcacgggatcgcactctggtgcgccatcagcggcgttatctgcgtgattgatggtgatacccggcagctgattgtatccccttccgataactccaccgtttcaggatga

SEQ ID NO: 277005 - DNA, 291 bp, Morganella morganii
atgacaacgtgcagagagtataaggggattttgatggatccaaacgataggttgatcaacttcaagatggtggcctatttaacgggactgtctcgctcaacgatttggaaattagaaaacaatggtgatttccctgagcgagttactttatcaaaacggtcaattcgttggattgaaagtgaagttatgcagtgggttagcgtccgtatgagaatgcccattaagcaagatgacaccattcacaaggtacgagcaaaaaaggcggcaaagcatgaacagcgcgcgctttga

SEQ ID NO: 277006 - DNA, 1053 bp, Morganella morganii
atgtcagaagtaacaactgttcaaaccaatacaccgccggccgttatgaataacacctcattgctgatgaatccggattcaatggatcgcctgatgcgcttcgctgagttaatggcatccggcaccgtgacggtgccgaaacatttacagggtaaaccctctgattgcctggcaataacaatgcagtcagcccgctggggtatggatcctttcgttgtcggtcagaagacccatgttattaacggaacactcggttacgaagctcaattggtaaatgctgcaattacaagctcaaccgctattgatggccggttccattaccgctacggcggcgaatgggaaaaaattgtcgggaaaaaagacaaaaaccgagatgagtctggcctctatgttgaagttggcgctgtgctgcgtggtgacagtgaaataacctggggtgaaccggtctatctggctgatgtccagacgcgaaactcaccgctctggacaaatatgccgaagcaacagatcgcctatctggcaataaaatactggtcacgcctgtattgcccggaagtgattatgggcgtttacacaccggacgagattcaggagcgcgccatgaaagacgtcaccccgccgaaagagcgcgtaacactcagcgaattatcccaccagcaggcagagccacagcagccggagctggtaaaagaaatcaccggtgaactggttgaagaattcgacgctgaggcaatccgccgcgctatcgataccgccgaaacactggacgaagtgaaggatatccgcagcctgattgatcaaggcaaaaaggcaatgggtatcaccctgtttactgaactgaaaaataaagcagttcaggcatatcacgttattgattcacgcaacctgctggaagcggagatcaattcactaccggaaccaggcacaccggaagccgcagaagcatttcagaaagtggaacagctgctgaatgcccgtaaaacgaagctcggcgctgaactgtatgagcaattcagcatgacgctgaatgatatgaagcctgagtatcagtaa

SEQ ID NO: 277007 - DNA, 1698 bp, Morganella morganii
atggcaacaaccaataaagaacgtatggatgctaatttagccgcggcgataatgctggccagcggcgaggcatgtattgatatagcgaaagcaacgacagacctgattgcccgtatcaacggagataaatctaacccagcgctggagaaatacgacaacattattttccgtgtcggcctcgcggccacatcatcaacctgcttacagtcactgccggatgagcaatgcattgaagcgctggcacacgtcatcagaaatatggataagtacccggccaccagcgacaaaaagcagtattttgaatcgctgtgcggggccgctgatcattctgccgcaaaaaatgataaacaacccgtttatcaaaacgatgaggtgatgaccgataatgactgtcaggcagccactgagccgccacattttgaaccgggccgctatcctgatatccctaacgaaacgtatcacacatcgaacggcatcagcagcaccatgctgaaagatgcacggatcagcctgatgtattaccagcgccgccacatcacgaaagtgattcagcatgaacgctctgaggcgttggatttcggtagcctgtttcatactctggtactggaaccggaaaagctggacgcagaattcagcctgccgccggttatcccggctgacgcgctgaccaataccgaatccatgaagaaatggattgagagttataacgccggtctggcgccagtgatgagtaacgacgagctgaaagcagaaattgaggcacataacgccacgcttccgcagccgttatctctgtccggtaacgctgaagaaatcggttctctctatgtttcgctacctgatgctttccgcaccattccggaacatgaaaagcgcaccgcagcagcaatgaaagcctgcatcaaaatgttcaataacaccctgccggtaccgctgaaaacatccggcggacgtatcgatatgattcgggagctggaagcgataaaccctgagctggcggaagcagaacgcagtaagccggacccactgatcacctcgggtaagaaagaggaccttatcgccagaatcaaagccgtatcgccggacactgttttcgctgatgagttaatgcaggcatggcaggcagatgaatcacgtatccgtatcacaggcgatcagttaaagctcggcaaatccatgcaggaagctgtttaccagcaccctgaaatcagaccgctgattaatcatccgggccgggccgtggaagtcagttattacggcattgatgaagatacaggtcttgaagttcgcgtccggccagaccttgaaatatccaccacggatagccgtatcgggttcgacctgaaatcggtatcactcggacgtttcaagcaggatgccatcgaagccatgatccgccgggaaatactcaaccgcgattatcacgtcagcgcggccatgtactgcgatattgccgaactcgaccagttcttctggatcttcgttaacaaagacgaaaattacaactgggtcgcggtggtcgaagcttcgccggatttactggaactcggccgcctggaatacaaaaagacacttcgcgatatccgccaggctatggacaccgatgtatggccgggcccggtcaccaccacgctcactatcggcctgagcgatttcgatatgcgccgcctggaatcgctgcaaatggacgcagcgtaa

SEQ ID NO: 277008 - DNA, 591 bp, Morganella morganii
atgaaaaacatcaatgagataaggagagataacctcatcttcattctggagaagtattacgacggcagacagaaagcgctggccgatgcgctggggttcgccccgaacatcatttcccgctacctttcctcatccgatttgaagagccaccgtaatatcagtgacgcggttgccaggaagatagagcatgtcacgcgggtacaaaaatactggatggataccgaccattacaaccggccggcagaaagcaccgacgatatctattcaccgaccgagatcggcgcaatactggcagataacatcagtacctttatgctgacagacggcgtgaagtcacagactcaactgtctgttaaaagcgggctgggacagtcaacgattaaccgtatcgtgaagaatgaaaccagtgccaccgtggacagcgtggactccattgccaaggcgctgggccgtaaagcctacgaactactgatcccgtccaacgataccgacgtcattaagtatgaccagaaacggtatgctgcactgtcaccggcagagaaagaacagatccaggactttatcgagttcatcataaagaaaaaccggtaa

SEQ ID NO: 277009 - DNA, 219 bp, Morganella morganii
atggaagatttcaattttcatgcattctggaatggtcttaacaaagaagatcgtgttgcgttcgcagagaaagccggggtaactgtcggttatatcaggacacacctgagctacgcccgcagacagccgggactgaaaactatcaggcgattacaccaggcatgtactgagcatggtgcagcagtgacaatggaagagctgataaggttcttcgagtga

SEQ ID NO: 277010 - DNA, 1026 bp, Morganella morganii
atgcgtgactacgggaaagtttcaccacaattctggatagggaagaccggtaaagagatcagggaaaaaggtcacgaagctcttattgtttctatgtatttgcttacaaatccccatgccaatatgacaggcatgtattacctcccagttatttacatggcgcatgaaaccgggctgggtttggaaggggcttcgaaggggcttcgaaggtgcatcgaagcggggttttgccactacgatgaggatgccgaggtggtctgggtgattgaaatggcaaagtaccagatcgcaccggcgcttaaagcatcggataaccgctgtattggcatacaaagagagtatgacagtcagcctaaaaatcaatttttatcaatgttttatcagaaatataaagattgctttcatatgtcgtctgagaggaaaccatcagagaaaaaagaaaggggcttcgaaggggcttcggagtccctcggaagccaagaacaagatcaggaacaagaacataaaacaactctctcaggcgcgcgcgaaaaaaatttcatttctgttcctgaggcggaaggtccaccggcagggaactggtcagattatccgggtaagttcgtgatgaccggtcactggcagccggatccggatttcagccgtaaagcggcacagtggggcgtgatactgaatgagccgtaccggcctgaggaattggccgagtttgtcacgtactggcaggcggaaggaaaagccaaacaccacgcacagtgggaaatggcgttcgccaggagcattcatcagcaacgcatgaaaaccaacgggggaaacaatgggacaaataaacacaatcagaccggcagtccgtttgccggaaaatccagagccatgcagaaattcctgcaaagcgtccacgacaaccacggaccagaggctgttgcagctctggtggaaaatgatcgagctgtacggggacaaatggaccaggaagaacaacgaggaaccgtcatcgatgtggaagcgagcaaccgccggattgagtga

SEQ ID NO: 277011 - DNA, 474 bp, Morganella morganii
atgtggaagcgagcaaccgccggattgagtgacgaccagtttgagatgatattcacgttttgcctcgatcgctgcatgaatggcaatccgtggccgcctgaattgtctgacgtgattgtgatgctgtcggataagctggtggactcaaacgcattcgggatcccgtttgatgacatgctgcgtgattttaataaatacatggcgaagcggggttattacagcagtgctgagatgtatccgttccggcacccggtgcagtactggatcttcactgaccttagaaacagggtgcatgacctgcggctgactgagtctgaggttgaaaagcgcctggcgaagatgatccggcagtgggctgaccgtgtagccaaaggtgagccgataccccgtccggttcttcgcgtggaagataaaacccgtccgcctccggcgtggatggaaatgctcgaaagaaagaaacaacgatctgcctga

SEQ ID NO: 277012 - DNA, 423 bp, Morganella morganii
atgcgggttcaggactacatcgtgcgggttcttgcggataagccggatctcactgccatgcagctggtggtcgccatcaggaacgaccacaaccggaaggtcggaatatctgcagtgcggtatgcgctcgaccagttgtaccgctggaatgtgatagggcgcaaaagaaactcatacaacttcgtccactggcttcggtatgaccaccgggaagggcttgagaatcaggcgcagaccaggcgcgagaatatcgctaaagctctcaggcgcagccatgagcgcagcgaggagacggcagcgaagccccaggttacagagcgaaagccgagagtgcgccagccgattgagcagtatggcgaaccggcacggatgcaaaaactgtttgattcactactgaaaaaggtcaggaacaatgcaggttaa

SEQ ID NO: 277013 - DNA, 363 bp, Morganella morganii
atgcaggttaacgagttcgatatcacgccggtaccaaagccgcgcatgacacagcgggacaagtggcagaaacggcctgcagtgatgcgttacagggcattctgtgatgaagcacggttacgccgcataacgttgccggaatcaggtgctgaaatcgtttttcagatgccgatgcctaaaagttggtcaggagtgaagaagcgcagcatggacgggcgtccgcaccagcagaagccggatgtcgataacctgcttaaagccctgatggatgccttgtttgatgatgactgcaaggtctggagtgtggcggtttccaaggtgtggggtgagtccgggaagataacggtaaggttaccggaataa

SEQ ID NO: 277014 - DNA, 126 bp, Morganella morganii
atgacacagcgttccgagctggcactggtgcaacgaaagcattatatcgagctggtctgcccgtcctgcggctgtagaaatttcgatgtagtgattaatcgtgacatgtcacggcaagttaattaa

SEQ ID NO: 277015 - DNA, 360 bp, Morganella morganii
atgaaaaccttaaaaacgagtgagctttcaggccgggcgttggattgggctgtggcgcaggctatgggtatgcaggttgaaataggcgctgagtatatcgttgatgccaataaatgcgtttacgtgccgtctggggcgtgggttatctgtggtgaatttgtcgagaaatattctattgagcttgtaaacgaactgatcccagatgagcagtggggcgggcgtatggtctggtctgcatcctgtaattacgtgcaggatggctatgaagacggtgatacaccatgtatagcaatttgccgcgctgtcgtggctgtgaagatagggaaggaagttagtgtgcctgaggaactgctgaaatga

SEQ ID NO: 277016 - DNA, 165 bp, Morganella morganii
atgacagaaacacaatacatcgcctttgtcgccagccgggtgttcgcggccagcgtgtggtacggagctgaattttttcctggtcgctttgctctgtatgcaaaaacacgcgagctgatagctggcgacagggcacaggctatatgccaaaaggtgattgattag

SEQ ID NO: 277017 - DNA, 342 bp, Morganella morganii
atggctaaatcaccagccgaacgcaaagccgcacagcgtaaacgccagcgtagcgctggcatggtaaccccgcagtggcagattgaggccgaagaacatgagatgatcaagcgtaactgcgctctgcgccgcgccggtcgtgaaccatacgacgaagccgagtatatccagatgctgatacgcaacgacgatgcacggcttaagcgtgagattgctgagttgtcaaagcgctgctgtggtaagtgtggtgaggcgttgccggtcgctgagtgctgcctgtccggtgatgcagaatgttggaacaccagagggtggcatgagatgaaattgaaggtagaataa

SEQ ID NO: 277018 - DNA, 609 bp, Morganella morganii
atgtcattggaattaacaacgctaccaaccactgctttgattacatcaacaattgctgtgtcattgtttatattaaaggaaatattagaatatataagaaaaaagaaggagaaaaaaaagaatattaaagcaatagatgcattgattgcaatacaaggaattaatataataaaacaattgctattcattgtttatttgtcaaatcaggtaaaagttaattcaaaatattctttttcaactgattatcttggaagagttaattttgttaagtttgatgaatttgaacagttagctgtaccaggtaatatagaaaaattcagtcatgacacgatattggatgttacaagaatggcaattaacaaatttcatatacttgtaaatgttaacggggctaatgagttattaagtaattcaatagatgcatttctttgccatataaagaatgagaaggttgatatgctttcagatgaattaagccataaggaatttacaaaaaaaatagtcaaagattgccgtgaaatattacaaccaatagagagtgtaatgaaaataaatgtatcctatgagaagttgattaattgcttagatgatgaactgaaaaaactctga

SEQ ID NO: 277019 - DNA, 561 bp, Morganella morganii
atgaccatcaaaagaccccgcaaactaccagcacgaaagcctacaccgctgaacgctcagatggagcgtttctgtcaggaatatctcaaagcgcctgataatcagactgatgccgccatttctgccgggtacgctcctggtagtgcctgtaaacgtgcatcagtactgatggcagacccccgcattcaggaacgtatcgcccagcttatgcagcagcggaacaagcgcaccaaaatgagcgccgacaccgtacttaagcggctggtggatatgctggacgcggatatcgcggacatactcaatgagaaaggtgatatcaagcctatcagcgaatggtcgccggtatggcgtaaatccgtggccgcattcgatatcattgacatagacggtgatacccgcctgaaaaaagttaaactcctggacaaactcaaggtgctggaactcatcggtaagcacgtcgatatcaatgcattccgtgaacgcgtacaggtggacgtcaatatctcgctggcggataaactggcagcggcacgtaagcgggcagcagagggcattgagtaa

SEQ ID NO: 277020 - DNA, 1485 bp, Morganella morganii
atgacagatgccgccgccgcgtcgccggaagagcaacttattgatgatatcgccatgttcacgcatgacccgctcagttatgcgctttacgcatttccgtggggcgaggcgggcaccgaactggaaacggccagcggtccgcgtcagtggcaggcagaggcactgggtgaaatcggccagcacctgcgcaatcctgatacccggtatcagccgctgctgctggctcgtgcatccgggcacggtattggtaaatcagcattcatttccatggtgattaagtggggcatggacacctgtgaagactgcaaggttgtcgtcaccgctaacaccgaaaaccagctacgaaccaaaacatggccggagattgccaagtggcagcgtctttccatcacccgcgactggttcacctgcactaaaaccgctatctattccaacgaccctaaccacaccaacgcatggcgggcagatgccgtgccgtggtcagagaacaacaccgaggcattcgccgggctgcacaaccagggcaagcgcatcattctggtattcgatgaggcatccaacattgccgatctggtgtgggaagtggcagagggggcgctgacggatgagaacacggaaattatctggattgcgtttggtaacccgacccgtaacaccggtcgcttccgcgagtgcttccgcaagtttaaacaccgctggcgcacaaagcagatagacagccggacggtggagggtaccaacaaagagcagatcaaaaagtgggaagaagatatgggtgaagacagcgacttcttcaaaatccgtgtgcgcggtatcttcccgtcagcttctgaaacgcagttcatccctaccggccttaccgatgccgccatgaaacggacggtaaccgccgctgaggtggctcatgctccggtaatcatcggtgttgaccctgcctattccggcgctgatgatgcggttatctacatgcgacagggtctgtactgtaaatgcctgtggacgggaaacaagaccaccgatgatgtggtgatggcaaaacgtatcgcggattttgaagacagcctccaggcggacgctgtgcatatcgatttcggctacggtactggtatttactccgttggtatgaactgggggcgcgactggcagttggtacagttcggcggagcctccaccgatccgcagatggctaataagcgcggtgagatgcacaacagcgctaaaacgtggcttaagattggcggggcattggacgaccaggaaaccgctgatgatttatctgctgcggaatacaaagtccgcctggacggaaaaatactgctggaatccaaagacgatattaaaaaacgcataggccgctccccaggtaaaggtgatgcgctggtgctgacgtttgcttatccggtcaccaaaaaagatccgcaatttaaacagaacatttctcacggctcagttgtggctgacaacgattacgatccctacgcataa

SEQ ID NO: 277021 - DNA, 366 bp, Morganella morganii
atgaacaaaccagatattgaaacagagattcagatgaaaggtaaaactgctccgcgagttactccggcgcacattgaaagcctgattaccagcgagcactatttcaccgctgctgatggcgttgccgggttgtattccgcaaaagcacagcgctatcctgatgatacatcggtaccaccagcgcttaatttactgacattttgtgttcttgttctgaaaaacggttttacggtaaccggggaatcagcctgtgccagtcctgaaaacttcgatgcagagatcggtcagaagattgccagacagaatgccgtaaataaaatctggctgctggaaggttatctgctgaaacagaaattaagtgaatag

SEQ ID NO: 277022 - DNA, 207 bp, Morganella morganii
atgtgtggattcagtaagccgaaaatcagtacgccgccaccggttcaggcagcaccacaggagcaggacgaagctgtaaccagcagccgtgatgaagaaatgcgccgccgtcgtgcagcatcaggccgtaaatcaaccatgctgaccggttctcagggggccaccggtgccgcctccaccagcggtaaaacgctgttaggccagtaa

SEQ ID NO: 277023 - DNA, 1662 bp, Morganella morganii
atgtcagatagcctgaaacagcagttaaataagcaactctctcagctgaaagccgagcgcctctcttttgagccacactggcgtgagctgtctgatttcacccgtccgcgcagtactcggtttaccgcctcggaagttaaccgtggtgatcgtcgtaacagtaaaattattgaccctgctgccgtcatggcggcgcgtaccttatccagcggtatgatgtccggcattaccagtccggcgcgtccgtggttccgtctggcgacacctgatcgtgatttgatggactacggtccggtgaaactctggctggaaactgtcgagcagcggatgaacgaagtgtttaaccgctccaacctctaccagtcattgccgctgatgtacgaggatttaggcacgttcgccaccggtgcaatggctgttgttgccgacccgcagagggtgatccgtacagtaccgtttccgaccggcagcttttacattgccaacggcgcggatctgagtgtcgatactgctgtccgtgaattcagcatgaccgtgcgtcaggtgatcactgagttcggtatggacgctgtcagcgataccgtgaaatcacagtggaacagtggtcaatacgggcagtgggtgaatgtggttcacgcggtctatccgaaccttgatcgtcagaccggcaagctggaagcgaaacacaaggcgtacaaatccgtttattacgaagcgaacagcactgacgacaagctgttgcgtgaatccggttacgacgaattcccgatcatggccccacgctgggaagtgaacggcgaggacgtttacggttcatcctgtcccggcatggtggcactcggtagtgtgaaagccctgcaacttctgcagcgccgcaaagcgcaaatgatcgacaaaatcaccaacccgccgttacaggctcctgcctctatcaaaagccagagaatttcgactatccccggcgggattaactatctgccgatggcggacgtgaacaaccagatcaagccgctgttccagataccggctaatggcaccaatggcctgctggaagatatccaggacacccgccagattatcgatcacgcctatttcgttgacctgttccgcatgatgcagaccgtgaatactcgctcaatgccggttgaggccgtagcagaaatgcgggaagaaaaactgctgatgctggggccggtattgcagcgtctggattctgaactgctggataagctgattaaccgcacgttcagcgtgatggcagagaacaacctgctgccggttccgccggatgagatgcagggcatgcagctgaaagtcgaatatatttctgtgatggcgcaggcacagaaagcgatcggtgtcagcagtattgagcgctttatcggatttaccagtggtatcggacagttcaaaccggatgccctggacaaaatcaacgtggacgaaactatcgacgcctacgccgcctcaatcggtgttcctccgtccgtggtggcaactaatgagcaggtggcgcagatccgtgaacagcgtgcgcaacagcaggctatagcacaacagatgcagatggcgcaggccgctgtcggtggcgctcaggcgctgggtaatacgccgatggatgataacagcgcactggctgcgctggccggaggtggtcagtga

SEQ ID NO: 277024 - DNA, 324 bp, Morganella morganii
gtgacagatgcaccggaaacctatctgctcactcctcaggaacaggcagcgcacgatatcgcgcagcgtgatcaacaaaaacgcgctgatgatgacctgaaagcggttatgtcaacagaggaaggccgccggtttatgtggcggttgctgggtgaaagcaatgtgtttggctcatctttctcagcagatccgtatctgacagcctttaaagagggctgccgtaactttggtttacagatgtttgaaggtcttcatcgtgtctgccctgaactctatgcactgatggctgatgaagccgcgaaacaacaggagaaacaatcatga

SEQ ID NO: 277025 - DNA, 663 bp, Morganella morganii
atgaacttatggcagcgcttaatgatgcgtcgcttgtgtgaagagcagaacgcggagggtggtgataatggcggagcggctccgggtacaacaggcacaccggctggtacagaaacaccaccagcgaataacggcggtactcctgcgggtaatgagcaggataaaggtactgagcaaccggccaaagccccgaaagcagatcccggtaaacccgctgtagcagcaccggaaaagtatgaatttaaggccgcagagggtcaggagctggatgccgaagcagtaaaagcctttgagccgatcgccaaagaactgaacctgagcaacgagcaggcgcaaaagctggtggatgtgtacggcagcaagattatgccgaagctggttgagcagcaggcggcacagtggcagcaacagattgaacagtgggctgagcaggttaaggcagataaagacctcggtaccgatgcgtccattggcgcagcgcaaaaggccatggataagttcggttcaccagagctgaaacagtatttgaacgaaaccggcctcggaaatcacccggagctggtgcgtatttttgccaatatcggcaaagccatgtcagaggacggtcttgtcactggcaatagcggcggcgcgaagagtgccgctgatgtgttattcggataa

SEQ ID NO: 277026 - DNA, 981 bp, Morganella morganii
atgccagcacttacgcttattgactgggctaaacgacaaggcgctgacagcaaacaggcaaaaattgtcgaactgctgaatcagaccaacgagatcctcgacgatatgctttttgtcgaagctaaccaggcaaccggacatcgcactacagtgcgtaccggcctgccgtccgcaacgtggcgcatgctgaactatggtgtgccgccaagtaaatcaaccaccgcacaggttactgatacggtcgggatgctggaaacttattccgaagtggataaagaactggctgatctgaacggtcagactgcggagtttttactctctgagtcactggcgtttctggagtcgatgaaccaggaaatggcagaaacactgatctacggtgataccacggtacacccgcagcgctttacggggctgtctgcccgtttcaacagtctggccgcgaagaacggggtaaacatcattgatgccggtgggacgggcagcaatctgacctccatctggttggtagtgtggggtgaaaataccgttcatggcctgttcccgaaaggctctaaggctggcctgcagcaggaacacaaaggtcaggttacgctggaagatgagaacggcgggaagtacgaaggttaccgtacccacttccagtggaaaaacggcctgactgtccgtgactggcgctatgtggtccgcattgccaatatcgacatcagcaaactgaagaaagacccggaagcagccgattcgctcgacctgccagatctgctgattcaggcgattgagaagatccctaacctcgcaatgggtcgcccggcaatctactgcaatcaggctatccgcagttggatgcgccgtcagattaaaaactccaagaacgtcaatatctccatgcaggaagtggctggtaagaaggtggtgtcgttcgatgagatcccggttcgccgcgtcgattccattctgactaccgaaagtcaggttaagtaa

SEQ ID NO: 277027 - DNA, 432 bp, Morganella morganii
atgattttagataaagaaacgatgttctccgtcgatcaggcggttactgtatcagctgccggtaccggcattatcgacctcggcccgctgcgtaatgatttccgtgatatcggtatcggtgagccgctggaactgttcgcacaggtgacagagcaggccaaagccgccggtgatgccacggtgcagatcaaactggaaaccgcgtctgataaagcattctctgatgctaaggctatttttctgtctgaggctatgccgattgcatcactgaatgccggtaagcgcattgtggccaaagtgccgcagggcagtcttaaattcctgcgtctccagtacatcgtgggtgatggcccgttaacggcgggtaagttcacatcaggcattatcctgaatgtggatgctcatctggtctatgaagctgtcagtaattaa

SEQ ID NO: 277028 - DNA, 336 bp, Morganella morganii
atgtcacgatataaagtattgaagaaatcctttatcaatggccgcctgctttatcccggtgaggaagttgagttcaccggtatggcggggagtaacctgctgctgattgaaaccggtgagcgtgtagtggcgaatgaaggcaccaatgccggtgacgataatcacagcggtgacggtggcaccggagcctccggcggcgatggcggggcggataacgaattaaccgcgctgcaggatcagtaccagcagttgtttggtaagaagcctcattacaatgccggtgccgaaaaactccgcgcagatattgacgcgaaacgtaaagagcttggggtttaa

SEQ ID NO: 277029 - DNA, 312 bp, Morganella morganii
atgaaaatggtcaaccttaaaaccagcactgaaacctacgagaacgccagcggcaagaaagaaacccgtgatgaatacccgtatggcctgcgcatttctctggaaaatgacacgatagaaaaactcggtaccgccgtgccggatgttggtgaaagcattgagctgcatggcgtggctaaagttctgtcgaaatccgtcaatgagcgcgaaggaaagaaatctgtttacgttgagcttcagataactgacatggcattgggatccggcagtgaaaaaacagcggctgatgtgctgtttgatgggggtgaatag

SEQ ID NO: 277030 - DNA, 606 bp, Morganella morganii
gtggcctcagaaatcgaaatctgcaatatcgcgctcagccgcatcggtaacagccgatctatcaacagcatgaccgaggccagcaaagaggccaatcagtgcagcctgcactatgagcagtgccgcgatgcggtactgtcagacttcccttggaattttgctgttaagcgcgtggcgctggctgataccaataatccgccgccggaatggaaatatgcctaccgctaccctacggactgcatgaaagccattgcgattatccgtcccggtgaaaagtatcaccgccctgataccacgattcattttcaggtcggtgctgatgacgaaggtaccgggaaactgatttataccgatcagccggaggcgtggctgcaatacaccgcccgagtgacagacgtcaacatgtatgacgcgctgtttaaagatgcgctggcgtggcgtctggctgctgaactggcgcgacctctggcatcaaatgccggtatcggtaatgaggctctgcaactttaccagatgacgatcgccagtgcggctgctcactccctgggggaatcatcagagccggtcgattacatggatgagtttaccgcagcgaggttatcgtaa

SEQ ID NO: 277031 - DNA, 2463 bp, Morganella morganii
atggcctacagtattatccagccgtcattctccggcggcgaaatcgccccgagtttatacgggcgcgtcgacatggcgaagtacgctacagcattgcgcaagtgccgtaatttcattgtccggcagtacggtggggcagaaaaccgcccgggtacacgtttcattgccgcggctaaatacggtgacaagaaatgccgcctgatcccgtttcagttcagcacggtgcaaacctatgcgctggagttcggcgatcggtatatccgtgtgttcaaagacggtgggcaggtgctgtatgccgatggtgagcacaaaggtgaagtgtttgaactggcgacaccatatgcagaatctgagctgtttaagctgaaattcacgcagtctgctgacgtaatgaccatcgttcacaccgatcacccgcctatggaactacagcgttacgatcacgatgactggcggctggcggaagtggagacaaagaacggcccgtttgaagacatcaacaccgacaaggcgatcaaagtgtacgcgagcgccagtaccggcacagtaacactgacggcgacacacaacatcttcggcagcgagcaggtggggaaacagttttacctggaacagcgtgctgttgatgaagtgccggtgtgggaaacagataaagaaaccgcagttaacgatcagcgtcgcgccggcagtcactattaccgcgccaataccggcggtaaaaccggtacgctgcgtccgtctcacaccgagggcatgagctgggacggatggggcggtgataatggtatccagtgggaatacctgcacagtgggttcggtattgtcaaaattgaatctgtcggcagtgacggtaaaaccgctaccgggaaagtcatttcttatctgccgtccaacgccgtcacagcgtccaacgccagccacaaatgggcgcgggcagcatggaataaagagctgggttatccgagtaccgtgacctattaccagcagcgcctgttctttgccgggtcccgttctcaaccacaaaccatatgggccagccgcagcggcgattataaagacttcgggcgcagtaacccgattcaggatgacgaccgcatcatctacacctatgccggtcggcaggtgaatgaaatccgccacctgattgacgtcggttcgctggtggcgctgacctccggcggagagtatcaggttaccggtgatcaaaataaggtactcaccccggccagtttcgctatgtcgtcacagggtgccaacggatccagtaatctgccaccgattgccgtggcgaacattgcactgtatgtgcaggaaaaaggcagcgctgtccgtgacttggcgtattcattcgatgtggacgggtaccagggcacagacttaaccattctcgccaatcacctgttccagaagcaccagattgttgactgggctttttcgaccgttccttattccgttgcctggtgtgtccgggatgatggtgaactgttggcgttaacctatctgcgcgaacagcaggtttttgcctgggcgccgcagcatactgacggtgaatttgaatctgtctgtaccatcagcgaaggtgcggaagatgcagtgtatttcgtggtaaagcgcaaggccggtaaaaagacagtccgttatgttgaacggctggcaagccggttattcacccgaacggaagatgcgttctttgtggactccggcctgagttatgacggccgtaatacagatccgaataaaacggtcgttattaccggcggtgatggtgactggtcatatcaggaagagtaccgcctgtctgtgctggcagataacgtgttcaaagagagcgacatcggtaacgagatccacatcgactacaccgaggacgatgagaacaaaatactgaaatgccgcattgtcgaagtcattaatagcaaagaagttacggtgtcacctaaccgtaatgtgccaccagcgttacgcagcacgatgacagaggcgtggggctttgcccgtaaattctttaccggtatcgggcacctggaaggaaaaaccgtgaatgtgctggcagatgccaatgtagcgccgtcggttgttgtctccggtgaacgggtagaaatcgatacaccgtcagtagtggtgcatatcggcctgccggtcaccagcgagctggaaacactggacattcatattaacgggcaggaaacgctgttggataaaaagaaactggtgaaagttgccagcctgatcgttaattccagccgcggcgtgtgggccggtaccgacaaagatcacctgtatgaataccctcagcgtgagtttgagtattacgacaaccctgttgatgacgcgaccggcattgtggaaatcaatctggattccaactggagcaaaaacgggcgtgtctttatccggcaggaagatccgctgccgctgtccatccttgcggttatcccgcgtcttgatgtcggagggttttaa

SEQ ID NO: 277032 - DNA, 465 bp, Morganella morganii
atggcgcacgtacagattatcccggcaacggctgaacatattcagcagattttgccttatgtccgccaggctgatcacgatgagtttgcggcattctccggccagacggcagagcaggttcttacccgtggtgttacctgttcgacaaaggcgtggtctggtctgattgatggtcaggtcgttacaatattcggcgtggctccggggtctatcctgagcggtgtggggatcccgtggttggtgagttcatctcaccttgaaacacatcagaaaatattcctgcgtcgctgcaaaccggtactgaaagccatgctgtcggtctatccggtgctggagaattatgtggatgcgcgtaaccacgttgcaaaagcctggcttcactggctgggtttccggctggaaccggcggaaccgatcggcttaatgaaactgcctttccatcacttcaccatgagggcgaaataa

SEQ ID NO: 277033 - DNA, 573 bp, Morganella morganii
atgtgcgaaccaaccatgctggcggccgccgcaatcggtaccggcgctatgcaggcatacagccagtacacatccggtaaatttaacgccgatgtcgcaaaccaaaatgccaaactgaatgaagctgcagcggatgattccattaaccggggtaatgccgaggcagcaaaacagcgctcacgcgcacggcaactggcagggactcaggcggccactatgtcggccaatggtgttgatctcggtgctggcggtgcgctggatatcttcggcgatactgcggccatgggtgaactcgatgcgctcaccgtgatgaacaacgcttcccgcgaagcatacggctataagctgcaggcggctaatgaccggctcaatgcgaagatgtcacgccgtcagggcaatattggcgcagtcggtacgatactgaccacgccgctgaatgcatggggtgcgtacaaagtggcaggcggtaccggcagtattttcggatccggtgcgactaaagcagcatcagggaccggctcaaacctgtttgacgtgacccgccagaccggcaactacggacgattcttttaa

SEQ ID NO: 277034 - DNA, 2808 bp, Morganella morganii
atgccgacagtaccaacctataacgaaagacaggtcagcagcagcccgttaccatccaacggattcagcgcacagtcatcaccggaacacttcggtgccgggctggcacaggccggtgatcagtatatcaacgcttttgctgaggcaaagcagcgggctaatgtggcgttgtcgcaggatgctgcgttacagctgcgccagaaagccaatgaactgatgaccgatccgcagaatggtctgctggcgcagcaaggtaaaaacgccataggtaaggcggcagagtaccagaatcagtttgattctttcgccggagagattgcggccacgctgccggacgataatgcgcgcggacacttcatgcagcaggcgcaggaaatgcgcttacagttcggcagtcaggctaataagcatgaaatggggcagatacagtcatacgaaaccgatcagtttcagtccacgctgacgctgaatgcggaaacggccgccacgcagtacggtgataatcaggcgtatgtctcaactaacaagcaggtgtttcagcagatagaagacttcggtctgtctcacggctggagtgatgagcagatcctggctaaaaagcaggagtttaaaaccagtaccgcccgcaaagccattgagaaccagatcggcgcagactatatgcagttcatgcagcagaacggtgaaccgtccagcctcagcggtgctgttcgtgtcagtggtgaaatgccgtcaggtgctgctgtgtcagatgggtccggcaacgcccggggcgtacgtaacaataacccgggcaacatccgtaaatcaaaagatgtatgggttggtcagacaggtaatgacggtgcgttcgttaccttcgccacaccggcacacggcatccgggcaactgggcgtaacctgctgtcatatgcccgtcaggggtatgtcacacctgaacagataattacccgctgggcaccaccggaagatgataatgacactgagggatatattaaatttgtctctgaatacctcaatgtcccacgtgacacccgccttgatttaacggatctgaacacactgacacgtctttcaatggcgataatgattaaagagaacgggcaaagcgagtttgataaaatcgccggtgatgatatctcgaacggcattcaggcggcacttgggctggtggatttgccgcagtctggacaggcacctaagcgccttaccggatcagcggcatttgatgctctcgaccaatcagaccaagcgaaatatctgcgtcaggctgagcagatggataaacagcgccagcaaaaagcacaggaagaactcggtaccagaatggctgatgcttatgctgcgtgggagaacggattggatgcacccggtgcgccgtcagcgggtgaaatcatggcagcctttggctacgataaaggcactaggatgctgactgatatgcaggaggcaaaacgctatgcggggcttatttcagcagcgaaagatatgacggcaccggctcagcgttcattgctggagcagataaagccagacccgtcacaacctaattacgccagcagcatgcagcgctgggagcgtttcggtaaattcgttgacagcaacattaaggcacaggagaaaaccttttccgcaaaccgcctggagctttccatacagaataacttcccgttggatccgaccgacaaaaacaatcaggaggcagcggacaactacttcgagaaaaacttgcaatccggtttcagtctgcgtgatgaaaacagcctgaatgctgttgctgaactttcctcgcgtaccggcattattccgtctcaggtaaaaacaatcttcaataccggtgcaacatccaaggatcccgaggtggttctgccgattgccaaaatgtacgggcagatttttgataataacccagcagcagcaactgatatgccgtcctcaaccatggcctattacaccaaagtgtacgaacttaaccgcgccggaatgcctgaagataaggcagtcgaaacagcgtaccgactgacttatgaacaggacgaccgtaccaagcaaatgatcgcagcacaggtgcgtgacaaggattatatgaagggccgcgataaagcggcacaggcaaatatcaatagcttctatacgctcggtgggttttcgtctccgggtgcggataaacctggcatcaataaccgtgaatacctgcgtgattaccagacgctttatgatgccaacttcgccgaaaccggtggtgacgaaaaactggctcagaaaatgactgatgctcaggtgaaaaagacctggggtgtcacctcagtaaacggcaaagaagaaatcatgaaatacgctccggaagctgcttatggtattacgtcatccggtgctggtaactggattaaggggcaatgggaagaggataaaaaacagctggcatcaaaagtattcggcgggctgccggaagatgcagaaatcgttctggtaccggatgctgttactccacgtgatcttagttatggcgtaatggttaaacaaactggcagtgacgatgtaccaatttaccttccgtactatggtgacaacgggcagttggttcgctttaagccagatcaggcaacatcaccgatgtaccgtgaaatcatggaagaaaaagagcagagcgtcagagatgcggcagcagaacgccagcgcttggagagtaaggcggaagcggacaaagccagcgatgagcgccgtgatgcgcttcgtgagcagtacaaaaatgcacacgacaaacgcgttaataacctgagtaactatttttcatggggtaaaaaataa

SEQ ID NO: 277035 - DNA, 3396 bp, Morganella morganii
atgccaatctatgagatggaaccggaacgcatcctgcctgctgacgtaaacgccatacagcagcctgagccggtatatggtgataacgaaaaaccatcctggtatgcgccactgaatccgctcgatgacagcaacgagacaaaacgcctgcgtgacgctgcattccggattgataactctgtcggcagtctgattgctaccatgccgtttaatcagtttgaggcggtagatggctataacccgtttgaagacgataatacactggcgggatatgaagattatgcagatgcgtttattcactctcaatcgccgttggaaacgtcagctatcaagcagcgcatagatcgccagatacaggacagaaagttgctgtcagaggctggcggcgccggatttaccagcagtctggctatgggggtgattgacccgataaacgtagcagcgacttttattcccggtgggctggcggtacgcggcggaagtgtggccagaactgccggtactctggcgctatcaaacgccggtgccggagtgttgtcagaaacggctctcagtgcaacacaggaaacacggacgctgacagagagtgcgcttaacgttacatttgatgccaccctaggcggcgtgatgggatccgcaattcagctggttaaaaaccgtggcgcgttggctgctaaattccgtaatgatgtgattggcgaacaacaaactcaaccacaaaatattccaaataatattcccggagacagaagcatcggtgcagctgaggtgttcgatactacgctggaacaggaagcgataaagggaccatcttttgttaacagaacaatgaatgtcagcccggtgggccgtgttgcacaatcaccgtcaaaaatcgccaggcaggttaaccagcaattggccgaaaataatttcacctatgcaaaaaacgaagaggggatcgcttcgttcggcgcggttgagactgctgtgcgccgctttgatgcgctggtctataaacaggttgagtccacccgcgactattacaaacagtataagcaggccgcccgtaccggtggcgatacccgtatgagtcatattgagttcagcgaggcggtgggggatgctatgcgtaatggtgatcagcatgccataccacaagtagcggaagcagcacgcgcaattcgccctatcgttgagcagacaaaaaatcacatggtggaattaggtattttgcgcgagggcgtaaaagttaccacagcagaaagctattttccgcgtatttataaatttgacaaaatactcagtgaccggtctgagtttaaaaaggttatcgcggactggttaggcgaaacaaatcagattgctgttaacaaagcgcagggcagtcttgataaagcggttgccggtattgaacgtgcagaaaatgcccggccggcagccgagaaactcggcgctgaaattcgcgaggcggaaagctggtccggtaaaaaaacagaactgctgtcagaggtcgataaaaacatccggctgatcggcgaaaaacaggcggttgctgatgaactcagtgccctgagaggattggataagcagacaaagaaacaggcaaaacgccaggcgcaactggaaagaaagttgtctgcaattgacagcgcagagcagagtttaccgaaactacagcgccaccttgagatcctggataaaccgcgtcagttccgcaatgaatacgcacgtctgtcccgtcatgccaattcactgacccgctttgaccgccgccgtcaggcagccatgcgccgcatggagccaatggctcgtgaagagcttgaggcggcggctgacgatattatcaataaaatcatcggcgcacccgcaggcattgttccaggagaactgatcccggacggactgacaaagcacgctggcttcacaaaggcacgaaccctgaacattcccgacgaacggataaaagatttcctggaatcggatgtgaattacgtgatggaaaattatatccgtcaggtggccccggaaatcgaactgacaaaacgatttggccgtgttgatatggatggccagataaaagcgatcacggaggactacaaccgcctgatatcagaagctgccacaccaaaagaacgggcaaagttggaaaagcggcgtgaagcagatttacgagatatccgggcaatgcgtgaccgcctgctgggaacctacggcgcaccgaaagatccagccagtttctttgttcgtgccggtcgcgtggcgcgtcacgttaacttcctgcggctgctgggcggcatgaccatttcgtcactgccggatatggcccgtccgattatgcagcatggtttgcgctcggcactgaaaccactcggcaagatgatgacggacatcagcaaaatgcgtatagccaaagcagatctgcgggagatggggatcgggctggaatatgcattgtccagccggtcaaaagtgattgccgatctgaatgacccgtacagccgccggtcattcctggagcgcggtctggaatggtcatcacagaagtttggcaacttcacgctgatgaaccagtacaccgacaccatgaaaatgtggtctgggcttattactcaatccaaagtgctgaatgcggccaacgccgttgctggtggtaaaaaactaagcaaaaaagagatcaccaagctggcacatatcggcattgatgaatccatgctgcaccgcattgctgatcagtacagccgccacggtgaggatctggacgggctgctgaccggtcatagtcacctgtgggatgacagagtagtgcgcgaggctttccagtcagcaatactgaaagatgtccgcaccacggtaatcacacctggcatcggtgacacaccgctgatgatgagcagtgagttgggtaaaatcgtgatgcagtttaaaaccttcttctttgccacccacaaccgcgcgctggtgtccggcattcagtccggtgatgcctcgttttattacggtgcgttattgcaggtcgggctgggttcgctggtttacgtgctgaaatctatgatggccgggcgggaaataaacaccgatcctgccaacctggtaaaagaagggctggactggtcaggtatgatgggctggctaggagagccgaacaacgtactggaaaacctcagcggtggcacctacggcatgagcgctatgttcggcggtccaccagcatcacgctatcagagccgtaacggtatcggcgcattactggggcctacatttgacctgggcggcgatatcaaaaacatcactgcaggtgtgctgaatggtgaatttgatgatcgcgaagtgcgatctgtacgcaagttattgcctttccagaacctgttttatttggcaccattgctgaatcaggttgaagaacagatgaaataa

SEQ ID NO: 277036 - DNA, 309 bp, Morganella morganii
atggcgatatggagcaaggaaaaattacatgccatccagcgcgaatacgatagagcaatggtaagttatacagcatcaaaagtggtcgcggcggcatcaattatcggcgtggtagcgtcatttctttttatgaaaagcgaggctgtcatgtttgtgtttgttgctattggtgctgcgctttatctcttccattgtcgcgataaattaaaaaaagctgaatatgttatggatgacgcttgcatgtccctctttggcaagagatacaagcagtcatttactgacttagctaatcatatttgcaaattataa

SEQ ID NO: 277037 - DNA, 252 bp, Morganella morganii
atgaaacagaaatatgtgtatcaatcgcctgaaaactatgcagaaaaagtaaatgacaatgacgggattaagcagctttccatcacatcgatgatcgaagagttactgcgggaaatggaccaggatggccatgatgtatcgggacctatgattgagctggtggcactgaaaaattatgttacgcatacggagaagcagaaggagaccgtgcgaactggactagaatttgcgttgtccgcactgaagaagtga

SEQ ID NO: 277038 - DNA, 2187 bp, Morganella morganii
atgaccgtatcgaccgaacttagccatgaagagtacaccggcaacggtgtcaccactgatttcgacttccgtttccgtatctttgaagcaaagcacctcgttgtgtccgtagccgacccggacggaactgagcgaatcctgacgaacggaaccgactacacgctgcgcggtgtaggctcataccgtggcgggaaggtaattttaaaaatgccattggcaacaggctggaaaatcgggattgcccgtgatcttccggccgttcaggaaaccgacctgcgtaaccaggggaaattttttgcagaggtgcatgaggatgctttcgactacctcaccatgctgatccagaagtcgctggggtatctgtcactgtgcctgcgtaagccgagttttatctctgatcactacgatgccaaaggcaataaaatttccaacctcggaaagccggtaaaggacggtgatgcggttgatctcagcacgatgaaggagcacatcagcgcgaaagataaacgctctctgcgtgttgcagataaggatattccggcattgcctaataccgctaatcgtgccaataagctattgtcgtttgataacatcgggaatccggttgttattgtgcctgagtccggaagtgctgcggatgttttgactgagttgggaaaacaggatggtttcgcgctgataggcggactgacagacaactaccttcgtgtgtttgataatgtcgctgcaatggtagcggaaacatcactaccacttggggcaacggttaaaacacgcggatattatacgattaatgatggtggggaggctgagtacacagtaaccaacgctgcagcaaacggcatcactgatattgcattgagcaatgggttaacagcgtctatgttaacctacggggatgttgatatcagaactgttgggtgtcgcattcgggaagatgtgggtccgcgcattaatgaattgcaagaaatcgccagggtgaatacggtaataattccacgaggtcacttctattgcaacacgcagattaatgtacgtaaaagcttcttcttcaaagatggagcacaaattatcaatcagaccttgcgtgatgatatgtttgtctttgaaactgatggtatttcattcaggagtgataaacgaggtggaggtagaatagaggttgacccatcgcttactggatgggggcataatgtagctctagtcctcggtaaaaataatctgcgaaatttaacaattgagaatgtaaagctctggcctaattggacggagcgtcttggtacttctctccgtatccgcatggataacgtgcgcgacggttctaacgacgacaacaaagatcgacgctggaattcagtatgctggtgtaattttaacgggttgcacttagagtacggaaagtatgggttatacatcgaagcatacgaaccaacagataacgctgcatatacacaagtaacaaactggattacggcatgtaactttaagaataatgtaatacttgcagacaatggaattgtctgtaagtgtgttcctaagatagatggtcaatatgcatatcacacccaaataggtaaccttgaatttgaatcaatccaacaatggacatctacaagcgtttgggcagtgcaggtagatggtggtggtatgaatattttcaaacacttcgtgtgggattacagttactacggagctcaaggtaaatatttggttgatgttcgaggtgctgacggcagggataataaaatagtaacaaacttagagccgtctcttattaattttaatacattttcaaatatttttgaatcaacaaagtcacatgaagtcaatgctgtcggacttagaagaatatgtaatatttcaaagaaaaatggaacttttgttattaacactgacgcatataagccatgtggagtaaataaaataaccaatgatacaaatgatgattacaatattattattgaatataggcaaggcgtagagaattggaggccatacattttcacacaatcgttgacacaaaacagagggtggaggtactctctcattccattatataatcagtcaggctccttttctggaaaagcattctttaatattttaaacaacgaaaccaataatattattaaggtatcagaacttcctgatggcgttgagtttcacattgaaatagtgtgcactaactaa

SEQ ID NO: 277039 - DNA, 1617 bp, Morganella morganii
atgactaatttttataaaaaaacatatgctatatttataattattgcccttgcaatggttgggtatatgtcatatttagcgccaatgcaatcagatgactactcttacctactgaaagggcttgatctacagacgcatgtaaatcattacttaagctggagtggaagatttatttctgactacattagttcagctatacttattttgacaaatgatttagcaaaagcatttttaacatctgtagcatttgtttcaatagcactcattattacatcaataccgtctattttgtataaaacaaaaaatactttacttagtttcttgtttgtgttttctttatattgggtggttaatccaaccttaggtcagacggtattttgggttgttggagcagcaaattacctatttacaaacttatttatttgtttataccttttatttttaagtctttacttatcacatggtagaaaatacataataccattgcttattttctcaataccagcaggacttagcaacgaaaatacaagcgtcattgttgtgtgcatatcagttgtttcaacagtatatgacattataaaaaataaaagctatttattattaacatcatcaatacttgtaattattggagcctgtcttttaatattaagccctggtaatttctcaagagcatccaaccaggcttttgagtggtggacgcagatgacgctatctggtaaagccaagtactttattaaatatgcagtgccaatatcacttaaaaggatatggcctttactcataacatcaattattttacttgcgatatcttataatttaaagaaagataaagagcaatttattacatctgcattattctttcttgctggcttcgcgagcatattttcaatgatgtttgcacctacattccctgaacgagcattatcaggcccatgtttgtttatgattatatcgtgctcaatttcatttaatataatcaatgttaacagtacaaagctaaattcactcatattaaaaccagtcacgttagtttacgtacttcttttttctttatcatatactctcatgacttattcgtataatagattgctgattcaaggtagcatacggaatgaatctatcagagataatataaaagatggcaatatatcattttatattcctaattttttctggccgtcatcatttaaaagaggtgactctgtagataaatttagctctgaatcagctatggggaaaatgtatggcgttaaaagcatagatgcatttgaaccatattttgattattcaatattaactgatggcaaaaaaacaaaaacaaatgtcgacatgccagacgggagtaatataaattgtatcgtaattggaaataacggcctaattggtgggtcatcaattgctgctgtagttgatcagaaaaaaaatgatagcattaaagttaacataaagataattgactcagatgggaataatataaatataagcggtaatagtgatggtgatttgttttacgtaaacaaaataaatggaatgaatattattggatttacatcaaaagtaaataaaaaggatatagtcaagttgataatcaacaataaagaagtaacgataaaataa

SEQ ID NO: 277040 - DNA, 924 bp, Morganella morganii
atgaaaatatcattagtcgtcccggtatttaatgaagaagaagcaatacctatcttctacaaaactgtccgtgaaaatgaagaactaaaaaagcatgaagtcgaaatcatcttcatcaatgacggcagcaaggattcaacagaaagtatcatcaatgcactggctattgcagacagactggttaagccactgagcttcacgcgtaactttggcaaagaacccgctctgtttgctggcctcgaccacgctacgggcgatgctgttatccccatagatgttgacctgcaagaccctatcgatgtcatccctgttcttattgagaagtggcaggaaggagctgatgttgttctggcaaaacgcacagaccggtcaaccgatggatggttaaaacgtaaaaccgccgagtggttctataagctgcacaataaaatcagcacgccgaaaatcgaagaaaacgttggtgatttccggctgatgtcgcgggaaacggtagaaaacattaagctgctgccagagcgtaacctgttcatgaagggcgttctgtcatgggtcggcggtaacgttgatattgtggaatacacccgcgccgaacgctcagcaggtgaatcgaaatttaatggctggaagctgtggaacctcgcacttgaaggcatcaccagcttttctactttcccgcttcgtatgtggacatacatcggcctgtttgttgccgcgctgtcatttgtgtacggaggatggatgatcatagataagctcatatggggcaacccagtaccaggatacccgtcactgcttgtgtctattttgttcctgggtggtatccagttaatcgggataggtgtgcttggtgagtatattggacgtatttatactgaaagcaaaaagcgtcctaaatatttacttaagggtaaaaagaatgactaa

SEQ ID NO: 277041 - DNA, 363 bp, Morganella morganii
atgattaaactgtttgccagatacttttcagtcggcgttatcaacaccctgcttcattgggttgtctttgctgcactggtctacttagccagcacaacacaggcgacagctaacctgatcgcgttcattgtcgctgtcaccttctcgttttttgccaacgcaaagttcactttcaagaaaaaggctaccggtggccgctatgtagcctttgtggggttcatgggtgtccttagttacctgaccggcttcatcgcggataaagtcaatgccgcacctattatgaccctggtgacgttttcagctatcagcctggtgctcggttttctttactcaaaattatttgtttttaaaggcatggaataa

SEQ ID NO: 277042 - DNA, 372 bp, Morganella morganii
atgcatgaagacctctctgtaaaaaccacgctcagccttgctgcgttcttcagctactttgccgggttgcctgccgaagtggtgatggggtccctgatgggggccatctacttcatcaccgctgccactgaatatacactgctgcgccggtcggtattggcactggtcagctttatttccggcctgctgtttttcagtccggcagcggcgatgttcatcaaagtaaccaagatattcgagatcccacctgacgcctacagcatcgatagcatcgacgccgtaggcgcttttgtatctgcgttactgtcggtgaagctgagcatcaaagcgtaccgaaaagcggatagtccgcaaggaggcaatgatgtttga

SEQ ID NO: 277043 - DNA, 273 bp, Morganella morganii
atgtttgagaaagttttgatcattctgaatgccgtcatctgctcagtgatttttgtccgggtgttttcgttcagacgaaacggccggcagcactgcgcaaaaggggcatggatagcctggctcattctgtcttattccgcgagtgtgccggtgcgggcctactttgatcctgtctatcacgctgatatcaccagcgtgatttcaaatcttattatctgtgctgcggtgctggtgtatcgcggcaatgtcatgtcattttttaaagcggggtga

SEQ ID NO: 277044 - DNA, 477 bp, Morganella morganii
atgccggaacaggttaaacaaaaaatctttaaggatggtttcgttaatacaggggcgcgggggatccggaataacaaccctgggaatatccgtcacagcaattcaaagtggcagggacttgcagcgacacagccggatagcaaattctgtgcattcatttctgccgagttcggcatccgtgcgctgatgaagctcctgcagacgtacaccaaataccagggtaaaccaaatatcggctgcggtaagatcgataccgtggaagaaattattgagcggtgggcgccgtctggtgataacaatcacacggagaactacattaaacgggtctgtaaagaaaccggctttggccgtcacgactgtttaaatctgtatgacaaagacacgtcactcgcaattgctaaagcgattgtggctgtcgaaaacggccagcagccatatgttgatgatgtttttaaacgagcctggacacttatctga

SEQ ID NO: 277045 - DNA, 495 bp, Morganella morganii
atgaagaatatagccattgcactgatcgctctggctgtctctttcgctgctggctggtgggccagcagtaccctgcatgacaacaggcaaatgaaaaatcagatcgccggtcagcagcaggatgagaaagatgtggccacaaatattgaactgcgccgggatgcagacgaacggcagcaggtaagcatcagggaatatcaggatggaaaaaagagtgatacgatacgcacagaggctctgcttgatcgggtgcttaatcattttgaccgcatgcagcagccagccggtaccacgaaagcagaagttgcagatcccggccacgccgatacctgccgaattgagagagacaaagccggtgaactttctcgacaactacgaagcacacttgaaaagtatgggcgtgaagctcagcgggctgatgagaatacccggctccttaatctctgtatcattgacctgaaagcgaaggaaaaattgctcgaaaattaccggtga

SEQ ID NO: 277046 - DNA, 2133 bp, Morganella morganii
atggcttacgcacataaaaaacactttaataaaacattactggcattattactgacgtcacaaagcacactggcattttccgcaatggattatgaagtctcaaagataaaaaacattggtcagtctgccgccatatcagcagatggtcgtgtagttgccggtacttatgaaatctcaaatgataattaccgtcctttcattattattgatggcaatgcagttgacctgagtaaatatgcagccgggaataacagtatttatgtctccggcctttcagcagacggtaatatcgccatcggttatatcgttgatgtaaataataaatctgactctaaaatgtatatttatgataccaataccgatacggtgaatatccctgatcagcaggcatttgccagtgtcgcttccctgggtatttccggtgacggtaaaaccgttatcggcattgcagacgaaaaagctttccgctttagcggacaggacggcattacattattagatccgtcagaaacagcaacctccaccgcaaacggcgttaattatgacggcagtgtaattgtcggccgcttcatcagcggcagtggtcaggcatttaaatataccggtgataaaggcatggtttcactgggcaccctgagagaagagaatgcgggcgaatccggcgctaatgccgtatccgctgacgggcttgttaccgtaggctggtcaaatatcagtgaatatgaaacacatgcgatgagtcataccgataaagacggtatgcgtgatctcggcaccctgaagaaagataacagcggctattccagtgcttcatctgtttcaagtgacggacaatttattgtgggttcatccgataacgaagatgatatcgcacgtggctttgtctatgtttcaggtgaaaaaaagatgtacgaactgaaaccactacaggaaagctttgaaggtgaatccagtgcggaagccatttctgcggatggcaaagtggtcgccggttatgtgcagaatgacaataatgaaacatccgctgttctatggaaactggactataaaccaccaatgaccccgcttgagccgtcaaaaccggttgatccgtctgaaccactgacaccgcttgagccatcagagccggtcaaaccagtcaaaccaatcctgccgctgacaccggttgacccggctgataacggcggtatcacggtctctgatcctgttgatattattaaaacccgcaatacagtaacaaaactggcaaacagcagttatcaggttctggatttataccagaccgccctgtataacctcgcggaaagccgttgccagatgggtgacgataattactgcgccggcctgtttacccaatatgacaatgtgcatcagaacagccgtgtggccaccggcgtatttggttcattccgtttaccggcagaaaactggacgctgggcgcgtcactgaatttcgccgtaaatacccgtctggccgatggctacgacacccgcggcaataatcatcccggtgttggcgcatggctgcgttatcaggaaaataaagataactccggctttaacagtgagctttccgctgcatttttacagcagggtctggaaatcacccgtcaggcacaacggggcactgaaaccggaaaaggcaattctgatatcaaaggttactatgtaaaattcaccaccggttatggcattaccgtgagtgcaaataccctggtgacaccactggctgctattaaatatcataatgtcacccgtgccggatatacagaatcaaatggtattgatttcccggcaacctatggccgtgccggaaataaaaaccttgatttacaactcggcgtggatttgaaacatcagtttaataagagcacagaactggatgcaggtatcggcgcggatattaaactcagtcaccagcgtgatgcctttaccggccatattcagtatgtgaacgatgctgattatatttatgatcgcggcaacagccagagtgtaaaaccgtatgcccgtgccggtgtgaattactttatcacggagaactccacccttcgcggcgatattggttatcacaccacggattaccgtaatgatggtttgcagattggtctcagctattcataccactggtaa

SEQ ID NO: 277047 - DNA, 1524 bp, Morganella morganii
atggaattttttattctcgctattaatatttacgccataaatgagtcaaattttgttatgtgtgaatataatttacacgcggtaataattgaggtttttatgaataaagtaaaatcaggaacgtttaatagacctaagtcatggaggagtaaaggagtcgctggtgatatttattattaccagggaaaagggatgttttttaaattaaagcgtgatggcaacccatctgataataattggtactttccgactgaatctgagagtaatagatactgggattgggtggggtatttttccggaactatgtttgagccaaaaatttggcgtgaatacggtgttcccgggtgtatttactatgaagaagaatatggttatttgcgtctgaagaaagaaggtaatccatctgaaaataaatggtatttcccatctggtggtaagtccaatgaatattgggactttatcagttttaaagcaggaaaccctgtagaacctaaatattggcaggatgaaggtcagaaaggtgattattacatagatgaaaggaatggcaattattttatttttaaaacaaatggtacaccatctgctcaccattggtattttccggaggatggtcgggataatgagtattggcactgtatgggaaaagtgactaaagcgcgctggctgaatttcattgacggaaaattacctattaatcagatatcattacccgggacacacgattctgctacaggtacatacagtgaagggatcggtgaaggcggaatagtaaaaacacaggatgagtctgtttatgagcaacttaaatcgggcgtccggtttattgatgcacgttgtcgtcatataagtaattcatttgccatgcatcatggaatcatatacttaaataaaatgtttggtgatatcctgaatgaatgcaagcgttttttgcaggaaaacccgagtgaatttattcttatgtcagttaaacgtgaacatacagaagagcaatgtacccggagttttcaggatacctttgagaaggaatattatgattcttattggtggtttggggaggatcgtttccctctgctggaggaagtcagaggcaaaattgttcttttcagccgctttggcggaccccacggaatacaaacgtcctggaaagataatgcaacatttgatattggcgaaagaatacacgtacaggatgaatataatcaaactgatgaagtcaaaaaatggcatgcaataagagatgcatggtatttttcggcggacagagggaaacctgaatggatgacgattaattttaccagcattgcacctgaattctggggtacaaccagtatccgagattatgctgaagataaaaacccggaactggctactcatataatgtcccgtggtgaatgctgtggtgtcgtcgtttctgattttcataatatcgctatgctttctaatggtgttatcacgactaactttcggaatatactaagtccggcaagaggattgtttttagcttttttattaatatcatag

SEQ ID NO: 277048 - DNA, 666 bp, Morganella morganii
atgaatatcagaccgccgtccgccccttatgttgtcaatgcccccagtccccgggaaaaatggtgtttccgttcaccgtcctccaaagatatcagtaatgcggactggctgttatacagcgaagacctgccggatctgcaatcccccggacgggttatatttgcggactggtggttcggcggttaccagctgctgccgcgttacgcggttgaaccgcagagcagccgcctgaaatactggcgtaaagttgcccgcgaaggcaaactgccgccggtgctgatctggtacatcagcggcctggcatcctacattatactcgatggccatctgcggttgcaggcggcgtatgacgaaaatattccgccttcctttattgtgctcagccagtaccatgaatgcagctatgagccggatcctgccgcgattgcaaaagtgcagcaggcaatagcgcatcagatggataaaaatccgcatccggatatccgcgggatcaaccagacattaatcagcctgtatcagaaccgctacgggcggcactccacccgcagccgggcaatactgggcgacggccgttcatgggaagaggatgtttcccgttatctgcgccgccacggagacaccgggcacctcactgctattttgcagcggacggaagaaaccgcgtga

SEQ ID NO: 277049 - DNA, 492 bp, Morganella morganii
atgtcttcatcagataatatcctccgcaaaatcaccacccttctggataatcaccatgcccgctatgaaatcatgagccatgatgcactcggttttacctctgatgaagtggctcaggtgcgcggtgttgaactggggcaatgctccaaagccgtggtgttaaaagtgaaaggcaacggcgtgaagaaaaatgtgctggcggtattgcccggagatgaaaaaattgacggcgaaaaactggccggttttttcggtgctaaaaagatttcctttgccaccgctgaacaggtgaaaacactgactgattgtgtccccggggcactggcaccctttacatttaatccggaactggagctggtgattgacccggttctgtttgaacgctacaccgatatcgccttcaatgccggaacactgacagaaaccattgtgctgaatgcagaggattaccggacgattgtgaaaccacaggagttcagttttattctgtga

SEQ ID NO: 277050 - DNA, 1467 bp, Morganella morganii
gtgatatcaacccgttcccgagtcattatccatctgagcagttttctgatagtgatttacagcctgacactgctattaccgatgctggttgcgcttattgcgcaggagcagagttttttcgcgtttgccggcagtttcctgattttctttccggccgggttagtgtgctggtaccgcagtaaaaccaccgggctgcaattacagacgcgggacggcttcctggttattgcggtattctggctgttattttctgttatcagcgccatgccgttctggctggatgaccatctgaatatggcttttgaggatgccttatttgaaggtgtttccggtattaccaccaccggcgcctcagtatttcacaatgtcactgatttgccccgctcggttttatattaccgcgcccagcttaattttatcggcggtctgggggttattgtcctggcggtggcgatatttccgctgctgggtatcgggggaatgcgtttatatcagtctgaaatgccgggtccgtttaaagatgagaaattaacaccccgtttagccagttctgcccgcaatttgtggttcacctatttattactgggattttgctgcaccgttgcttttaaactggccggaatgacctggtttgatgccttatgccacgggctgtcgaccgtctctctcggcgggttttccacttacagtgaaagtatcggctattttaacagctccgcgattgagttagtggcaggggctttttcattattatccgccgtcaactttaccctttattttgtggcgctggcaaaacgcagcctgaagcccttattcagtaatacggaattacgtttctattttgccgtggcggcattgattatcgggctggtcttttttgaagtatggcgggcaaatatgtattcgtccgcagaagaatcctttgtacatgcttttttcctcaccagctccatgctgacggataacgggcttgccaccggtgattatgcacagtggccgtctcatattattgttctcttattatttgccagttttttcggtggttgtgtcggctccacctgcggcggaataaaagcgatccggtttttaattctctccaaacagagctggcgggaagtctattccctgatccacccgaaagcacaaaccctgattaaagtcggtgataccgttgtgcagcaccggctgattaattccgtcctgagctttttcttcctttatgttatttgcacctgcttttttatctggtgccttaatctgatggggtacgatttaatgacctcatttgccagtgtcgccgcctgtattaataatatggggctggggttcgggttaacagcacccgggttcggggagatctctccggcggcaaaatatctgctctgttttgctatgttattaggccgcctggagatatataccctgctggtgctgttatcggtcagtttctggcgtaactggccgtag

SEQ ID NO: 277051 - DNA, 420 bp, Morganella morganii
ttgcttacgctggtttttattccggttttaaatatagccgtcaaacctgccggattggtcagtatcaataattcagagtggtttttgattaataaagatggtgcccgtgaatatcagtattttggcgggaatacgccagcgtggatagtaaataaagataactgtttatctccggaagaaataaaatcaaccttagataaggatacggtcactatgatttgtaacacctttgataataaatcagaccaggattatcttgtgaaattaataaaggaacaacgattggtatatggttttttagctatagtgatattactcgtatcagtattccgatttaagtatatgctgtttttatcatacactctggatgcaagaaagatgctgtttaataaaataaaattatataagaaacggaaataa

SEQ ID NO: 277052 - DNA, 2187 bp, Morganella morganii
atgaaatatcgcctgtccgcactgtatcttccgcttctgttgtctgcctctgcggcctctgccactgtgttaacggataataatcatcaggtttttatcgacccggaaaccctgcacatagcagtggcggataccactgtcagccggggaacagaaaaacagccggtcagtgatttaacagaatatccccgccgtgtcagctggttctggccggacagagatatgaatgtcaccgctgtcctcaatgataccgagctgaccctgacattcaccaccaatcagccgcagaattttcagtggttcaccctgccggataacactgtttccgccctctatatgccgctgggcgaaggacgtcatattccgctgaataatgaacagtggcgtcactatatggttactgaacaggataatatcgataccaatcaggatttgcagttaccgctctggagtcagcagcaggatcgggtctacagctgggtgttactcagcccgttccataaccgtctgcactttgaggaaaaacagcagcgcctgcagatgagcgcggtacatcagtttaaccgttttaatcagcagcagccgtttactgttctgcttcacaccggtgatacccctctggacggcgcactgcgctaccgccgctggttacaggataataagcagttcacatcactggaagaaaaattcgcacagatcccggacggcaaaaaactgatcggtgccacccatatctatttatggggaaaaagtattatcgatcagcaggatattactgactggccgggactggtacgttatctgcaatcccccgccggtaacgggttatggtcggcaatggagcctcagagccgtgatgcttttgctgctctgaacggtaaaacaccggaaaaatggcagcagccgtttctggccgatgctctcaaccaggcactgaagaaagttacaccactgagccgcaccccggatgatagtgactttatagctgcacagaaaacacaggcccgggcgatccgttctgccgtaaaacagcaactgagtccgttcctggcaccggaagccaactggggtcaggggttatcccttcctcttttaaccgcactgaccggggcaaaactggataagctctggctgggcaccgataactggactgctacctggtatcagccgcaggcggtcagctatgccaaagagcacggttatcttatcgccagctatgattcctacgacaccgccatcccctcgggaaaaaatacggaatggctgacggcacagatcccgtcagaattacgcgaaaaatgtgcgattgtgaccggaacaggcagaaaactgccgggattcggcggggatggttattacctgaatccgggctgcatgcaggatttttcagaaacacgcatgactgaactggtacagctgaccggcatcaacagtctgtttcttgacgtggacggcaccggcatggtgtctgatgattataatccggcgtcacccacaagtgcagatgctatggcagcagcgagaaataaccgcttacgttcggtggcggaaaacatccgtatcccgctgggttcggaagacggtaatgccgtgaccgcacaatatctgatgtttgcccacggtaccgaaacccgcggcttcggctggagtgatgcggatattcaccgcaacaaacagtccccttactacctgggtgcctggtggccggaaaacgaaccagcgatcttttttacaccggggaaactgaaagatatctacctgaccacggaatttgatccgcgctggcggctgccgctgtatcaggctgtatttcatgatgcggtgatcaccacgcatcactggacgctggataacctgaaattcccggaggttaccaccacacgggaactgctgagccagttgtataacacgccgccgctctataacctcagccgtaatacggtacagaagcgtcttcctgcgatgataaagtcggacagtattttccgcccgctgcatcagcagttatggaataaagccctgaccggcttccgctggctggacagtgacggcctggtacaacagacacagttcagtgatggctctgtcatcaccgtgaattttgctgaccatgccattgccggttatccgccgcgctcactcagtgcgataccggcagagggaaagcccgttaacgccgccttctga

SEQ ID NO: 277053 - DNA, 1377 bp, Morganella morganii
atgatgaaaatacgttcactgagatttaaaattgtatcattatttatgttgctgatggtggcaaacgcaggttttgtcacactgatcctttatcactctctgaaaaatgaacttgcctcaaaagatgatgacatcctgattaaccgtgccgaccaactggctaaactgatagtcagtggtattgatattaaatcgttacctgtttatttccggcggatgatggatatgcggcaggatgttattaagatagcagatgctgataatcacgttattgtggataccaacccggagataaccctgaatacccgggacaaacttaattatccggataatcaggaaacgcctttaatctcataccagaatacggatgataacatgccggtttccgtggttaattttgagattcaggctcctgaaggtaaattatatgtcactctggcaaagcgttcggttgatcgcagcagtgttttacgcggatatttacagcaaagtctgattgtttccgttattgctattcttctgatggtcgtcttcagtatatggcttatccgccggggattgcaggatattacgcatctcagccggatcaccgcgaaaacagatctgtactctctgggacagacggtggatatcagccgcttaccggatgaactgaaaagtttgggtgattcattgaatatcatgcgctcacggctgaaaaatgattttgtccggctgacacaacttgcggatgatttagcgcatgaattgagaacacccattaatgccattaaaattcagaatgagatcacattacaaaaaacgcgcactgcggatgagtatgaagcgattatcgccagcaatacagaagagctggataaactggcaaaaataatacaaaacattctgtttatcgccagggcggagaataaaaatattaatctgaagcgggaaaccatcgttgtttctgaactggttgaggatatttatgaattactggcattttatgccgatgagagaaatatccggctggttaataaaatatcggatgtgacggtatcagcagacagagtattgctgatgcagattatggttaatgttgtgtcaaatgcggttaaatattcatatgaaaatacggaggttattgcctgcgcagaaaataatcatggcagtaccgtcatttcagtgatgaataaaggtgatgttgttgcaaacagtgaacaggtctttacccgcttctggcgcggagataatgcgagaacgtcagaaggaagcgggttgggcttatcgattgttcaggcaataacagaattgcattcaggtgaggtcagatttgaacgtaccgggtcatataacacggtaaccttaatttttccggatactcagcccctttcatga

SEQ ID NO: 277054 - DNA, 1005 bp, Morganella morganii
atgaaaaaaataatacgatcgtctgagattacgccggaatccgtttttatgatgaaacgcaggaatctgcttaagttattaggtgccggtacggccggattaatggtcagcccgtcagtcagcgccggtctgttttcgtggttttccggcgatgataagcccggcgttccggagacaatcttaaaagacctcagttatacaaaacctgaaaagtatcagtccggcctggcattaacgccggaggataaggtgactggttacaataatttctatgaattcggcctgaataaatcggacccggctgaaaacgcacataccctgaaaacggatgaatggacactgacagttgagggggaagttaaccggcctctggtattaaatgccgatgagatccgtcataaatttcaggctgaagagcgtatttaccgaatgcgctgtgtggaagcatggtcaatggttattccgtgggtcggttttcctctgagagatttattattatcagcggcaccgaacagcaaagcgaaatatgttgcttttgaaacggtgtacgccccggaacaaatgcccggtcaaaagagccgttttaccggaggcgggcttcagtatccgtatattgaggggttgcgcctggatgaagcacttcaccctctgacactgatggcaaccggtgtttacggaaaagaactgccgaaacaaaatggagcacctgtccggctggtggtaccgtggaaatatggttttaaaggcataaaatccattgttaaaattcgcctgacagaatctgagccgccgaccacatggaatctttcagcaccccgtgaatatgggttttatgccaatgtaaacccgcaggttgatcatccgcgctggtcacaggctacagaacgttttatcggctccggagggttaggccggacaacacggcagccgacattactgtttaacgggtatgcagaagacgtggcagaattatataaagggatggatttgcggagatatttctga

SEQ ID NO: 277055 - DNA, 2040 bp, Morganella morganii
atgcagaacaaaatcacccgccgcaggctgacacactgcctcgcgctctcacttactgccggtgtctccgctgcggcagcggaacccgcaccggacacccttattgtcaccgccgcaaagcaaagtcgtctcacgccggatgccgcgcaggaaaaagaaaaactggagaatgtcgcgggcggcaccaacctgattatggttgaaaaagatacccggctggcgacgctgcatgatgcactggattatcagcccggcgtgctggtgcagaatttcttcggcggtattgatcagccacggctgaatatccgcggctccggtgtgcagagtgccccgctggcacgcggtattctgctgatgcaggacgggctgccggtcaccgatgcggacggcagttttcatatcagcaccctggaaatgagggatgcgcggatgatcagtgtccggcgcggcgccaacagcctgaacccgcagagtaacagtctgggcggtgagctggatctgatttcctataccggccgcgatgaaggcggacgcctgcgctatgaatacggttcttacggccgcgaaggtttacagacggcattcggcggcgtatcggatgacggccgtttcgacggacgcatcaatttcacttatgaccatttcgacggctaccgcaaacactcctcatcacagcgcaaaaccgtgcgcggtaactttggctataccggtgataattttgagaaccgcacctccctcaactggaccgatctgcgctttgatgtcgccgggccggtctctgaagccgtgctcgacagtgatccgacagaggtttacccgatggtctggctgcgggatccgcaccgcaatgtggagcagttccgtgccgccaaccgttcggactggcagatcgataatcagcgcatcagtgccggtgtctggtatatccgtacccacgataatttcaccacccctgcctattaccgtttcagtcagagccacagtgaaggtatgcagctgggctggcagatggaaaccgagccggtctcctggcgggcagcactggcggctgatcatatgagcctggaaaccgatctgatgcagaaccggcgcggcacaaagatggacaaaacaccgatcggcaagtttgacggcaaagcagacaatatttatgcctccgccggtgccggtattcatctgacaccggatctgaccctgaatctggatctcaaagccactcatgcgcggcgtgatacggaaaagcgcaacagttccgtttcactggatcagaactggaccttctggacccctaaagccggggtgatctggcgtccggctgataatcagcgctggtttgccaacgtcagcgccagtcaggagcccgcgaccttccatgaaatcattaattcctctgacggccgcctgacaaaactggatccgcagaaaggcgtgacgtttgaaatcggcggtgacggtgatattaccgaacagctgaaatggaatgtggcgctctaccgcagctttatcaaagatgaatacatcacaacttatgattcagagggaaatatcaccggcgtctttaattatgccgccaaaacccgtcatcaggggctggaagcaggaattaacggcgtgatcccggcgggtcccggagatgtggaatataagctggcctggacgtggaatgatttccgttttatgggcggtgaatataacggcaattatatcgccggaatcccgcgtaatattgtctcggcggaagtgctgtaccggatcggcgactggcgtttcggcccgaatattcactgggcaccgaccgacatggccgtcgatcacgaaaaccatctcaatattcagaagcgcaaacactatgcggtgctcgggctgagaggcacttatcagcctgcggataactggtcgctctatatgtcaatggataacctgaccaacgaacactatgcgaccacctctgtagcgaaccgctcagtcaccggcaaagacagcactctgttcccggggatgggattcagtgtcaacggcggtatcacctataatttctga

SEQ ID NO: 277056 - DNA, 270 bp, Morganella morganii
atgaatcattctctgacaatgttactgcagcgtttgcaaaccaccgtacctgcatcacaggttacttttacccgtgatgaactgaatatacttatccgggtactctctgcatacactgcagcaccggcagcctcactgattatcaccacccgcgactccggagcggtcagccatgctattaactacggctggagtgaggaagaaaaacagctgacggaacagcaaggcgggcaatatatcccgctgttccgtcatgatatcagcagctga

SEQ ID NO: 277057 - DNA, 462 bp, Morganella morganii
atgacgtctgttatcaaacattttaccgcttccggtctggtcagtgacaaccacggccgttttctgctccatcaccatccgaagctcggtatctggctgccgcccggcgggcatattgaggaaaatgaagagcctcaggatgctgtactgcgtgaaattcacgaagaaaccggactggaatgccggattgttagctgggatacacaggcgcagcaatttatcacaccactgccggaaaccggcgtgctgccattaccgatggcgatcctgaaagagtttatcccggataagaaaaccggcgaccactggcatattgatatggtgtactggtgccatccgctggatgaaaccgccgtaccacatccggactttcagtggatgacgccggacgagatcctgaaaacggacaatgtcccgcaggatgtctgcggcctgattgctatggtgcaggcgcgccgctga

SEQ ID NO: 277058 - DNA, 240 bp, Morganella morganii
atgttgtgcccggtatctgccgggctggctattgttttgtatcatgaattagtacatgtactccattatctgcaaggtgaatgtatacacattattcctgctgattctcctgaaagtatccgttatccttattgggaagaagaagccagaaccattggcttcgatccttttacatcagaaactatctctgaaaatacttttcgtgcagaaataggtgttccgctgagaattcactggtaa

SEQ ID NO: 277059 - DNA, 1338 bp, Morganella morganii
atggcaacaccgcgttataaacagtacgtcgatacccttgctgcccgtatccgtaacggtgaactggcggccggaacacaattgcctactcatcgtgcttttgcggctcaggaagggctgtcattagtgacagcgtcacgtgtgtatcaggaactgatcaatcaggggctggtcagtggtgaaaccggacggggaacatttgtcagagatatcagtttattaccggttaccggtattgaatgtgatgtcactccggcaatgtatgaccttaactttatctatccggaagtcacggaacagaccgcattactgcgccacacgctgcgccggttatccatgagcggcgatctggaaagtctgctgcattatctgcctcacgccgggcggcatcaggagagggttgttgttgctgatcacctgaagttgcgtggtttttctgccgttgacccggatactgttgtcatggtcagcggagcccagcacggtctggcttccattgttctgagcatgttcagccccggtgatgtaattgcggcggatgcactgacttatcccgggtttaaagcactggcacaaacctgtcatatcgaattggttccggtgccggttaccccggaaggcccggatttggcagcgctggcacaattatgccgccagcggaaaatccgcggctatttcaccatgccgacactgcataatccgctcggctgggtgatggatctgacatcccgcaggaaactgataaaccttgcccgggaaaacagattttttctgatagaagacggctcttatgcttttctgcagaaaccagcaccggctccgctggcagaactggcgccggatatcacattttatgtcaccggattttccaaaaatatcgccaccggcttgcgggtcggattaattgttgctcctccggaatatattgctgagctggaaaaaattatccgcatcactacctggaatacaccagcactgatgaccggtattgtccgtgagtggctggagcagggcgaagccgaaaaactggaacagaaaaagcgccgcgatgccaaagcccggcaaaaaattgtcagccggatttttgctgatttaccccatatcgcacatccggccggctattttttgtggatcccgttaccggaaaatgtacgctgcgatgcggttatcagccgcctgagagcggccaatattgccgtcagcccggcggaatcttatgccgtcacccgcgatatcccgcaggctatccgtgtggcggtcagcacactgccgtatgatgacctggaatccgcgctgatgacggtcagagacaccattacctatctgatggatttatga

SEQ ID NO: 277060 - DNA, 447 bp, Morganella morganii
atgaaaagcattcacgaatggcatgaccggcactataccgtaacaacagatatcaccaggctggatatcggtaaaattcatgactatctgacgcattccgcatgggcggaagggatcagccgggagttggttaatgaaagtatattgaacagcctgtgtttcgggttatttgccggtacagaacaaatcggttttgcacgggttgtcaccgatggggccacattcgggtatctctgtgatgtttatattatcggggaatatcagaaacaaggactcggccgctggctgatggagtgctgtcagtcacatccggtgatgaaccggctgagacgcattatgctggtcacatcgtcagccccgtggttatatgaaaaatcgggttacagcccggtcaaccgggaaaattatatctggcagattgtcagaccggatatttataaacagtga

SEQ ID NO: 277061 - DNA, 438 bp, Morganella morganii
atgcgccgattactgagttcttaccctgtcgttattacatctgttttttctgcctctttgctgtctgctccgtctgtttcagcggaaccggacgatgtggtgtatgtcaccgctgcggatgatgttcattatgagccgcacggttatggtgccctgcgtcagtcctcggcaacaaaaggctccgccgcactggcggaaacgccgcagtttgtatcagtgatccgccgtgatcagctcgataccctgccggctgagtccctcagcaaagcgctgcgctacagcgccggggtggccagtgaaaaattcgggggcttcggcaatagcattgatttttcgaaaatgcgcgggtttgatgcggattattatctcgacggcctgcgggtcgcgggtaacagcgggatctggggtgcacaaattgattcctggctgctgtcttga

SEQ ID NO: 277062 - DNA, 663 bp, Morganella morganii
gtgcacaaattgattcctggctgctgtcttgacaggcaccgcaactacagtaatcctgatcatgaaaaatcgggccggacacagcaatccattacttcgctggtcagctggcaggtatcggattcactgacactgaaacagaacctccgctatgcggatgtgaaaacgcatatccgccgtgattttacgcgcggatttgtgcaggataaccgcctgctgacagcggtgtatcaggattccccgtcccgggccagaaccctggcagcagataaccaactgatttacaaaactctcaccggcccggtatcccatgaaattctgaccggctttgatcttcagaccggtaagctggataaggactggtcaggctcgcaaacggtaacatttgatccgtacggttctcactaccgcccgcagtttacgccgcacatgacatcatccacctccaccggacagacttaccggcgctatggtgtttatatgcaggatcatctgcgctggcagcaatggagcctgattttaagcggccgttatgatgattcctcactgaaaaccaccaacaacctcagcggaacaacacaaaacagtgatacctcagtttacagccaccgtgcggggctgacctacaccttcaccagcccgaataatcccagccccgagtaa

SEQ ID NO: 277063 - DNA, 3087 bp, Morganella morganii
atgaaattacagctttcctcatgggctatcacccgtccggttccggtcattgttatttttctggcgctgaccattgccgggttattttcttttgcacaactgccggtaacagccaatccggtgattaacttcccgattgtgacagtgacggtcactcaggacggctcctcgccgtcagagctggaaaatgcggtgaccaaacaggtcgaacgggccgtttccggcattcccggcatccgtcatatttcgtcttccgtaacagaaggtatttcctcaactacggtggaatttaacctcgatgttgatccgtatattgccactaatgatgtccgcgagcagatctcacaaattcggggagaactgccgcaaagcattgatgaaccgctgattaaccggatagacgtcgaaggcggtgccatactgcgctacgccgtatcatccgataccgttccggcagccgatctttcctggtttattgatgacaccatcagtaagcagctgattatgttacccggcgttcagaaagtcagccgtcagggcggcgctgaccgggtgatccgcattgaaccggacgcggacaaactctctgccctgaatctgtcggtggttactgtgaatgaatggctgcgcggtgtgcatcagaacgcggcaggtggctcatcgcagtataattcgctggcccataccatccgtgtactgggtgaaaaaacaacggctgatgatattaaaagcattcagttgcctgctgaaaatgagcaatggataaaactgggtgatattgcggagatctataacggacaaaaaaccacccgcagtatttctcagctcaatggccgtgatgtggccgggtttgctgtattccgcgccaaaggtgccagtgataccgccgtggcggaacaggtaaatgccgccctgacggagatcgccgccaaacatccggaactgacgattgaactgatctcatccaccgttacttataccgaatcaagctatcagctgacgattaaaaccctgctggaaggggcattcctgaccatcgtgattgtctttttcttcctgaaaagctggcgggcaaccctggttgcggcagtggcgctgccgttatccatattaccggcattttttgtgctggcactgtttgattacagtctcaacagcatcaccctgcttgcactgacactggttatcgggatcctggttgatgacgcgattgtggaaatcgagaatatccagaaatacattgagcgcggtgagcgcccgtatcttgctgcactcaaagcctctgatgctattggttttgcgattgttgcgatcacactgaccattgtggcggttttcctgccggtcagttttatcggcggatttgtcggcaaatattttgtgccgttcggagtgacggtatctgcggcggtgttctcatctctgctggttgcacggctggttacgccgctgatggccgcgtatatcctgttaccgtcaaagaaaccgcatccggaatcagccgtaccgcgctggatagaaaaatacaccgggttgttatctgcaacactgaaacaccggaaaaccgcactggcgctggcattagtatttctggtgggttctgtggcttccgtgacccggctgcctgtcggctttatgccggagggcgatatcagtgtgacacagattgaagtggaactgccgcccggcacgccggttgagcagacacagcaacgcctgcggacactgacaaaatccctgaaagaccggccggagataaaatccgtttataccattgcgggtgtggcggatgatgcggatggtatcgcgcagcataagggggaaatcattctgacactggttgatcccggtgaccgtgaattgtcacagaaggaatttgagcacgcaatcgccccgctgttcagtgaactgccggatgcccgttataacttcagcaacagtaacggcggcaaagagttttcgctggttttcaccggcacagacccggctgaactggaaagtgccatgcaaaatctgcgtaacggtattgcccgcctgccgggattcagtaatgtgcaggtgataaaaccgctgctgcgcaaagagctgattgttacaccgcgtcctgacggccccgggcggaccggcgtgagtgtcagtgaaatcgccgacacgctgcggatcgctaccatgggggaatcaggctcccgcagtgccaaattcaatctgccggacagacaactggcattacaggtggtactgcctgaatatcagcggaatgatatccgtgtgctgaatgatttatccgtacgaagcacggctcagggaaatgtaccgctgaaagcggtggcaaccattgatttcagtgatgggccggcacaaatcgaccggataaaccgcgcccggaaaatgtcggtggaagctaatctgaccggtttatcactcggtgaagcactgaatgcagtgatggcgctgccggagtatcagaacctcccggcgacagtgtcacaactggaatacggcgatatggaatatatgaatgatatgtttatgcgtttcagcagtaccatgctgttcagtattctgctggtgctggcgattctgattgtgctgtttaaagattttctccagccggtcaccattctcgccgccctgccgttttctgtcggcggcgcgatcatcgcccttgtgctgtatggggcaatgatcgatctgccggtgattatcggcattctgatgctgatgggcattgtgacaaaaaactccattctgctggtggaatttatcctggaaaaagagcgcgccgggctcagccgtgaacaggcggtaaaagatgcgggacgcgagcggatccgcccgataattatgaccacatttgccatgattgccggcatggtcccgctggtactgacgtccggcgcagatgcagggttccgcgcgccgatggccatcgcggttatcggcggcctgataagctccacgattctcagcctgctgtttgtaccggtcatttatacttttatggatgatctgaaaaaagcattattaccgcgtctggcaaaactgacttccgtcaccaaagccgaccgggatgtgaaggagtggtaa

SEQ ID NO: 277064 - DNA, 936 bp, Morganella morganii
atgaccacagcaaattctgaaaaaccgcgtaacggatatttgacggattatcagtacaatggggtatggcgtaaagggataaaatttccggaagggaaactgagctattatgaccagtatgatattgttattgaaggtattacctggcagtcacctgaacagattgacagcgaaaatataattctggttccggcagaagaggatatcgtatggaacagccggatcgggatatatggttcgcggggttctgaagccagtgagaccgtttatctggaaggaaccgaaattaaaccattcggcggtaaaatagacaattccggaacacaaacccgggttgtgttcgaagaaggcagtgttacccgttataataattatcaggctgtcatcggcggcaaaaaatatacggatttacctgttgattccgccaataatgcgatcggcctgacggttaaaatgggtgaatatgacggtgtggttttatccgggctgaatgaccgcagtcagccggtcacaatttttgaaaaagacggcgaaaataaaccattacaaggttttgttatttttcacggcagcacatctacctgtatcatgtttcgtaaaggtgacctcactgcctttgctgccgggtataaattgtactatgaggatacctttaccaccgcatcaattaaccttgagccgattcatatccgttttgaatccgtaggtaaaaatatccgcacagaagtacgtttggttgcccttgacagtaatggtgcaagggggaaaccttattccggggtcgttataatcagggataaactttatattcctggttttactgtgttaaagctgcgaacaaccagtaaattacttattgttcgcagcgggactttaccactccttcacatcccggtcggctttggtgacggaagtcagttttgccagacgcggtaa

SEQ ID NO: 277065 - DNA, 744 bp, Morganella morganii
atgccatggacttttgcacatccggcgattgtttttcctctgaaacaatcccgttacgggcggtggctgaatctgcccgcgcttattacgggcagtgtatcgccggatttgctgtactcttccgggatgtaccgcgccgcggatgaggcacatcattttaccggctggttttataccggactgccggtgtgtctggcggttctgctgatttttcactggttatccgtgccgctgaaaactgtattaccgtttccggtgactgacccgctgacccgttctctgcggaaaaacagtgtcattttgctgtctctgtttatcggggcggccacacatattatctgggatgcatttacccatgaaaccggcacgatggtgcgggcgctgtccgttttgcaggtaccattgttgcaaggcatgacggacggacaggagattgcggtatataaagtgttgcagcatttggggtcactgcttggtaccggttatctctgtctgaaatttgcacagtatcagcgggcactgccggaagcagagaagcgcgggaaccttatccggcttatccgtctgattgtactggctgttctggcggcactgtgtacggcgccgctggcgtaccgcctggcgcagacagcaaccggtgttcatataaatcgttttgtcttttatgaattgtcattttctgtctccttttttgccggttttgttgttctggcggcactttttcaggttatcagaaagcgttaa

SEQ ID NO: 277066 - DNA, 504 bp, Morganella morganii
atgacggacgaagaaaaagaacagaaagaagcacagttaatccgtgattttctgacaaatgcaacgccggaacagcggcacttgtttatcgcccggtctaattatgacagtaattatgatgcactgaacgaactggcggcggatccgcaactggatcgggcatccgcactgctgatgtactggtctttgggtgctgcctggtatgtgcagtatggccatgatgatgatgtaccggactattcacggcaaacactggcattgatccggttaattgaaacccgctattctgcggggttttatgccgatcatggtatctggtttgacccgatgcagtcagaaggcggacggccggatgactacccggacctgccggtcagacggcctgtgcctgacatcatgctgatcgccgcacccggtgatgtgtatgttgatttggatgatgaccattatgatgacggtttaccattaccgctggcagaacagctgtatgcactctatgagtaa

SEQ ID NO: 277067 - DNA, 2160 bp, Morganella morganii
atgaagactaactatatttcgcgggcactgctgcctgcgctgatttctgttgccctttttccggcgcagcaggcactggcagataccataattgtgacggacaagccttctcatatcaccccgcaaacacaagccggtgccggttttgtggcgaccgatattgatatggggccgcttggtacccgccagtggctggatattccctacagcagcaatacggtcagcgaagcgatgatccgtaatcagcaaagtaaaagtgtcagtgaaatgctgaaatatctgccgtcttctcagatgcaggcccgcggcggcatggatgtgggccgtccgcagagccggggaatgcagggtagtgtggtggaaaacagcagactgaacggcctgaatattgtctccaccaccgcgtttccggtggaaatgctggagcggctggatgccgtgaacagcctgaccggtgcaatttacggcccggccagcccttccggtcagtttaattttatctctaaacggccgactcaggatccgctgcaccgggtgacggtaggatatcagaaccgtaatgcttacagtgcacatctggatcttggcggtcaggtggatgaagagaagactttcggctaccgcctgaatttactggatgaagagggtgaaggttatgtccggaacagtaaaatccgccgtcagctggccgctgttgccctggactggcagatccggccgggaacacagatacagctggatgccagtcactatcattttgtgaccaaaggatttcccggcagctttggttacggcccggatattgatttaccgaatgcgccggacagctccaaccctgaccttgcactcaataccgccggtaatgacctgacgacagattccgtcagtacccgttttacccactatatgaatgatgactggtcactgagcggcggtatcggctatcagcaggcagatcgggcaatgcgctctgtttcgtcgcaaattctggacagcaaagggactatcagccgttcaatcacggattctccggcagccggtcgtttccgtgtgctgagtaacaatctcgccctgaacggtcagtttgataccggctccgtaaaccatgatgttgctctcgccaccaccggttatacctggtcaatttacagtgccaaagagcggggtaaaacctttcagctcggcaataccaatatgtatgacccgtcttccatgaccgaaccttccgatggccgcatcagaaccggcggggaacgttacaaagccagtgaaaaccagcagcagagtattatcattggtgacactgtcacgtttaacccacaatggtctgccatggtgtatgtcagtcagagctggatcacgacccgtaacttcgataagcagggacacaaaactgaccgtgatcagcagaccggtaccagcccgaatatggcgctgatgtacaaaatcactccggatgtgatgacctatatcagttatgccgattctctccagcccggggataccgcgccggatgatgataaagtcaaaaaccggggtgaaacactcagcccgtaccgcagtacacaatatgaatggggtattaaagccaataccggcaatatgaacctgagtgccgcagttttccgcctcaaacggccgtttgcttataccgatagcgaccagatctttaaaaaacagggcgaacaggtaaatgacgggctggaactgactgccaccggcaatgtctggcaggggctgaatatctacagcggtgtcacgttcctgaaagcagaactgaaggataccggaaacagtaagactgaggataaacgggttgtaggggtgccgaaagtacaggcaaacctgctgatggaatacagcctgccatctgttccgcagtgggtatacagtgccaatattcattacaccggcaaacgggcagcaaatgataccaacaccagctgggcggacagctacaccacactggatctcggtgcccgctataccactcagatagaaaatgtaccggtcacactgcggatctctgcggataacgttaccaacgagcattactgggcgtctattttccccggcaacagtaacggtaaaaatggcggcgccaatgcctttaccggtgcaggccgtgaattccgggctaccgtatcatttgatttttag

SEQ ID NO: 277068 - DNA, 1146 bp, Morganella morganii
atgatttcaccttacacattgccggtactggcattcacggtattttttaccggcgttactgaatttatggtttcaccgatgctcacgccgctggcggctgcatttgatgtcacacccgcacaagcctcatggcttattgcagtgtataccttatcgtatgcagtggctgcaccggtgctgggacgattatcagaccgtatcggccgttaccggatgttacgtgctgcattattgctgtttgtggcagatggtatcgcactggcactggcaccgtgtttcagtgtggctgtgggcttgcgtattctgggcggtctggcctctgctgcgctgatcccatctgtttttgcactgattgcagaacaatttccgcatgacagacaggcttccgcgatgggactggtgatgacgggtatgaccgccggtattatctccggcccggtgattgccggatggctgacagtccgctgcggctggaatgcaccttttctgctgactgccgccggaagtctggtcatgtggatagcctgttgttttgtgtttcgcggtgtcagccggacttcctctcaaccgtcaatccggcccggtaaatgttattcacgggcattatcggggctgatcacggcaaaaggtctgtggaacggtactgcagtggttatgtttgttctcagtggtgaattgctgcgtgaccggttcgggctgaatacagaaacgatagggcttatcagtgcaatattcggtggcggattactgaccgggaatcttctgatgccgctgctccggcgtttaagcggtacagatacccggctgctgctcatcagcctgatagtgatgagtgtgatgattgccggatttatcagcggaacaggcgggcttcccgggatgatgttgtggatgttattgcagggatgcgctctgggaattgccgctcccgtcagtacagccatcattgctgagcatgccggaatacgtaaaggagaggctctggcattgtcagaaagcatgaataatctgagcatctttattttattaccggtggccgcagcacatcaggatagtcagatattattacccgcagttaccgcgctattattttgcgctacggcactgacggggtacattctcagtccgatatattgcaaaaagtaa

SEQ ID NO: 277069 - DNA, 1104 bp, Morganella morganii
ttggtctgctgcctgccgcaactgacggaacagttgcagatcacggcaccgcaggtcgggtttctggtcagtatctatgctgtggtggtcgccattaccgggcctgccatcacgctgatgctggggcgctataaccgcaaaacagttttgctggtgattatggcgatttttattatttccaatatcgcgtatgccattacgcatcagtatgatgtgattctgtttttccgtattttaccggcactgacgcacgcggtattttttgctattgccctggtggtggccgccaatgtggtgccgcctgcacgatctgcccatgcgattgccattgttttttccggggtggctgtcggcatggtgctgggaatgccgctcagtgcctttattgcggaaatgtttacactcaatgctgcgttctggttcggtgcgctgaccagtgtggttgcttttacagggatcgcgctgtttgtgccgtcattaccggtgacacaggcgctgaaagtgcgtgaacagctggcgattctgcaacgtcgtgatgtatggctgagtattgcggcagtgacactgattttttcggcgatgtttgcagggttcagttatatcgccggttatctcgtcactatcaccggtttttccaacaatacgaccagcgcattattggtggtgttcggcatcagtggttatttcggcaactttattttcagccggtatttacagcgcaatgtcattaaaaccacgtcactgtatccgctgctgtttatcctgatttacctggcggtctggctctgcggtccttcgctgcggctgatggtgccggtggtggtgctctggggaatactgcatacgtccgggctgattgtcagccagacccggctgctgcgtgaagccgggaacacgccggaatttgccaacagtctgtatatcggattttccaatctcgggatcaccctgggcgcaatggccggcgggcggatgatccgcagttttggcgttgaaaccattatctgggagggaattgcctttgcggcggcagcctttatcacaatacggctgaaagtccggcaacaggcggcacacaccgtctgccggccgctgatttggtga

SEQ ID NO: 277070 - DNA, 486 bp, Morganella morganii
atgaatatctgccctgttaccggtttacccggcgatttaccgctactggaaagcattgctcaggttttacaccaggaatggcaggaactaccgcagtggcagacaccggaaattatcctggcgcgtctgataaaacggatgaacggtgataacggcgaaatgctgtttgtcgccacggataaaaacagtgcactatcggggacggccagcctgatctggcgggagctgaaaacctgccatatggcaaatgcggactggtggaccggcgagatttacaccctgcccgcagcccgcgggcaaggcctcggcagcgccctgacacaggcggtctttgccgccgccggagagcgccacctgccagcactgaatctctacacgccggataaacaggccatgtatgcacggatgggctggcaggctatatatgatgatgtgatcaatgacgagctggtcacggtgatgcaacggactgtcagcgaagcgtga

SEQ ID NO: 277071 - DNA, 1143 bp, Morganella morganii
atgagcagggttatggcaggatgcctgatacttctttttgtcagtttctttgcccgtgcggatgtgcaggctctgccggaactgaaacgggaccgggttattgacagcgccggtcttctgaccggcccgcaatttacacagcttaaccggcaactcattgagtatgaactgagccgcaatgacggcagccagttcgtggtgtttattgtgccgtcaaccggcggagaaagtattgagacatttgcgcaccgtgcgtttaatacatggaagatcggccgcaaaggtcagaataacggactgttgctggtcgtggcggtgaatgaccgtaatttgcgttttgaggtcggctatggactggaaggtattctgccggatgtctccgcaggccgtattatccgtcagcgtatcacccctgaatttaaaaaaggccattattttaccggaattgaagcgggtgtgaccgatgccattgatattatcagcggaaatgaaccggaatatatcaaatcagagacatccggaacagaagcattaaaactcaaacgactgacgattatttatcttctgacctttattacggtgtatctctggtcattatttattggttctccccgccgtaagaaaaggatagaaaagcaggttcttaacgatattgaatatctgagagaagaatacgcgaaatccaaaaacaagaaaaaacgtcagcctgaacggataatccgccttgcgcagaaacgcctgacggcatttttgcagtataagtatatttatccgacaccgctcggccatactgtgaacgtattattttattcaattctgatttttataatgacacgggttctgatagacggagatcctgatcctgatgcgttgttcatcagtataatgatgctcatttttcttaatgtatttggctcactatttatttgttatttgttatatacattaattccggaatatcttactcaggaagcggaaatacggaaattaaccggtgtcatagcaggtacaggaggcgggtattcatccggttctgatagtggcagttacagcagcagttccggcggtagttccggaagcagcggatcgtccggtggcggaggcggcagcagtggtggtggcggtgcttccgggagctggtaa

SEQ ID NO: 277072 - DNA, 570 bp, Morganella morganii
atgatcactctgcccgtcacgcttactgttcaggatctggctgactatcagacgttcagtttccggcatttttatcaggagccggtcgggtggagacgaattccttatattcttatctggctgatattatgcggaatgttattacttattttcagtacattttcgccgctgccgggcaaatttgatatttattctgttttttacgggctgagctgcgggtttttagcactactggtgtttatttacagccgttttgtcaaaagcagacgggttatgaagcagctttctgttcagtccggacattacctcctgcgcccggcaacgtttgaactgaataatgacgggataagccaggtttctgccctttaccattctttttttgcctgggaatcggtcattgattatgccgaaagcgccaccgggttttatctttaccacggtaaatatgacggtattattattccgctgcgggatattcagtcagaggcacagaagaaagatattttgcacctgctgtcacagaaaataagaaatgtgcagataaaaaatcaggccaataagatggcctga

SEQ ID NO: 277073 - DNA, 2661 bp, Morganella morganii
atggccgtaacgaacgttaccgaactcaatgaattagttgtccgcgtgaagaaagctcagcgcgagtttgccggtttctcccaggaacaggtggatgctatcttccgggccgcggcactcgccgcagcagatgcccgtatcccgctggcaaaactggcggttgaagagtccggcatgggtattattgaagataaagtgatcaaaaaccattttgcttctgaatatatctataacgcctaccgcgatgagaaaacctgcggcatcttatcggaagacccgaccttcggcaccatcaccatcgcagaacctatcggtattatctgcggtatcgtcccgaccactaacccgacctccaccgcaatttttaaagcgctgatcagcctgaaaacccgtaacgggatcattttctccccgcatccgcgtgcgaaaaaagccaccaacagagcagcagagattgtcctcaacgcggctgttgccgccggtgccccgaaagatattatcggctggatcgacgagccgtcagtggaattgtccaatgccctgatgcatcacgctgataccaacctgatcctcgccaccggcgggccgggcatggtgaaagccgcctacagttccggtaaaccggccattggtgtgggcgcgggtaacacccctgtcgtaattgatgaaaccgctgatatcaaacgcgcggtggcctctattctgatgtcaaaaaccttcgataacggcgtgatttgtgcctctgagcaatcggttatcgtagtggatgatgtgtatgagcaggtcaaagaacgttttgaaacccacggcggttatattctgaaaggcaaagagctgaaagccgttcaggacatcattctgctcaacggcggactgaatgcgaaaattgtcggtcagtctgcggtgaaaattgctgaaatggccggtatcgaagtacctgcctggaccaaaattcttatcggtgcggtctccgtagtggatgaatccgagccgtttgcacacgaaaaactctccccgctgttagccatgtaccgcggcaaagattttgaagacgcggtgatcaaagcggaaaaactggtggaaatgggcgggatcggccacacctcctgcttatataccgatcaggacaaccagccggagcgcgtgaaattcttcggtgagaagatgaaaaccgcacgtatcctgattaacaccccggcatcacagggtgggatcggcgacctgtataacttcaaactgtctccgtcactgacactgggttgcggctcctggggtggtaactccatttccgaaaacgtcggaccgaaacatctgatcaacaccaaaaccgtggcaaaacgagctgaaaatatgttgtggcataaacttccgaaatctatctatttccgccgtggttctctgccggttgccctggaagagatcgccggtgacggtgcaaaacgcgcctttatcgtgactgacggctatctgttcaataacggctatgtggatgaagtcacccgtgtgctgaaatcctacggtatggaagtggaaattttctttgaagtggaagctgacccgacactttctgtggtccgcaaaggcgcagagcagatgaacagcttcaaaccggacgtgattattgccctcggcggcggctccccgatggatgcagccaaaattatgtgggtgatgtatgagcatccggaaacccattttgaggaactggcactgcgctttatggatatccgtaaacgtatctataagttcccgaaaatgggcgtgaaagcaaaaatggttgctatcaccaccacatccggtaccggttctgaagtgactccgtttgcagttgtgacagatgataccaccggccagaaatacccgctggcggactatgcgctgaccccggatatggcgattgttgatgccaacctggtgatgaacatgccgaaatccctcaccgcgttcggcgggctggatgcggtcactcacgcactggaagcgtatgtatccgtgctggcaaacgaattctctgacggccaggcattacaggcgctgaaactgctgaaagagtttttaccggccagctatcacgaaggtgcgaagaacccggttgcccgtgaacgcgtacataatgccgcgactatcgccggtatcgcgtttgccaacgccttcctcggggtatgtcactccatggcgcacaaactgggctctgagttccatattccgcacggtctggctaatgccctgctcatctgtaacgtcatccgttataacgctaccgataacccgaccaaacagactgcgttcagccagtatgaccgtccgcaggcgcgccgccgttacgcggagattgctgaccatctgcaactgagtgctgccggtgaccgtaccgcgcagaagattgaaaaactgctgatctggctggatgaaatcaaagcatctctggggatcccgaaatccatccgtgaagccggtgtgccggaagccgaattcctggcaaaactggataaactgtccgaagatgcctttgatgaccagtgtaccggtgcaaacccgcgttatccgctgattgcagaattaaaacaaatcatgctggatacctattacggacgcacctatgacgaatctgttcctgttgcggcgccaaaaccgattgccaaacggaatgctaagaaataa

SEQ ID NO: 277074 - DNA, 246 bp, Morganella morganii
atgtgtaaggggagagagccggtggctcagctttatttttattactccgcaatgaatgcgggaaaatcgacagcgttactgcagtcatcctataactacaatgaacgcggcatgcgcacgctgatatttaccgcagagatagacaaccgctatgagcagagcaaagtcacctcacgtatcggcctgagcgccgatgcacgggtctttggccctgagacggacgtcaagctcggttattatccgtga

SEQ ID NO: 277075 - DNA, 237 bp, Morganella morganii
gtgatcaatccgtttgtcacctcgccggtgctttcagcggacacggaagcacaggctctgccgccgctgccgttctccctgaagcagtggcagcacacacaggagaaggacgcgctggatgcagcattacagcgcgcgcagtttaatcagcgggaagcagcacaactgctgaatctgacctatcatcagtttcgcggattactgaaaaaacatgccggcggcccgcaaccggattaa

SEQ ID NO: 277076 - DNA, 681 bp, Morganella morganii
atgcagccaacatcagcaggacaaaatgttattttaaccgggtatatttcatacagcgggccgggacctgcgcttggtacactgactgaagatacggcagcaagagtccccgggctggctgagcgattcagcggcatttgcaacagcgtggcagatttttttatgtcagcaaaagggaaagtgaataactcactgcatcagttaggtgaccggataaaaaatatctctttctgttgcgaaaaaacggaaatacgagcggaaacgccgcccccgcctgtgcagattccgttgttttctcagattttacttgagtcagcaaaagaatgtctgccaaagcatctggatatactggcaggtaaacttgagaataacgaacctctgcaaccggacatgctggtgagtatctcaggtggtccgctgagggggattattacccagctcagttccataaacgggaaaatatatgagccggggtctgaaggtatacgtgaagaatcgggaaatctgctgagaaaggaagtggcgcagggggaattctctcagcttggcagtatcgctgatttgggcaaagcaaaagagtatctcgccagaccgggatttgaagcgatattccgtgaaagtgttggtcaggtgatatccgaaatccgcgggaaaatccttccggaactgatgaaactttaa

SEQ ID NO: 277077 - DNA, 459 bp, Morganella morganii
atgcgcagatttacacaggtatgcaatgctgtattggttatcaccggacttttagcggtgccgctttcatcttatgctgacccgggaaacggcaaagggcatggcaatcctcacggacagtccaaaaaacaaggacataaaggcaacggaaaagagagtagggagtttgcggattccggcaacgggatatcgctgacactgacttacggagatgcgcggagaattgcactgggaagcggattgaccggatacagtgcgttgccgccgggaatagccaaaaatctggccagaggaaaaccactgccgccgggtattgcaaagaaagcggttcctgcctctatgcttgagcaattaccgcattatccggggtatgaatggcgtatcgccggtaacgatttagtacttattgcggtgagtaccgcaattgtcacatcaattattaataatgtttttgattaa

SEQ ID NO: 277078 - DNA, 993 bp, Morganella morganii
atgaataatccgcccgcctttcatctgcgccgcctgtgcctctgttttctgttggtgatcatgatattgacggccatgaataccggcggactgccggtttctgtcagcgcattcctgcggggtgaagtaaccccgcaactctggcagatctggttatctgtccgtctgccgcggattgttctggcagttctggtgggtatggcactggccaccgccggggtattattgcagggattattccgcaacccgctggcagaccccggtttgctcgggatcagcagcggcgcagccgttgcggtggcactggggattgtctttatcgcgccttatctgagtggtgcagtcacactgtatctgcatattattactgccttcagcggcgcactttgtatcagcgggctgatttttctgctcaaccgccgccgtcagcctttgctgcgtctgttgctgtgcggcattgccgttaacgcaatcagtatgtcctttgtcggcgtgctcaattatctgagtgatgataaagaattacgtcagttttcactgtggatgatgggcagcaccgggcacatcagctggactctgcttctgcctgctatcgtactggcactccctgtgttttatgccgcattcagactggcacgtccgctggatatgattcagttgggagaagaagaagcacattatgccggagtgaatgtccgccggacacaacagtgtgtcctgctgatcagtgccctgctcaccgggattgccgtggcactgagcgggattatcggttttatcggcctggttatcccgcacctgatgcgtatgattttcggctggcaccaccggcttctgctggtgacatcagcccttgccggtgcactgctgttactgctctccgatacactcgcccgcacactggtggtaccagcagaaatcccggtcggattactgaccggattacttggtgcaccctattttctctggctgattttctctgtgaaggaatga

SEQ ID NO: 277079 - DNA, 525 bp, Morganella morganii
atgaaaaaactcattccgttgttaatcctgatgggggcatcaacctccctggctgcaactgagcgcgttaccctgcatgaagcgacagaaaaaggtgccggtaaggttatcggcactattgatattcaggaaacggattatggtttgctgtttacaccggcgctgaatgggttaccgccgggcgtgcacgggtttcacatccacgaaaatccgtcctgtgatgctgcagagaaagagggtaaaccggtacctgccctggccgcaggcggccattttgacccggcaggtacaaaagttcatgccgggccatatgctgacggccatttgggcgatttgccggcactgtatgtgactgatgacgggaaagcgaccacgcaggtgctggcaccacgccttaaaaaactcagagagatcaaagggcatgccattatggttcatgcgggcggtgacaatcattcagattcaccggcaccattaggtggtggcggcgctcggattgcctgcggcgtgatagcagcagaataa

SEQ ID NO: 277080 - DNA, 153 bp, Morganella morganii
atgacaaattattcattccgcagattttttctgccggatagcaaaagagggagcaagctccctcttctgtctgaacaattacgccagagcgccttttgctttttcgaccagcgcagtaaatgcggctttatcgaatacagcgatatcggctaa

SEQ ID NO: 277081 - DNA, 1029 bp, Morganella morganii
atggatttatcttcggactcttcacgacctttactgagcattgttgttgccgtctataacggggaaaaatttcttcctcagttttttgactgcctgctgaaacaaacacttcctgcctgggagctgatcctcgttaatgacggttccaaagataatacggatgctgtgctgcgtgaatggcaggacaaattcccgtctgtcactattctggagcaggtaaatcaaggcgtctcggtggcgcggaataccggttttgccgtggcaaaagggcaatacatcacgtttccggacattgatgatgtgattcacccgcaaatgtacggtcgcctgctggaaattgcgcttgccggaaaactggatgtggtaacctgcaatggtacctatgtttatgaagacgggcgtgaaccacggccgattttcccgcctgatcgtctgcgttccaccggcgttctttccgggccggactggctgaaacgggcactcaactcccgtaagttcctgcatgtgacctggctgaacctgtaccgcactgattttctgcgtgagcagggctattattttgagccggggctgcaccaccaggatattccgtggacaaccgaactgctgatgaccgcagcgcgggtggaatatattgatgaacgttattacgattatctgatccattccgaatcggtatcgcatacgccgcctgatgacaaaatccgcgtacgtacagtccataattacatgaaaattctggaaatgctgaatgatatcaatcagcgccatgcggatgtcgcgaagcagatccctgcctgtcactggcagatttccaaagaagggctggggatcctgcataccatcagtgagatagaatctccggaggtgaaacaggagattgtgcgtgaactgtttgatcgcgggatctggtcactcatctgggataacgccaaagatttgcggctgcgctggcggctggcccgccgttatccgcgtctgaaagcaattctgaaagatgcggcggagaatacagcaacaccggcctga

SEQ ID NO: 277082 - DNA, 1335 bp, Morganella morganii
atgaagttaaccaaaattgctaccgtattattatttttatcacctgcttatttatcggcggcgacacaagatttcacctatcgtgatggttataaaatcacggcagatcaggcatcacccgaagttaatatccggattaaggataataaaccgacacaatcaatcagcacaccaaattcaaatggtatttcacacaattactttactgaattcaatatcggaaaaaatggcctgaatattgataattcaccatcagctcgtgtgattatcaacgaagtaaccggaaccaatatcagtcagctcgatggcactatggccattattggtaaacaagccagtctggtcattgctaacccgaatggcgttaactgtaacagctgtggtgtatctaatgttagccacctgacactattagccggaaatacttcacttgatgttactacaggaaaactaatcggttttaaaaatataacgaataatgttatcgttagtaacgtcaaaaaaaatgcgataaaaagcaacctgacattaacgggaaacagcgttgaaatcaacagctcttatgttaattcaccgcatacaacgattaatattggtgcagataatatcgatcttaaaaataatcttaactctcagatttctgatgttaaattaaccccggggaaagtagttaatagttcaggctcatattcgaattcattgatcgacagcgatactaaaatacgcggtaaaatgaccgtcaatgccaaaaatgcaacgttaacaaataacggtaatattatattatcggaggttaacttaaacttactacattctgaacttattaatgatggttatcttaaagcatcaaatattaatattaatgcaaaagatggtagtatgtctaattatcaaaagattagtacaaaaaatctgactgctgattataatggcaatttctccatttacaatactacagcaggggaaaaaccaaataatttttatgcccaaaatatgtccattaacagtcataacatcaaccatatgattgacctgaaaaataatgcatatcagggttatctgcgagataataccttatctgtcagtaatgataccggtgccacatttgcaaccggacaattcaatattgcaggaaagcatgacgccgtacacattaaaaacgatggcataatgtttaccggaaaaatgaatgtcactgccggttcagtacaattctataatgaccattatctgagaacagatgctgactctgcaatacatggtattgttggtgtttatggcaatggttcccggaatgagaacgtgtcagttaccacccataattttgatatctga

SEQ ID NO: 277083 - DNA, 507 bp, Morganella morganii
atgaaccaaaatactgaacaggggttaaatgccaaaataggttttaatggcgatttttatcatgttgataccatgtctgggcatggtattttaattgtggataacctgtttgagtcttgtctgttatcaaaagataccacagcggaaatgctcggtttgtgtttaaagaaatgcctgaaacaaagccggatagtagatccgggaaattatgatttctttgactataaaaaagtaaaagaaagatatgaagaatggattaaaaacatcattcaattgcgcggatataaaaataaaaaaacactttttaaacaaatgaatacatgtaatgcaaggcaggttggtgaccttattacaataaaaccttcaaaccatattaaacttgaagcctgggacggtgatggtatatcagaaactgattatgtcattattccggtatcggcttcagatgaagagttgggtaatgccgttatcgaggcgttttcccgctgtaagggaaggcaattctga

SEQ ID NO: 277084 - DNA, 507 bp, Morganella morganii
atgagtcaagtgaattctgatgaactgaatgcaagcataagctttaatgggagttatttctatttcttgagaatgatcgatcatgggttgttaataccggactatttgtttggtaatattattatacctggggatgcggtaattagcagtgttggtataagcttaagacaagttctcaaaaaaaatgaggatattaatcctgaagagaattatatttttgatcataaactaaataaagaaaattatgaagacaatataaaaaaattaatgggtttgtgcggatataagaataaaaaatcactttttaagaaaatgaacaaatgccttgtaaagcaagtcggtaatgttattgaaataaagcctctaaatcacattaaacttgaagcctgggacggtgatggtatatcagaaactgacgatgtcattattccggtatcggcttcagatgaagagttgggtaatgccgttatcgaggcgttttcccgctgtaagggaaggcaattctga

SEQ ID NO: 277085 - DNA, 507 bp, Morganella morganii
atgaattcgataaattcggatgagtttaatgcagtcgtaagttttaatgaagattatttttattttttaaggatgattaatcatgggttgttaataccggactatttatttggtgatattattattcctgtggatgcagcaattgacaatattggcttaagtttaaagcaggttcttacaaaaaataaagatggagagtctgaaggttattatatatttgatcatgaattaaacaaggagaattataaagaaaacatagtaaagttaatgaggttatgcggatataagaataaaaaattactttttaaaaaaatgaataaatgccttgtaaggcaagttggtaatattattaaaataaaacccctaaaccatattaaacttgaagcttgggacggtgatggtatatcagaaactgattatgtcattattccggtatcggcttcagatgaagagttgggtaatgccgttatcgaggcgttttcccgatgtaagggaaggcaattctga

SEQ ID NO: 277086 - DNA, 5292 bp, Morganella morganii
atgtgctttattaataagatgaaagaattatttattatattattttctgtttttccctattatatatatgcatcagaaataactccggctaataaccgtttaaaagtaaatgtcaaaagagatataactattattgacatttcaaggccggatggaaatggattgtcacataatcaatacagtaagtttaatgtttctgaagccggcgtggtattaaataacggaacagaagacagtcaatcttatctggcaggtgaaatagagggaaacataaatctgcgggggagtagtgccagtttaattattaatgaggtaatcagtgatggtctatctgacttttcgggggctatggaggtttccggtaacccggcatcagttattattgctaatcccaatggtattacctgtgatggctgtcatttcattaacacgccagatattacacttgccacggggaatgtgaattttaatcctgaaaataaattttcatctctcaatgtaagaaatggatcaatcacgataaataaaaaagggatggatacatatgcacaaaaaaatactaaccttatcagtgctgatacgaaaataaatggaaagataaatacaaaaaatctttttattataaatggtacaaataaaattaattaccaggatggtattcaggaatctatatccggttttatggggaatcaatcatcatcagtaaatatgactgaggaaggtgggatttcggctgaaaaaatccgcattattaatacaagtagtgatggcaatgtacaactaaataatattgagtctgttaataatggtataagtgtaacagcaaaaaaatcggtattattatcgggaaatataacatcaaaagaaagaataagagtaatagccgacaacattattataaaagataaagcaaaggttgcttccggtcgtgatactactcttatatcaaatgatattttaaatgccggagaggttatatcaaaaggtaatgcacgtattttttctgatgttgttaataatcagggccacgaagcaattatacaggcagaggaaaatttatggatacaaaaaaatccggaaggtgattttagcaggagtattgttaataaatcagcgttactaaagtctgaacgtggtaatttaattataaaagcgaagacattaactaatgtcagtaactctgagcctgttgagttttttaagcttccggctaaatctaccgaagtgcgcagcgtcggaaatcagttgcgttatttgccggtgtggcggcgagatgggttattgattgtatatccggaattaaaaaactttaaatatgaaaaatggtttgatgaaatagatttactagctaatgacagtgttaatgttgaaaaatatgcagtgagatataagagtgattatcatcctgcgtatatagattccggtaaaaaaatatatataaatgcgaatcactttgacaataatgattcatttttatctgcagggggaaatatagttttaaccggcaaggatatcaatattaaaaatcatggtctgggtattttaaaactatgggaaagatatcagccggaagatataaacagtgaatggctgcgtttttttgttgagccggatactattccccccggggtaatggttaatgatattaaaattccctttcagaaaaaggagcaattttatacatggattagccatggggtggctgacagtccatctgtaagttcagaaaatctgattatagattatagcaatacaattaatgtagagagtaagatccctgaaaaacactatccggtaaatgagattatcagagatagttttagtcatcatttagctgcagaaaatatattgttgaattcttcatcaatagatttgaagtcaaaaataggtgcaattaataatttaaatgttcaggctaaagagaaaatttattcacgtgaaagtacattggtagcgggtaagtcattatcattaacagcagatagtattgaacttgaaaataccaatataaagtccggtgagctgtctcttattgcaaagaaaggcgatgtaatatactcaacaggaatcaggcctgtatttacatctgacatttctgcgctgcctctgttacatgcacctggtggtatttatgcagatgcaggaagtgatattacattcagaaatatagcgcttacgttaaatagtcatgtggatttatcttcccgtaaaaatatacggattgattttgatccgaaagcgatatcaggaatatcgacgaaaaggacagattatgaaataaaatcactgtcagataaatttcaggaatggatactttcagattatatcaccctgaatgccggaagtaacattactattaacggtacagatatcagcagcaaaaatgatataggtttttattccggcggaaatgtagatgttacctttgataaaaaatgggaaggccgtagtgatatctatgcaagatatttaagacctaaaatacgtattcattcagaaagaaattttattattaattctgccggagatgtaaatctattaaatgcaggcctgcatgctgatgaatctttattgttgttttctggcggggaatttaatctgataggaattccctattcagcaataaggtattcttatgatgattacattgatagtcgctatgtaagttcttatcttacagcaaagaaaaatatcacattagtggcggaaggtgatgttaatctgcatgcagcaatactctcctctgatgatgatatatatattcgtaatagtggaaatattcagttgggatctgaaaaaatacactatcgtcagaaaagacgtgattatctggaagatacatatcgccatgtcagcacactggtaaaaagcaagaacaaattaacactattgtctgaaggcagtgttttattccagggtgctgagcttatttctgatggtgtaatggatatctcggcaaagggcgggtatttatatgcacaggcaatggaagaaacgagtcattatgaagataagaaaaagaaatgtaatcgttggacattctgtataacaaaaaaagaagtaacaaaggtaaagcatgaagtaaaaaataaaacgacagaatttacatcgaaagaagatattaatttaatcgccctggatgatatcacacttgaagctgcaaaaatttcagcagctaaaaatgccaggctgaaaagtatctcagggaaaattaattttaaagctgttaacgactcactttatgagcaaaccgtcagccattccagggggttctacattacccgccgggatcaggggcactcgctgagccgctggcggttgccgcagatttattacggcggaaatttatctgttgatgcagcaaatggcataacagcagacagtaaaacattcagcattcctgaatttaaagaatccgcaatgatgctgagcagccataccggaaccggttggctgaaagaactgataatccgcgatgatgttcagtggaaccgggttgctgatgcctatcagcgctgggactataaagagcagcaccttaatccggtagcatcagctgttctggctgttgccgtcaccgctgcgacatcgggctccgggctggccgcatgggcagggagtaccgcatcttccgcagccacaggaacggctgccgctgttatttccggagctgcgcattccggaatgatagcactgacaacacaggctgcggttgcactggcagagaataaaggcgatttatctgaaacatttaagtcactgggacgcagtgaaagtgttaagtctgttattggtcagatggttgtcggaggggcgttcaatggtctggataaatcgatgggctggcagaacggaaatccggcacaatcgcggattccgttactgagtgacggagattggcacaaggttgcacagcgcgtttccgcccagtctgtaatcagctcagcggtgggttcggcagtatcagaaacaagcttcagggagaactttattaatgcgcttctcagtaacacgggaagtcagtttaatgctgaaggcgcaaaattaattggtgaccacggtgaaatattaacggaaccgggcaaagcaattacgcatgctgcggttgccgctgtcagagccgagctgaccaaccggagtgtcaggggagcggttaccggggcgctggctgcgtcggcagccggtattatattaggcgattctttagatcagacagcgcaggaacatgaacaacaggcacagctggcccggatgacaggtgctgttgccggattgattgcaacaggccatatcaacgggctgaccactgcggcggatgctgctgagatcgttgaacgttataaccgtcagtttcatttgcaggaattaaaggcgatagaggaactggctgacggtgataattttaaaaaagagcgcctgctcgcagcaggttgccgtctgatcaactgtactgtgcaggaatctgcaaattcaccggataaattacgttttgatgcgttaatggcaaaatatccggagacgtatcttgaagataatttactgacaaattactgggtgacaaaagcggatgacggcattcgttattatccctggtcagttgcacctggaaaagtacagctttttacttacagtgaaactgaaagacatgatgatattgatgattttgtccgtaatcaatatgcggaatatataacagattttaccggtctggaaaaagcaactgccgaaattattatcgacagtatcctgatgtcatcagtgaatggcaggagaggtaatcctgccagaatgcataaacatatcagaaaggtcagttatgcagatttaaatcaaatctataccactgataaaaagggcaataaaatcccgatgaagtggtatcagtcaggttcctctgtcaaccagcagggtatgccgtttgagcattatattggtacacaattaccgccaggctcaaaactcccggatggattcaaaacctttgattattatgacagtaaagataaaatagcgattagcgtaaaaactattaacactcaaacagatagtagactaaataaacctgatgccataaaatatatcattaatggctatgttaataaaatggctcagtttacagatcacataaaagagggtactccattgagcacagatgatatcaagaaaagagtattacatattggtcttccggaaaaaacaacatctgaacaatggaagtcaataaatagtgcagtaaagaacgcaaacgataaaaatatagatattaaaataaccattataaaaggtaattag

SEQ ID NO: 277087 - DNA, 558 bp, Morganella morganii
atgaaaaaaacattaacggcgttatcattcatttccgttgcattattctctgctgctgttgccgccggaccgggaagcacagaatatacctaccgtaacggcgataaaatccgggtagccagtccggaagcggaaacatcgctgtttaaagataaatcagggaaaccggttttggtgattacatcaccggataaccgcgggatctcgcataatatttttactgactataatgtcggcaagaaaggcctcgtcattcataataaagaaaatgccaacaccattattaatgaagtgatcggcgacaataaaacccacctgcgcggtaatacctttgtcgccggcggcaaggccagtctggtgattgttaacccgaatggtgtgatctgtcaggattgcagctcaaccaatacctcactctattctcaccgcgaaacactgccggtggttatcaatgctgcaaaaaataatgaggtcatttttgatgcccgcaaaccgctgcatgcatcagaacgtctgaccggcatcagtcataatatttccgtaaattcaccgcgctga

SEQ ID NO: 277088 - DNA, 1767 bp, Morganella morganii
atgagtgtatcttctgattatccgactcagcgtgaatccattgaatctcactttaccaccagtgaccagcagcggttattcttccgttactggccttccgcaaccgcagaaaagaaagccattgtgctgtttcaccggggtcatgagcactccggacgtgtggcacatcttgcggatgagctggcgttacctgatttcgcggtatttgcctgggatgccagaggtcacggccgcaatgacgggcccagaggctacagcccgtcgatgggcacatctatcagcgacatcaatgaatttattaacttcatttcatctgagtatgaaattcctatcgagaacatggtcgtgctcggacaaagtgtcggcgcagtcaccctgaccggctgggtgcatgatttcgcaccgaagatccggggtctggtactggcttctccggcctttaaagtcaaactctatgtgccgtttgcccgcagcggactggcgctgatgcagaaaattcgcgggctgttttatgttaattcctacgttaaagccaaatatctcacccacgacccggtacgtatcgcttcatttgagcgggatccgctgatcacccggccgattgccgtcaatatcctgctggagctctacaaaaccgctgaccgtctggtggcggatgctgccgcgataacagtgccgactcagctgtttatctccggcagtgaccacgtggtgcaccgcaagccgcagaatcagttctatgcgcggcttaacaccccgtataaagaaaaacatattctgccggggttttatcacgacactctgggcgaaaaagatcgtcatatcccgctggcggaaatccgccgctttgtcaccaccctgtttgaacagccgcgctatcagcacgattaccggtttgaggatgtgtgcagcgccggtgccgatgcttatcgtgaattgcaggttccgctgccggattactgcccgaaaaatctcggttataaactgctcagcaaagcgatgtccaccctcggcaaagcctcggaaggcgtcagtatcggctacgataaaggctttgattccggatccaccctcgattatgtctaccgtaaccaggctcagggcaaaggcattttcggccgcattgttgaccgccagtatctcaacagtatcggctggcaggggatccgccaacgcaaagtgaatattgagaaaattctgcgccgcaccatccgggcattgcaggaagagggtcagccggtgcggatcatggatatcgctgccggtcagggccgctatctctttgatgcaattaatgattacagccggatagaatctgttctgatgcgcgattacagcaccatcaatgtggaacagggtcgtttacagatcaaagagcgcttcctggaagacaaaatccgttttgaagagggcaatgcctttgataccgccgatctggcggcggtcaccccgaaaccgaccctcggtgtggtgagcgggttatatgaactgttcccggaaaaccatctgctgcgcgattcccttgccgggctggcgcaggcgattgaaagcggcggttatcttgtctacacctgtcagccgtggcacccgcaggtagaaatgatagcccgcgttctgccgagccatcagggcggtaaagcctgggtgatgcgctgccgcagccagggagaaatggatgcgctggtggatgatgcagggtttgaaaaactggatcagctcattgataactggggtattttcagtgtctcagtcgccagacgccgctga

SEQ ID NO: 277089 - DNA, 1290 bp, Morganella morganii
atgacgcgccgcgttattgaagtcgatgaacgcccaccactgctggtcaccattccgttaagtttacagcacctgtttgcgatgttcggtgctaccgttctggtgccgatcctgtttcaggtaaacccggccacgatcctgttatttaacggtatcgggacgctgctgtatctgtttatctgtaaaggaaaaatcccggcgtacctgggctcaagctttgcctttatttcaccggtgctgattttactgccgctcgggtatgaactcgctctcggcgggtttatcatctgcgggctgttatttatgctggtggcggggattgtcaaaatcgccggacgcggctggatcaacgtgctgttcccgcctgcggccatgggtgcgattgtggcggtcatcggtcttgaactggcaggaaccgctgccggtatggccgggctgaaaatcgcggatggtgcgtctccggacagcaccacgctgattatctccctgaccactctcggggtgacgattctcggctctgtggtgttccgcggcttcctggcgattattccgatccttatcggagtactgaccgggtatgcgctggccttctttatgggcgcggtggatttgaccccggtaagtgaagctccgtggtttgcactgccgacgttctacacaccgcgttttgagtggttcgctattctgaccatcttaccggccgcgctggtggtgattgccgaacacgtcggtcacctggtggtcacggcgaatattgtcaaacgtgatttgatgaaagacccgggtctgcaccgttcgatgtttgccaacggcttctcgaccgtactgtccggcttcttcggctccacaccgaacaccacctacggcgaaaacatcggcgttatggccatcaccaaagtgtacagctcctgggttatcggcggggcggcggtactggcgattctgctctcctgtgtcggtaaactggcggcagccattgctgctgtgccggtgccggtgatgggcggggtatcactgctgctgtacggggttatcggtgcatccggtatccgcgtgctgattgattccaaagtggattataacaagccgcagaacctgatcctgacggcggttatcctgattatcggtgtcagtggtgcaaccattcatatcggtgcggctgaactgaaagggatggcactggcaacggttgtcggcattggtctggcactggtgttccgtctggtgaatattatccgtccggaagagcgggtagtggatgtgaatctggatgaagtgaagaaagactga

SEQ ID NO: 277090 - DNA, 1455 bp, Morganella morganii
ttgaccgatataattaatacattaaacggactgctctggaaccacctgctcatctatttattactgggtatcggactgtacttcacatttcgtaccggatttatccaattccgtcacttcggacacatgttcagcgtgctaaagcacagtaagaaatcggataaatccggcatctcgccgttccaggcgctttgtacaagcctggccgcgcgggtcggtaccggaaacctgaccggggtggctatcgccctgactgccggtggccccggtgctatcttctggatgtgggtggtcgccctgatcgggatggcaacatcctttatcgaaagcacactcgcacagctttataaaacacgggacgaccagggaaattatcgcggcggaccggcatattatatggaacgcggactgaaagcccgctggatgggcgtgttgttttctgtcttcctgatcatcgcgttcgggctggtctttaacgcggttcaggctaactcgattgcccaggcgtccaaaatggcctttggtgcggatgccggttatgtcggtgccttgctggtggttatctgcggcgtgattattttcggcggtctgcgctcgattgcccgtgtggcggagctggtggtgccggtgatggcggttgcgtatcttatcctcactttctgggtgatggggcattacgccgagcgtctgccggatgtctttatgctgattatcaaaagtgcctttggtttacaggaagccgtttccggtgctgtcggttacggcgtggcgcaggccatgattaacggcgtgcagcgcggtctgttttcgaatgaggccggtatgggctccgcaccgaatgcagccgcttctgcagcaccgttcccgccgcatccggtttctcaggggtacgtacagatgctgggagtctttatggacacactggttatctgcagcgccaccgcgatgattattctctcctcaggtgtactggataatccgccgggcgatatcaacggtattgagatcacacagctggcgctgagttcggttgtcggcagttggggatccacctttgtggccgtggctatcttcttcttcgcctttacctccattattgccaattacgcttatgcggagagcaatatggtgttcctcgagcataaacacaccaaagggttgtttgtgctgcgtctggctgcgctgggaatggtgatgttcggggcactgtcagaaatgccgctggtctggaaaatggctgatttctcgatggggctgatggcggtgactaacctgattgctattttgttgttatccggcgttgcatttaagctggcgaaagattataaccaacagcgcaaaacggggaaattaccgcagtttgatatcaacctttatcctgaaatccgtaaacaggtcgaagacggcatctgggaagaagtaccggaaccgctggtcggacaaaaggttaactga

SEQ ID NO: 277091 - DNA, 177 bp, Morganella morganii
atgtcctctgcacagattttactgactatctacgcaacaggtggtcttctttcattcattctgacttttttcctgacaaaagatccgaacccgtttttccgcctgctcagttgcctgctgatagccctcacctggccgatgtcattaccggtggttattttattctctctgttctga

SEQ ID NO: 277092 - DNA, 360 bp, Morganella morganii
atgaattctgaagatcgcagggctattgtcgcggcgttagagtcaatcaagtcagcagaaatcgcaaaaaattttacaaaattcagcaagggtatgggggttctgagtcatgcaatcaatgcatttgattgggttggtgaattgattaaatctgtaaaaacagataattggcggccattttttgttaaaaccgaagtcatcgcagccgggaatgctgcgactgttgtagttgcattcatcttcagtgtattgctgggaaatcccgtcggccttataggctatggtttgataatggccggcaccggagtattgattgatgatgaactggctgaaaaagctaatctgttttgggggatttaa

SEQ ID NO: 277093 - DNA, 297 bp, Morganella morganii
atgacgaatcgatacgaagacaccacaccgtttgaacgtgatgtgatgacctccatgggatatcactggaaaggagagggctggcaaaaagcatcagataatggcgagactatggttgttaccggatggaccggggatatcccggcagacagcagcaggataactcatatctgggatcagaatattgcggatatgaacacatcccccaatcctgtatgggatgatgccgatgatggctggatgcatccggtggatgaagaaatcagaaaggaaccggggacaaggcggaacaattag

SEQ ID NO: 277094 - DNA, 1167 bp, Morganella morganii
atgctgcttacagacatccaaatccgcaaagcaaagcccaaagataaagcgtataccctgaatgatggcaacgggctatctcttctaattgagcccaacggctcaaaaggctggcgtttccgctaccggtttgcgggtaaacctaaaatgatctctttgggtgtatacgataccgtaacgctggctgatgcccgtaaaaaacgggatgaagcaaaaaggcagctggcagaaaatattaatccgagtgatgcccgtaaagccgataaaataacactcaaattcgccaccgaaaacacttttcaggctgttgctatggaatggcatgcatcaaagtgtgcaacctggtcagagggttatgcagaggaaatattgcggtgttttgaaaatgacgtatttccgtatattggtaaccgccctatcgaccagatagcaccgttagagctattggctgttctgcagaaaattgaaaagcgtggtgcattagagcaagccagcaagatccgcagacggtgcggggacgtataccgttacgcagtgatcaccggcagagcaaaatataatccagctccggatttatcaggcgctatgaacaagccggaagtgaagcattttcctttcctgcgtgaaaatgaaataccagattttgttaaagcgctaaatgactatcagggtagcaaattaacaaaatacgcaacgcaattacttatgttgaccggtgtcagaactgtagagctgcgctttgctaaatgggatgaatttgattttgaaaatgccctgtgggagatcccgaaagagcgcatgaagaaacgccgtcctcacctggttcctttgtcaccacaggttatagcaatcctgaatgaactgaaaataatcacaggcaattatccgttacttttccccggcagaaatgacgcaagaaagcctatcagtgaagcgagtatcaacaaggtgatcgagaaaattggttataaaggacgactcactgggcacgggttcagacacatgatgagcactattctgcatgaaaaaggctttgacagtgcatggattgaattgcagcttgcacatgttgataaaaattccacccgtggaatttacaatcatgcattgtatatagagtctcgtcgaacgatgctacaattttatgctctatttttaaatgcatag

SEQ ID NO: 277095 - DNA, 1011 bp, Morganella morganii
atgagtatcaaccattcttatgatattggtagtgatgggcgttatcagctaaaattaaatatttctggtttagatagagatcaaacagaaacttccgaactcagggtgaatatttatgcatattgtctgactactggaacctcacatttcacatgtcaattagaattaagtcatttacaaaatctgtatagtcacttatctcaatacagtgttatacgtgaaacaacttcctctattacaggccattttgttgaaatacaaaataatcatgatgagattatgaggattttagaacgctcagataatgagtctttaattcttgcattacagcatatcattagtgataggctaactggttcagatattaatactattttaggtcgaaaagatgccatagatgaatttgaatataaattaaaccatagcaatcaattcagagaagctgattggcaacggttttttgaacagaatgaatggatttttggttatggattaaattatcagtttttgaaaattttgcaaagagaagcgcacatatcacatactgatttaaatgggtctaatgatgtaattgctgatttccttttgtcggacactcaatatactaaaatagttgagctgaaaactcctgatactgctttatttgctaatcgccaaaatcggtcagattcttggcgactatcaaatgagttaatggatgcagttagccaaatattagctcaaaaggcaaattgggaaattgaaagccagcgtgcaaattatacttctgatggcatgtgtattttagaggagacatgtgaccctgagtgtattttagtaattggaaatacatcatctattacaggtaacgatagagagaaaattataaaaaagaaaacactggagttatatagaagaaatttaaaaaatataaatatattattttatgatgaactttttgaacgagctaaatttatagttaaaaatgcagagtctcttgaggcatcgatttctgatattttagagttgtga

SEQ ID NO: 277096 - DNA, 330 bp, Morganella morganii
atgtcattacaacttttggaaaaagcaattttagaacgaaaatcaatttcattcgaatataataaacctgggaaaacacttggggttagaataggtaatccacatgcgatttttatttttaaagcaaaagatggccgtgaatcaacaaaagtccatttagtacaagttgatggagtgacggacagtgaaccaaatttcccagactttagaatgtttaatatagaagagattacaaacgtagcgattatagatagtgatataccatttgatattgatagcaagtataaccctgtatgggctggatatgataatgtaattgctaaggtgtag

SEQ ID NO: 277097 - DNA, 2721 bp, Morganella morganii
atgaacactcctgagactgttgccgttgcagccagtcataccgctgtgcctaccgtcaccgatattgtaaatgcctcaaaaggccgctggccgcatattttgcacaatatggggattaacgtaccggaaaataataaacacggcgcatgcccgaaatgcggcggaaaataccgtttcagattcgatgataaaaacgggaaaggaacgtggttctgtaatcactgcggtaatggcgacgggctggatttaatcacactggtgaccgggaaagatatcaaatcatcctgtcatgaaattaataaaattattcagctgccggaattcagaaaaataacgccgaccagaataaaaaaggtcagcgcggaaaaaggtgtcggaacctatgaaaaattaaagaacggatgtctgtcaggcgaaagtcagtatctgacaaataaaggattaatgaataaccaatataacattaccggtcatccgtatacacaggggaatttttcttttccggcgggatcattgttactgccactggtgaactgtcagcagacagtgaccggtggtcagctgataagtccggcgggagaaaaaagcctgttatccggttcggtgttatccggctcatttattattgtgtcaccgcagacggcggcacagccggaacaaatcattattaccgaaggctttgccaccggtctgagcattgcaaaaattacggatgcgctgattgttgcggcggtagcggctaccaacctggtaaaagcggcgcaacagctgcggggcacatggccggatgccagaattattatcgccggtgataatgatttttctgacggcagtgataacaccggcaagatgtgggcggaacgggcagcaagagcggttgacggatgggtgactctgccgccgacacattacaaagcggactgggatgattaccggcaggaaaataatccggagaaactcaaagaggcattctttgaggaaatgatgtatttcggcaaagacaaaacccgcttaccgcaggggttccggctgactcaggaatatctgtggtttgataaacagattaataaatcagacggtgataccgagatccggaatatcaaaatcagcagcccgataaaagtcactgcaatcacctgtgacgctgacggcagtaactacgggcgtttgctggaatgggaagacacatacggtaacagccgcaaatgggcaatgccgatggaaatgttaagcggcagcggtgaggagctgcggcgcgtactgctggtgaacggactttcatacatcaatatctcaggccaggcacgggcgcacctgatggaatatatctcattgtgcagaccggaacggaaagtcacctgcgtgaataaaaccggctggcatggcaatgtgtacgttctgctggatgaggttatcggtgccggggcagattcggtgatcctgcagacatccagtgtgcaggggaaagatttcagggttgccggtaccagtgaggaatggcgggagcatatcggcagatactgcaccggtaatgcccggctggcgttttctgtcagtctggcctttgcctcctcactgctgcggctggtcggtgtcgggggtggcggctaccacctgaaaggggaatcgacagacggtaaaaccaccacgatgaaagtggccgcatccgtgtgcggcggtactgattactggtacacatggcgggcgaccggcaacgcgctggaggggacagcctgccgccgtaatgatgccacgctgatgctggatgaaatccgcgaggtggacggcagagaggcgggaaatattgcctatatgctggcaaacggtcagggaaaagccagggcgaaaacagacggcagcgtcagggaaaccaaccgctggaatctgctctttctgtctaccggggaattatcactggttgagcatgcggccaacgctggggaacggacgtatgccggtgttgaagtcaggatgatccaaatcccgagtgactctgggaaattcggggtatttgaggaattacaccagtttgccagcggtaaagcactggcggaataccttgaacaggcagtcacaaaataccatggctcgccgttccgtgactggctcaaatatctgaccggcaatctgacggaggtgtcaggtaccgcgaaagccctgctgaaagagtataccgcccggatgatgccggaagatgccggtaatcaggtcggcagggcaattacccgctttgccctggtcgcgatggccggagagatagccactcaggccggtatgaccggctggcagcccggagaggcttacactgctgcggaaaaatgtctgatcgcatggatgaaagagcgcggccataccgctaatcaggaagatattacggcactggagcaggtcagtgattttatttcccgtaaccagttcagccgttttgctgactggtacgacgaacacagccgtccggtcagcatgatggggttccggcgcgttgagaaagcggcacaggggcacgatccctcaattgcattttacgtgctgccgtctgcatggaaagaaatctgtaagggatatgactcacgtaaagttgcccggctgtgtgtggaaaaaggctggctggaagccggaaaggacggcagaacacaaacaagtatccgcctgccagaaatagggcttaaacgggtttatctgttcaacagtcagatactcggctgcgccggtgatgactga

SEQ ID NO: 277098 - DNA, 240 bp, Morganella morganii
atgaaaaacacagcatatcaaaataccgtcatatcaccggccggtgaaaaacagttaatcagagccgcacaaattacggcatttctctctgaacttctgaccaataacgcaatgagcggttcccgtacggtttcctgtgagggaatggccgctgtcatggaatgtctttcggatcagatggaacagattatcggagaaagcagcctgatgaataaggaaataaaaaatgaacactcctga

SEQ ID NO: 277099 - DNA, 510 bp, Morganella morganii
atgttgcacacttctgaacggatgggctatattcatggggcaccggcaaaatccggtgtcaggatttgcaccctgaatcagttactggcgacacatgacgcgccacgcgtctttttttgtgtctgcgtatacgcacacctgaaaaatacggtattattccgtccagattcaatggtggcgttggcagggcaaccgaaaggttggctggattccagtaactccagtagtgcaaaccctgtcagcgtcaccacccctttagagatttgcacctctggtggtgatcccgaacgtaagttactggagatcatcgttatgatggctatccctgcccgtactcaattcaaattcctgtttctgtgcgtaaaacgtgcagatatcactgccagaccgtgtcgtctggaagccaccgctgcggatgaacgcagtgcgcgccggatgttttcccgtgattttattctgttatttgccgagcgtctgcctgtgccgacagtgcgggggaatttgtcatga

SEQ ID NO: 277100 - DNA, 522 bp, Morganella morganii
atgagtgaatcccatttaaccaccggctggatctgtgtggccaccgagggtgaaaccattgaccagcgtgcaattgaagctgaatggcttactgaaatggctgcatcctatgatcccggttattacaccgcactgatatgggaagaacacaaccgggcactggaaaatttaggtgaggttgtagcggcacgggctgacaccgtggacggactgacccggctgtatctgcgcctgagacctaacctaaaactggtggaatacaacacaaagggacagaagctgttctgctctatcgaggttgaggaagactttcagggcaaaggtatgttctatctcggcggtctggccgtcacggacagcccggccagtgtgggaacggacagattacagttcagtatcaaccgctcacattttgccaaacgcagaagccggttatccctgagttcgccgacccgtttcaacttatctgacggtatccgcagcagtaaaaacagctggttcgccgctatctccgctggctga

SEQ ID NO: 277101 - DNA, 1020 bp, Morganella morganii
atgcacacttctatagtgccggaagcggcatggacgttccacgccaattttacccgcggggcacattatttatccgggaccagcgaaacatttatgatctctgaaccctctgaaaatttattacgtgtggcattactggaatctgactggctggttaaccggctgtcactgattgatgtcagtacggaaaagggggactgtattaacctcggagataacacgctgcatacaggccgtgcagttgagggacgttttaataaagccctcagtctgcggggaacaccttatacgctggaggaaacagacacttgctgctcactgacctatgaacaaatgtcattaattatcaacagcggcagcggtgatgatgagcatttcacaaaaacaatgtctgagctgttttcccgttctgtctcaatggacatgctccgggtcggatttaacggtcagttttgcggttacccgacgaatcccgccaaattcccgaaaggacaggatgtgaataccggctggcatgccgttgcccgggagtttaacaacggctctcaggtggtgacggacccggtaaagctgggtgaaaacggggacttcccgaatctggatgcactcgctaactatttaatcatcaaaaaaattccggaagaatttcgggaagacccccgtcttgttgttctggtcggtgcagagctggccgggatgtaccgcacccggttatttaccggttcggacaaagccgctgatgttcaggcgagccagctgtcactgagtacggttgccggtcgttttgccattattccgccgtttatgcccgggcggcgtatcgctgtcaccacactggataacctgcatatttacacccagaaaggaagccgccggttccgtgctgagtttgttgatgaccgtaaggtatatgaacacagttatctgcgtcaggagggttacgggctgggtgacggccacctttatgcggcggtggatgaatccgcgattcagattgatgagggagtcttttcgttatga

SEQ ID NO: 277102 - DNA, 843 bp, Morganella morganii
atgaaaccaattacgttatgcaaagataaaactctcgaatcaatatttaattatcgtccgatcccgttctcagaaaatggcagtgataacggttttattattcgcgtgattgaattatttaaattcagcaagatgaaaccgcagctgaatcagttagaggaactgacaggctttagctttgataacattgaaccatcaccggaagaaattatttgtttggtcaataaaggtaaagcactgacagaggttcaggcaaaagtattgcacgatgcaaaagcagagctggaaaaatttgcaggtcagcaagctgccattgagcagggttctgtcaaaaagcctctggactatcgcggaaccatgcgttcatgggtagaagatgtccgcaaccgcgttcagcgtgcggaaagcaaagtcagccatgaaaccgaattgttgcagcatatcagcgggctgttctctctgctgaaaaaagtaacggactcgatggataaaacaaagctgaaagaggtcaataaaaaatctctgtcagaaataccgggtaccgcagctgatttcttctgtttaaaaacgactaactcatgggtatataaaacaccctatgaatttattacaggggaaattaatgctctgacagcctgtatcaataacgtaattagtaactgtactccgtcaaatgataaatacacaattcacagaggtgataataaaaaaacattacattataaaaattattacgcagaacatgataaagaaatccgatctttatttactgcggatgaatatgcgcagggcatgacagaaatagaaaacagaatcgcatctaaaacacgctatatggcataa

SEQ ID NO: 277103 - DNA, 219 bp, Morganella morganii
atgagcttattacctgacggcctcactcactctgaaaaaagcagattattacggcttcctgatgtgatagccataacaggtgtaccccgttctactatttatttaaagattaaaaataaagaatttccgcctcaagttcagattggctctcgttctgtggcatggcttgagtctgaaatatatgaatggattaataataacttaaggaatagaaagtaa

SEQ ID NO: 277104 - DNA, 378 bp, Morganella morganii
atgaatatactgacaaaaatactggccggtctctgcattgtaatactgacctgtctgttgctgacactgcatctgtacagcggtgtaaaaggtaattatctgatactgaaagataagtatgaccagcagctggctgttaataatctgacccgggtggcgtttatggccggacatcatattgcgctcagcaatatccgggcaaagcagacggaggaggcggagcatatcaatgttaagacaattattaaaaccgtacttaaagaggatgaatgtgctgccgcttctgtgcctggccgtgttaccggcgggttgcagcaatacgagagagacattcgtgcccgcgccggtggtgccggttccggctcatcttctcgctga

SEQ ID NO: 277105 - DNA, 159 bp, Morganella morganii
atgtcgtgcaaccctgtagtgctgatcattgccgcgattctcatactgacagcctgcctgctggcaggctgttacctgtattcactcccggattactgtcagccgctgccgggacatccgcgggcggccgttatccactatcagtgtgaaaatccatga

SEQ ID NO: 277106 - DNA, 876 bp, Morganella morganii
atgcaaaagcagattgcctgtctgctgtttatagtatgggtaacaattatgttcagcggggcggttcctgtgtttttactcttatttgcgtgtggctgtattgtcgggtcgacaacggtattgtttggttttggcggcggattttttattgttccgctgctttatgcattgttaacagccacggcagacagccataccgcggcggcggccatgcatattgcagtggcgacatccaccggggtgatgatattcagcgcatcattggcaacccttcgccagcatcgtgccggaatgattaactggccgcaggtacgcccgctggcgggatatattgccgccggtgcggtggcaggtgcattgctggcgattgcagttcaggggatatgggttaagtggatgtttattgcttaccttgccatcactattctggacagtattttccgccccgggtttatgacacagtcagcgtctcatctgcggacaatgccagcgggtgctgttgcggtggccggtactgtgattggtgtggtggcagcgtttctgggggtgggcggcagtgtgatgaccgttccgttgatgcgccgtcgtggtgcggaaatggcacaggcgacggcgatggccaatccgctgtctttgccgatggcactggccggtacgctgacttatattttgctggcccgccatgaaacggcagaattcggcagcggttttgccggttatgtggatattcaggcttttatgttactgattgccggatcctggctggggcaaaaactcagcgcgccgctgattggccggatcccggataaactctatgctaaatcttatctggcgctgctgatatttgttctgctggtgatggtgattgtgcagtaa

SEQ ID NO: 277107 - DNA, 309 bp, Morganella morganii
atgaaaaatacactgtatcttttaaaaatgggattttctgacttaaattatcccggtagtctctttctttgccctgactgcacgctgttagaaggcgttcttgccacgaatcctgaattgcgtgaatcaacagatgttgtttatattgattttgataaaccaagaaaactgctggtggatcttatcggggaagaaaaccagtcattgcctgtattagttttcgcggacggacaaaactttattaatgacgttgatggtattctggccgaatttgccatgacaaacggatgtcctgcaaaacatccttaa

SEQ ID NO: 277108 - DNA, 714 bp, Morganella morganii
atgcatattatggcggccggcagtctgcggggagcgctgactgccattttaacccgttattccggtaataaaataccgccggtaacctgtgattttggtccggccggtttattgcggcaaaagattgaatccggggtaaagtgtgacctgtttttgtctgcggatcggacacatccggaagcattattccggaataagacagcattcagggttgagccttttattgccaattacttaggaattaccaccaccattgaattagctgaacaatatcctgactggcagcaattactgcgtgctccggatttaattatcggtacctcaacgccggttgatgatccctgtggggattatgtggtgcagttttattctgaactcagtaaagccgatccggaactggcggaaaatatccgcaatcgtacacggcatctggtgggcggaaaaaattccccggtgatccctgcgggacaaatggcgtctcagtggctgattcattctcatcaggcagatatatttattggttaccggcactatcagaaaaaaatgtcagaacttcccggactcgcgacaatagctatcccggaggcgcataatgtcaaagcaatatattgtatggccttaatgtcgccgatagctcagacttttgttgattacctgttacagactgaatcacaacagatttttatggaaaatggttttgtgtctcttagttga

SEQ ID NO: 277109 - DNA, 357 bp, Morganella morganii
atgaaaaagaacgatctgattgaatatatccggactaattacggctcagcccctgactatccgtggattaaatatccggattatgcggtattcaggcaccgcggaaatgccaaatggtttgctatcataatgtcagtatctgctgataaaataggcgccggagacgcagagaaagtagtggatattgttaatgttaaggctgcgccggaaatggttggctctcttcgtttaaaggatggtatctatcctgcgtatcacatgaacaaagaacactgggttacgataatactggatgctgagttcagtagtgaagaactgaagtcattaattgatgatagttacagactgacctggtaa

SEQ ID NO: 277110 - DNA, 2118 bp, Morganella morganii
atgacagtacaagctataaaaattaccaacttgttatcatttgatgaaattaatgtagataacttaaacgatttaaactgcattgtcggtcgcaataatgttggtaaatctaacttactaaaaattcttaaattcttctataataaactagaaggtaaagaagagctacctccgaagttaaactctaattattcatataaaggttctatatcaataacttttgatatgactagaatttatagaatagctaggaatcaacctaaaaatatgtattttgattttatcattcgaaagctagtacctcttcataaacgaagtatatttacattaacacgctatgataatgatcacactacttatactttaactctgaatatttataatgacggtaaagttaaatggtcaactaaggacaagcaaactttaaaccttattctttatctatttccattttttcatattgagccgagacatatggatttacatgaatgggatagcttatgggatcttatatcaagagtaaaatctttcaacctgtctaaaattgatgaccaatctgtaattgatttttttgataaatcaataaattccaatggcaataattcgtataaaaattacatttcagacttaaacaaaacaatatctacgaaaccaagctctcagaaagaaaagatattaagctatattaaagcggggttaaaaggttatcgctttgagatagatgagaatgctttgaaattccactcagacggaacaaattcatttcacttcataaaaacttttcttaagatactaattaaaatttcaagaagagaatatataacaccatttgtttttattgatgaaccagagctaggcctacaccctaaaatgaatgaagttctagttcaagatatatatactagttacaattacaatgaaaaaaaagatgatagagttaatagacctaaagtatttctaacaactcattcacctaacatagtaaaagagataattaagaaattcagacaaaaacagcgcatttattgctttcagaaaaaagttgatgccagaactacgattagcacattaaattccacttatgataacgagagtttcataaatatttttagtgataatgaggcaagattattctttagtgattttattctattcgtagagggagaaagtgagctggaagctttcggaaacatgaagttaactgaatatttcccacatttaagaaatatagatatttataagtgtagtagtaatgtcgttggtgagcgaattaatccatcatactcaaactctactattccatatttattcttattcgatgtagacaaagcaatatcaatcaaaggtgaaccacgaaatttatctataaaactagaaaaaaatggtagctattttgactttaagccagatactttaaatttagagcttaacaaatataaacttggatttagtaagaagtacaaaataaaacaaaaaaacattgagacgttgttatctgttataaataaaaaagtaagagtaaataatacaactcaaaattttctagatgagtctaacttcgaatcggtatttgcggctgttaaaactaggttgcttgataaaaatatttatctaaatagaacaactttagaaggttgtttaattcagaaaaatagctcggaaattgtatatgagtggttagataaggagcataattctaatttagattctatattgcaacgtataaaacgaacaaagtatattacagaggatatgctgattgattacgtcagggttatttttaatggaaaatcaatggcactaactgactatagctacttcaatattgaatcatacaaacaaactttagctcaaaataaaaaggtaagcggcaagctacggtacacttccaggcatgcaaaaatgctgatgaaattattagaagagaacattgtatgcaataaatacctagataaaacagatggatggactacaagtttcctaaatcatgccgtcgaatatgttgagaaagaatctttagctaaaaatcaaccatttggaacaatatttaaagtttatttccccgagttttatgatatcattcgtatgcttcaacccgatagtagaggggggatatga

SEQ ID NO: 277111 - DNA, 1101 bp, Morganella morganii
atgataaaaaataaaattagcgatgacttctttaagaaagcaatacttaaaggcaatgaagatcttctaaatgaattctctcctgctgtcagagaatttaaagttggttgtgacaactttttcgaaatttctagggattctgaacacaagcgtataaatgatagaataactaagtttgttctagataaaagtcccattaactcatctgcatgcggatttattcaaggtaaatcttattacgattttctaagaccacatattcaagggtattacttcctacgattggatattaaaaaattcttccattcaataccattgcatgaagtaaaaaacttgctctctcaacacttcaataatgaaaaaaatggaaaaaaatactcagctctagatattgcatatatgtctgttactcacaaggttagtgatacatatattgataaggattttcgtgggaaagaaattttacctattgggttttcatcttctcctgtaatatcaaatataatatttagaagagtagatattcttattcaaaaattatgtgaggataaaggaattatctattcgcgttatgcagatgatatgcttttctcttgtgaccatagtaagtatctacattctgagcaatttgaaaaagatatttctatctttatttatacactttcactcaggttgaaaaaaagaaaaagaaaagcgactgagaacactatatcccttaatggttatgtaatacagaataggaaaagaaaaaaagacttttttcatgcatacaaagaaaagcctattggtagtatcagactatctgataaaaagcttaaaccattaaagaagctcgctgcattactcaagagacaaaaagacccaatatatataatggaaaagatattttgtttaaaccgtagaaagtttattctaagatatgggaataagtttgatttttactttaattatgctaatgatcaactgcaaaacaagttgaaaggttaccgctcgtatttagtttcacttataaagtataatgacaaatatagatgtgttaatattgattgtataaagaaaattaaagggctagttgaagtttttgagtctagtatcaaataa

SEQ ID NO: 277112 - DNA, 900 bp, Morganella morganii
atgagtggtattcgtataacacaagccattgacaataatcacactttaattgatgtaattactttcaatccaagagttaacccctctcctctcacatgccctgataaaaattgctcggctcatctggtatatgttaatggctatattcgcaggagttatggcaagacgcaacatattcctgccttctttaggctggaaaagggatatttgcatgacgagctttgtcagtatggaacttcaggactagagattattcatgcgaatgattccagccatgatatccgccgcgcacttactagaggggataatatattccgcttacacatccttgatgctgatgacatcgctaaaataaggataaaagctgcagcaatgcaggctaatcctccttcggatacaacagaccgaatttatgttagaaaaggtaaaaaagctccttatgtgaagaatatggttagtttacgggaaatctatgattacgggaaagctaatccccatcagaaaaacaccataaaaattgtcacgggaacaaatacagttaaatggtctgaatttttttacgaaacatctcaactagataaattgtcagcttatttacatactgtgaagatggctcaagttgcggtgattattaaagtaaatgtagtcagaataccaatggaaaagttcggcaatcggtactttattgaaggagcacctaaaaagagaaaaggtaaacctgatttgtatcctacaattcagttaggaaatgtaacaccagatttatttccattgggtaaaaatgtgatgctacttggtaaatttaccgttccaaatctcagtaatatgataatgcatccaattcttgaagatgaagtcagaacaatagtctttagcgaagggcaaatattagaactttga

SEQ ID NO: 277113 - DNA, 129 bp, Morganella morganii
atggaaaagataaaaaaaaccgcgaatattcaattcacggtttctgctgttcagtctgtgcgattacttaatatctttgatatcgcccatcgctttgagttctctggagatttcgcggcgctcttttga

SEQ ID NO: 277114 - DNA, 285 bp, Morganella morganii
atgctccgtattgaagttattttcagcagcaaccaaaaagagatgataccaccaggcacatttgaggtgttggaaaaggaaatagaccgaaagctacgggctcagtatcaggatatgaacgttcgtattgcgtggggaaccaatgcggcgatgtcagtaaccggcgggaaaaatgataaggacaataaaaaaataaaagagatactgcaggagatttttgaggatggcagctgggtgcctgaaacggcagacgcttctgatgatgtagaatattttgataagtaa

SEQ ID NO: 277115 - DNA, 666 bp, Morganella morganii
atgctgattttaaaagtaaaatccttttaccggaagacgttttcagtctttgctgtttttatcacattacttgtatcctcaatcgcaattgctcatccgcatcgttttatcggcttggaaacgacgtttgacattcaaaatgataaactggtcggattaacctttctttggaaaatggatcctgtagcttcggcggatattctttatgagctgcaaaatgtaaagccggaaagtgatatatggaaaaagcaggcaaccgtattgatggagaatgttttatctcattcttatttttctgagttgtatgtcgatggcgaaaaacagcaatttcgaagtatgccggaaagctattcattaaaaaaagagaagttacagctaatattcagttttcaggttctgctaatgaaccccgtacattttgcagctcgtcagtttgaattattgacatatgatcccactttttataccagcatgacctatagtgaaagtagcaaaattactttaccattagaaatggccgctggttgccggttgaaactggttgagccttttgcttcatatgatttgaaaaaatatgcgaaatcacttgatatcaatgggttagttgatgaaaatttgaaccttggtctgtcatttgcacagcgtgtacaggtattttgtgaataa

SEQ ID NO: 277116 - DNA, 258 bp, Morganella morganii
atgaggaaaagcagaaaaaactcggtcagtaccgccgtgggacgcaaaattaaggctgtaagaaaataccacagtatatcaggaaaccagctggcccagctcaccggactcactcagcaacagatatcacgttatgagtcgggcaaaacatcgatgacaatcgataccattgtgaggattgctcaggcgcttgatatttctgtagcagtgttactggatgattatctcactccggagtatgatgacactaatttctga

SEQ ID NO: 277117 - DNA, 462 bp, Morganella morganii
atgaaagcttataacaaaaagacactctcggttgatttcgaccttcagaagttggataaaaacattcacattgaagtgagcgacgagctgattgatgaactgcttatccgtcagcaagctggggaaacactggtttcagacagcaaggacaggctgatattcgttcagtggacaacggacaaatacaagacgtggagcgcgaaagataatgatttcgtctatgttgaaaactatcgcgaactggcgcaggctgatgctgaaattcagaagcaggctcttatggcagaagcgtcagatgtaatcgcaccgcttcaggatgccgtcgatttggatatggcgacaccggaagaagagtcagcactgaaggagtggaagaaataccgggtgttgctgaatcgcgttgatacatcacccggtgttggtgtggtatggcctacacgaccggcttcaccggccagataa

SEQ ID NO: 277118 - DNA, 1422 bp, Morganella morganii
atggcaaacctacccgaaaccccgcagtgggaagacggcatctaccagattgaggtctctgaccccgtcctgggcgggcctgacgggatttctaaccgtcaggctaaacaactggccagccgtacttcatacctgaaacaacaggttgaaaaaggcagttcagacctttcggaacacattaaggctgctgacccgcatacccagtatgcgccgaaagccagcccgacgtttacaggaaatccggcggcaccgacggtggtcaaaacggataacagcaccaaactggccaatactgcacacgtcaaaacggttgttgctgactatgcacctctggccagtcccgcattaaccggcacacctaccgctccgactgccccgcagaccgttaataatacgcagattgccacaacggcatttgtgaaatcggcacttgctgcactggttgcatcgtctcccgaggcgcttgatacactgaatgaactggcggcggctttgggtaacgatccaaattttgccaccacaatgacgaatgctctggccggtaagcagccgctggataatacgctgactgccttgtcaggaaaatctgtcgcagctcttctcgaataccttggtttaggagaggcgctgaaaaaaggtgatttcggcatcggcggcattctcaaagcaatggcatccgctgctgaaagtggtttctatctgtctgcatccggttctgatgataatccagaaaaggagcttggttttgtcattatcaacatggcggcatccggtcattacaaaacacagatcgcggtagcttacgcgccggacattccgcgcgcttacatccgtaatatttttggtgatgcgaaacaaccgtgggaacagatagcaaccaaagccgccattgatgcgctgaatgccgctctgagcggtaagcagccaaaaggtgactaccttcccaaaaacagtccggcagcagatacccggatttctgtgacagcacaggattacccggttgtgtcgcttcaccagaccagcaccggcgatatgtttgagattgtcgcaacgccgacccggaactcattgctgtttaaacatacggccaaaaacggcacgacaaaacaggtcggtattccgtttgctgaaattgaatcgggagccgacatcggcggtcagcggatcagaaaactctattcaggctcaggcgcatcgttaggtcagtcattcagtttcggcacgaatggtgtcgggaagactctgattatgtttcatgacggcgtggcaaaaattcaggcactggtgactactcagtcatataccgcctatgctgcaactggatcaggaacgtcgattggcatgggggtataccctgacagggcgacatattcgcataataccggctccggaaatatcacagaaatttggttggtgggataa

SEQ ID NO: 277119 - DNA, 579 bp, Morganella morganii
atggctgaacggctgcaactcccgccgccgcttgagggtgatgtcagcctcagaacgctgggaagactggccgggcggctggataacatcgatctgagcgtactgatggtctgcctggttgatattgtcgacagctccgcactgccgtggctgggtgagcagttctcgctgttcggcgatggctgggagctggcggaatctgacgatgtacgccgcatgcttatcaaatccgccatcgagctgcaccgctacaaagggacgccgtggtcaatccgggaaattatccgccgtttcggcttcggtgaggtggatctgattgaaggcaccggccagatcagctacgacggcaaacaccgttacaacggtcttttcgtccacggtgatgcggaatcatgggcggtttaccgcgtcatccttcagcagcccattactaacgatcaggcggcgctgttacgcaaaaccctctctgcttttgcaccggcccgctgccatctggcgagcctggagtatcagtctgtcgctatccgctacaacaataccgtcaactatgacggcagctataaccacgggagcagttaa

SEQ ID NO: 277120 - DNA, 1104 bp, Morganella morganii
atggcgctgacagaacccgattttatcgaacgcgatgccggtaaaatcacggcagaaatgattgcacagtacgagaccgcaaccggcaaaacactgtatcccgcacaagctgagcgcctgctgattgacctgtgggcataccgggaaatgctgctccgggtagcagtacaggaggcagccaaacaaaatctggttgcttttgcccgtgagccgatgattgattacctcggggaactggtcggtgtgtatcgtcttgccgcccaacccgccagcaccacactgcggttctctgtggagtcagcacaggatactgatgtgctgattccggcgggtacccgcgtcagcgcgtccgacagcgttattttcgctaccgattctgatgtagtgctgaaggccggattgctgctggtcaatgtcaccgctacctgcactgagcccggagttgccggaaacggctggcaaccggcgcagatcagtcagttgcttgatgagattggcaacaccgacctgcaggtgactaacccgtcggtcagcgccggtggttcagagcaggaagataatgacaggctccgcgaacgtatcaggctggcaccggagtcattcacgaatgccggaagccgtatggcataccgctttcatgccatgcaggctcatcccaatatccttgacgttgctgttctttctccggttccgggcactgtggaactgtatccgctgctcagtaccggcctgccggacgacagtatcctcactctggttgagagcttttgctcagatgagaaagtcagaccgctcactgataccgtgcgggctaaagcacctgttcaggttgattatgccattgaagctaacatcacgatctaccgtgacggggacgccaactcagtgaaggcgtctgctgaaagcgccatacagcgctgggtggcatcccgaaccgcgactttgggccgtgatatcgttcccagccagattatcagcgtgctgtcggttgccggagtgtaccaggtcgaactggtgacaccggcgctgcgggtggtggccgaaaatgaatgggcaaactgcactgcagttacgctgaacatgactggggtgaccgatggctga

SEQ ID NO: 277121 - DNA, 312 bp, Morganella morganii
atgttcgccgtcaacggcaggtttgaccgttatcagctgacaacgcggttcccagcggcgtatggcatcgacagactcccgcactacatgcgggattgctctgtcgacaggccagtcaatgtaacggtgcagattactgccgaactccgggcggtgcggatcactgccacggggagtacgcaggattatttgaatggcctgccggatatcatcggctccccggacgatttcgccgggagcctgcagggctggttgccagaatacagaggtcgttttcattggggcagtattgcccctgtgagccgttgctga

SEQ ID NO: 277122 - DNA, 597 bp, Morganella morganii
atgacaaatgtcacccgtcaggtcggtacagtcagcgctgtcgatgccgacagggttcaggccagagtccgtctgcctgagtgtgacaatatgcgcactaactggcttaatgtgctgcagcgcaatacacagaacaacaaggactactggcttccggatgtgggtgaacaggtggaagtgttgctggatgctaacggcgaggatggcgtgattctcggtgcggtatattccggtgtcgacaaacccccgttcagcgataaaaatgttcgcggtacaaaatacgcagacggagctgagttcagctacaaccgggactcacacacactgattatccgtggtggtatcgaacatataataattgaatgcagcgcatctgcggtggtaaaagtaccaaaagcgacaattgacgcggaagaaaccgaagtaacaggtaatctgctggtcaaaggaaaactcacctaccgtggcgggatggctggctccggaggtgttggtaatgctgcggtaatcgacggtaatcttgaaattatcggaaatgcccattcaaccggcgatatgctgtctgacggaaataactccaaccaccactcccactga

SEQ ID NO: 277123 - DNA, 1170 bp, Morganella morganii
atggctgaggtaaacagcatcccgcaggctgcaccagagttaaccggcgtcagtgatgtactgagcccggtgtttactttgtggtatctgcagaagaatatcaccagcgatatcacaccttatgtcacccgtgtgacatacagcgataacattaaaagtgagtctgacactattgaactggagctggatgataccgatggccgctggctggataaatggtatccgggcaaaggcgatacgctgacactgaaaatgggttacacaggagaaaaactgctgtcatgcggtaccttctcgatagatgaaattgaggtcagctcgccgccgtctgttgtctctgtcaggggagtggccacttctgttaatcacgcactgcggacaaaatccagtcgcggtttcgaaaacaccacgctggcagccatcgccggacgtattgccaaaaagcatcagctgaaactggtcggcagtattgaggacatcaaaatagaccggataacccagtatgccgaaacagatgtggggttcctgcgcagactggccggtgaatatggttatgccgtgaaagttgtcagcgaccagctggtgttttcccatctggccacgctgcggagtcaggatccggtcaggcagttaaagccgcaggatgtggccggtttttccctgcgtgacaccatcaacagggtctataaatccgcgaaggtaaaacaccagaaaagcagcgataaaaagcttatcgtctacgaagctgacggcggtaccagtgaaagcgacaaacaggtcaaaggcggcaaaaccaccagtgccgactctctgaaggttaacagccgggtcagcgaccctgacagcgccaggattaaggcggattcagcactggccggacacaacgaatatcagcagagtggctccctgacgctgatggggacaccccggctcacagcggggaataaaattgaactgacgggattcggcagattatccggacaatggctgataaccactgcccggcatgcatttgatcgtaacagcggatataccacagaaatcgacgtggccagggggccggagacgcagggtaaggcaaagaaaggccggaaatccggaaaaaaccagacactgactgtctacaaggcggatggcagcacatcaacagtaattaaggagaaaaaataa

SEQ ID NO: 277124 - DNA, 213 bp, Morganella morganii
atgtttcttgaacatatcacccgtgacggggaacgatgggattcccttgcatggcactactatggtgatccgctgggctattcccggattattgctgccaatccgcatgtggccatcacgtcagttcttccttcaggtctgttattactgataccggttattgaggcagaagataccgccacagaagaggatatagccccatggctgaggtaa

SEQ ID NO: 277125 - DNA, 885 bp, Morganella morganii
atgtttgcggtattaggtgatattgagtttgagctgattacttactgggacggctttgaggcaacgttcggtaccgactatgcagagcatccccgcatcgaagggaaacccggccttcagttcatcggtgataaactcgacgaaattatgatcagtctggtctttcatcagcattattgtgagccggatactgaactggcccgtctcagaacagcgatgaaagctcatcaggcgctggcactggtcttcggaaacggtgactaccgtggctggtttgttattaccgatatatcagcaatcagcgaacagactgacagtacaggtaatgtgctggcactgaatgcatcagtatcattgcgtgagtataccggcgaccccaaaaaaccgctgaagcccccggctgtcaaatcgccggtaccggatgccggagccgtaacgaatgctgttccgtcaccatccggtatcgcacaattcgtccgcgacggcgtcagctatgcaaaacaggctcagtctgttctccggacaaccatcagtgctgtccggatagcacaaaaaatgaaagataaccctgttgttgcgctgagccgcgtccccggactgatgaacggtctgggtgatgtgtcaggggctctcgggaaaagtttccctgcttttgatgcgctttcagagtacatgcctgatgccgtcagcctggccagagctaccagtgatgcggtcacgtatgtacagcaggctcactcctcgctcagcggggcggacagcagcaatatagccgcagcactggatgctgtttccggtcagctggattctgccggtaccacattcacccgcatgtccccggcattaagtaaaatggccgccaaaattatgaccaggagtgtgtga

SEQ ID NO: 277126 - DNA, 2547 bp, Morganella morganii
gtggccagtaatttttcaatcggtgtggtcatcggcggacttatcggcagcagttttcgttctgccgtcagtggtacccggcgtgcccttgactctctgggtgatacatcccgccgcctgcaggaacggcagaacgccttaacccgcgcaacggaacgctatggtcagctgggtggcagcagaatgcaacaactgaaccgtgagctgctgcgtgtgggccgcactatggagcagattgagcgtcagcagcgccgtctgtcagcggcatcggccaccagtgatgcactgaaatccaaccgcatggcactctatggccagggggcagagacctatgctgttgccagaactctggggacgccggtcatggcatcagtcaagcaatattcatcgtttgaatcacagcttcgggatatcagtgtcacaggtgacctggacgcaaaacaggaacaggctattggtatcgctatccgtcaggcgtcactaaaagttaatcaattgcaggaatcccttcttgacggcgtcggtcagcttgtcgctgatggtatggctccggaacaagctgcaaagtttgctgatttgctgggtaagacagcaacagcgactaaggcggatatgactgacctggcaaaaatgacttacgccttcagtgatgctctcagaattaccgatgcaaaagagctggagcaggcatttggtatggctgcaaccggggctaaactgggctcgtttgaactgagagatatggcaaaagcattgcctggtcttactaaagcgtttgctgccaggggaatttacggaaaagatgcggttacgcagattgttgccagtctggaagtcggcaaaggcagtggttctgcagaggaagctgtcactaatatgtcaaactggctggcagccatggggcggggagataccatccagaaatatgccaaagccggaattgattaccaggcgtcaatgcaagaccatgtagctcagggtttttctcagtatgaagcctccctgatgatagccaaccgatttatcgacagtaaaggtaaggcgtttttacagcagtggaatgcggcaaaaaactcaggtgatcaagagagccagcagaaactgatggagtccttcggacttgcggaagtcttcactgatattcagacagtcaaccatttactttcaatgcgacagggttgggataagtaccagtcgaacaagcaggaaatgaatagccctgcggcacaaaacacgttgagtgtcgattttctaaagcaaaatgatacgctcgaggcgcgctggcgcagaacacaagtcggttttaatgatgcagccatcagtatcggtgaatcattaaagccagcattaattcagctgggagagacattcatgcctttactggacagtgccggtaaatggattgccgccaatccacaactggttagcggtgcggtaaaagtggttagtgctttactggcttttaaaatagcgaccatcggacttaagctcggactgaacctactgttatcacccttcgtgaatgtctggaagaatattactcttctgcgggcaaactggcttcgtctgacacttgcattcggggaaggcggtaagcttcgctcgctggcaaccggttttggttctgtcgcaaaaagtgccggaagtctcggcaaagtgctggccggaggattacttcgcgggcttaatctcgccggacgggctgtactttggatcgggcgtgcgctgctgatgaaccccatcggtctgatcgttgccggaattgcggctgcagcttatctgctttaccgctactgggggccggtatccgctttctttaaacggttatgggcacaggtcaccaacgccttcagtaaagcatggagcagtattgtatccgtctggagtggcgtcaccggctggttttccggcatatgggcagaaattaaaacggcgtttaacggtggtatcgagggggtcggtaagctcatcgtggactggtcgccgctgggactgttccataaagccttcgccggtgtaatgtcgtggtttggtatcgatatgccgaaaagctttacagaattcggcggcaatctgattaccggtctggttgacggtatcggtaacaagctgacagcagcaaaagaaacaattgtcagtttcggcagttctatatcttcctggttcaaagaaaccctgggtattaattccccgagccgtgtgtttatgggcttcggtgacaatattgcccagggtgccgctatcggtctgaaccggacaaccccccttgccgcaaatgccggtaagcagctggcagaggagatgatccccgacgttccgtatattccctctccggaaattatggcagccggttataccggacgcggtgccggtcgtggcagcgattcctccggtgttcaggttgtcttcagtccgcagatttacctcaatggtaaagagactacggcatccggagggatcaccagtgcgctgaatctgagtctgcacgaactggagaaaatgctggagcggctgacagcccggcagcaacggaggagttacagctga

SEQ ID NO: 277127 - DNA, 336 bp, Morganella morganii
atgtcagatatcaaatccaatatttttccgctgtcctatccgttcacgacagcggcaggtaaccgaattgaccaggttgagctgaaacgtctcaccgtcagagacctgaagcaggcacgtaaaaccagtaaagaccccgctgactgggatgaaccgctgattgcccgcagtaccggcatgctgccggaagacctcgataagatggatcttgctgattatatggagctgcagaaacgatttcagcaggtcactgggctgggcaagagcaccgaaagcactgaaacaggcgcaggggctgctggcgaggtggttcaggtttcagccgggggagattga

SEQ ID NO: 277128 - DNA, 282 bp, Morganella morganii
gtgactgttgcgattgaagataaaggcggaaagtgcagcggtatcggtatgagcaatagtacctggttcactattctggatattccgggagtcggaaatctctttaatacccggaaaactaatgacccgattgactgtacccgctccaaagcccggaagctggctgacctgattgaggcatgggagcctcctgaccactggttcagcggcatccgtaaagacgaaggcaaagttctcctcattacttttctgcgccactgcaagggttttcgcactcactga

SEQ ID NO: 277129 - DNA, 522 bp, Morganella morganii
atggcaaagatcgaaatcaaccgcatcacgaatgccaatatctacctggatggtgctaacctgctgggtcgggccgaggaggtcaaactgcctgacgtctccatgaccatgcaggagcacaaagcgctggggatggtgggcaaggtggaactcccggcaggcttcgacaagctggagggcgagatcaagtggaacagcttttaccgcgacgcgatgctgtctgccgcgaacccgtataagtcgctggcgctgcagtgccgttccagcgtccagcgctacagttcgcaggggctgattgacgaaatcccactggtcaccttcctgacgatcatgttcaagaagaacccgctggggacgttcaaacagcacgagaacgccgagttctccagcagcttcacctgcacgtacatcaagcaggtactggatggtgaagagctgctggagctggattacctggccaatatcttccgcgtcggtggtgttgaccagctgactgactaccgtatcaacatcgggggctga

SEQ ID NO: 277130 - DNA, 1428 bp, Morganella morganii
atggcagctaactatctgcatggcgtcgaaaccattgaggtggaaaacggtgcccgcccggtaaaaacggtgaagtctgccgtcatcggcctgattggtaccgccccggcggggagcgtcaatacgctggtgcagtgcctgtctgagaaagatgctgcagcattcggcagccagctcaccggcttcaccattccgcaggcactggatgcgatttacgaccacggaaccggtactgttctggtcattaacgttcttgacccggcggtgcataaaaccgctgtggccgatgaggatgtggcgttcgacaaggctacgggcaaggcgcaactggctaacccggtggtcgcacagctggtgcttaaaccggacagcgatggtcagccctacgtagaaggccgggactactcgcttgatgcgcaaaccggggtcataactaaccttggtaagagcattgctacagatgcaacagtgaaggccagctataactatgctgacccgaccaaagtcaccccggctgatatcatcggggcagtcaacgctgcaggtaatcgtaccgggatgaagctgcttaccgacagcttcaacctcttcggctacttcgccaaaatcctgatcgctccggtgttctgtacccagaacagcgtctcggctgagcttatcgccatggctgaaaagctgggtgcggtgacctacatcgatgcgccggtcggaaccacctttgcgcagactctgtcggggcgtggcccggaaggtaccattaacttcaacaccagctcagaccgtgtccgcctgtgctatccgcacgtcaaggtgtacgacgcggtcaccaacagtgagcgactggagccgctgagccagcgtgctgcaggtttgcgtgccaaagtcgacctggacaaaggctactggtggtcgtcctccaatcaggagattctgggcattactggcgtagagcgccagctgtcggccatgattgacgacccacagagcgaggtgaacctgctcaacgaacagggtatcaccacggtcttcagcagctacggcagcggcctgcgtctgtggggcaaccggacagcagcatggccaacggtgacgcatatgcgcaattttgagaacgtccgccgtaccggtgatgtgatcaacgagtccctgcgctacttcagccagcagtacatcgacatgccgattacccaggcggtgattgatgcgctgacggagtcggtcaatgcctacgggcgcaagatgattggtgacggtgcgctgctgggcttccgctgctggtttgatcctgcccgcaacgaagagacggagctggccgcaggacacctgctgctcagctataaatacacgccgccgccaccgctggagcgactgacgtttgagaccgagataacctcggaatacctgttaaccctgaaaggaaacagctga

SEQ ID NO: 277131 - DNA, 252 bp, Morganella morganii
atgaaagaataccgctattccggcccggccagcggcgtcacgctgtcggacggaactgaaattctgctctggctggggaagaatgtttctctgccggagggacatgactatgtgaaggtactggtggcgctgaagcatctgacgccggtatctgaagagactaaacccgccgggacaccggctgtgcagtcaccaaagcgcaggaacggcggcgacaacgatgtgaaaacggaggactcccatggcagctaa

SEQ ID NO: 277132 - DNA, 465 bp, Morganella morganii
atgaacgttctgcccgtccttgatgcggtactggcccggttacgcgagaagctgccgcagctgcaggtggagtatttcccggagaaaccggctgaataccgtctgaatcatcctgtcggggcgttgctgctgagctatgccggttcgcgcttcgacaaacccgatgatattggtgcggtggtccagcctcagactatccagctctgcgtcacagtggtcttccgccagctcaacggtaaaagaggtgcaattgacgttctggatgcagtccggcgcattctcggtggctacaccccgccgaactgccgccgtcgtatctggctgacccgtgaagtgtttatcggtgaggtcagggggctgtggcagtacgctctcgattttgccactgaaagcgtctttatcgaagacagcgatttaccgtccggcccgctgttaaccgaagtgaactatgaggaaagcgagtga

SEQ ID NO: 277133 - DNA, 477 bp, Morganella morganii
atgttatccgcatcctgcgcggggtgtgacatgtactgcaccctggcggatttgcttgagcaggtgccggagcggacgcttatccagctcaccaacgaggagctggatttcgactcgcctgcgacggtgaagacagaggtggcggacagctgtatccgctatgcgggtgagctgattgatgctcacctgcgcgggcgctataccctgccgctggcggagataccgaccgttctgcgggacattgccatcacgttggtgcgttaccggctctacacccgccgcccggaaggcgcagtcccggacacggtgaaggatgaccacaaagaggcccggcgtcagcttgaggccatccgcgacgggaaactgacgctggggctgcagtccactcaaaaagacgtacctgagtccggtgaaatccgggcacgggcacgccgccccacctttggcgggcgcgacggcttactggagaaatactga

SEQ ID NO: 277134 - DNA, 357 bp, Morganella morganii
atgggtacaactcagcaggtcattctgaccactaccgtgacggccagcgcggcgctgacgcaacagcgctttgtcggtgccgataacgcgccctgtcaggccggtgccgtcgtgctcggcgtggctgaggtggatgccgctgccggtgatttaacgccggtcagcgttctgggcattattgccgttgaggcgggtgccgcgattacccgggggcagcgcatccagtccgatgcaaatgcctgtgcggttccgcagactgccgcatcaggcgacaccccggcaggtatttcagccggtattgcactggatgaagcactggcggaaggtgatgttatccgcatcctgcgcggggtgtga

SEQ ID NO: 277135 - DNA, 954 bp, Morganella morganii
atgtctgattatttaaagggtaagcgcgtcgttgacccggtgctgaccagcatcgcacgcggttataaaaatgctgcgttcatcggcgaacgtattttccccgtcgttctgaccgataaagaaggagtgaccgtaccgaccttcggtaaatcggcttttgtggagtacgacaccgagcgtgcggtgggggctgacagtaacattctggtgcgtgagaaaaccggcaaactggatctggttcttaacgagcacgatctggccgcacctgtggactaccgcgagcaggctgagtcgatgttcaacgaagaggccaaggccattcgccgtgtgacgagcggcgtcaacctcaagcgcgaactctatgcggcccgtctggcccaggacaaaaacgtctatcgctcagctaacgttaaagcactggttgcaggtgaccgctgggccggtggtaaaggcgatccgattggcattattgaaggcggtattgaggccgtgcgtaatgcaaccggtctgcgtccgaacctgatgaccatgggggccagcgtcatgtcgctgctgaagttccacccggcaattcaggcagcgattggtgctaacgagcgcaagcgtatcaccatcgaaattctgaaagaccttttccagctggaagatgtggtggtcggcgagccggtctccatgacctccatgaaagacgcgcagaacaaggacaaagtcccggcggatatctggggcgacaatctgatgctgcattacgttggaaaaccccagcccggcaccgacagcgccgacgaaaatgagccgtcattcggttacaccctgcgccggaaagggatgccagtggcggacaaatatgacggcgtgggcggcaaggtgaagtactgccgttataccgatatctacaaagtcgccgtggtcggtggcgatgccgggtatctcgtcaccaacatcgtgaaataa

SEQ ID NO: 277136 - DNA, 1098 bp, Morganella morganii
atgccagccattcacattttcaaagccggtactcataccgatatgcacggcacaaaactgccgttcacgcaaagcgatcttgccgcctgcgtgaaagcctatgacccgtccgtccatgaagcaccgctcgttattggtcacccaaaaacggaagacccggcgtggggctgggtgaaatccctgtcgcttaacggcggtgatctgctggctgagcctgatcagctcgacccgcagtttgccgaactggtgggcaacggacgtttcaaaaaagtctctgcttcattttatcttccggattcaccgagcaacccgaaacccggcacactttacctgcgtcatgtcggttttctcggggcacagccgccttccgttaaggggctgaaacaggtctcgtttggtgagaaagaagaaggtgtcgtggagtttgccgactggggggatatcaccaatgcgtctttatggggccggttacgtgatttcctgattgctcagttcgggctggatgcgacagacaaggttcttccttcctggcaggtggactccctgcgcgaagaggcttaccgcgacaccgggaagtccgggccggaattcagtgaacacaatcccaaccctcaacaagagaacagcatcatgactgatgaagaaatcaaagcgcttcaggctgaaaacacacgcctgaaagctgaagcggcggcacgtacagagcaggacgtcaaagcgaaacaggacaaattacatgccgataatgtggcctttgccgagaaactggtgggggatggccgactggcccccaaagcgaagtccgttgttgtggccatcctggacgcagtctctgcaggcgataagccggttgagtttgccgagggcgacacccgtaccccgctggccacagcgtttaagacgctgctggacagcactgaaccggtactgagcttcagtgagcacgcgaccaaagaccgtgtgagcacggataccggaacgacttcagcggagtttgctgaggctgatccggaacgtctggcgctgcatcagaaagcgctggaactgtctaaaaaagaaggcatcagctatgacgctgctgtctcacgctgcctgtga

SEQ ID NO: 277137 - DNA, 459 bp, Morganella morganii
atggcttctgataatctggtcaatatcactattaacgatgagtccctccgccggagtctgcgtgcgctggattcagctgccacagacctggaacccgcgatgcgtaaaatcgccggaaccctgctgacggaaacgcagtttaactttctggatgagggccgtccgggctggatgccgtcccttgcagcacaggatcgtgatggtcagacactgcagctcaccggacgactgatgggctcagtatcaacagaccatgacgacaggcaggcagcggttggcactaatgtcgtttacgggccggttcatcagttcggtggcaaaacggggcgcaatgagtccgttgagcttccggcccgaccgttcctgccgctgacgggggacggtgagctgcagtctgatgtggttatgcccatcctcgatacgattgtgcgtcatcttgaatctgcggcccgtcgctga

SEQ ID NO: 277138 - DNA, 822 bp, Morganella morganii
atgagcgtgacaacagctgaactggcgtactgcatgacgcttcccccgaagcgggctgtcagttacctgaaatccaaagggtataaaatcacctgggactgggaggacatgtggcaggatgcccatgcccgtgcgttcaccgtggcgaaagtaacccgtctcgatattctggaggatatccggagtgccctgcagaaggcgctggacgatgggaagacagaccactggttcagaaaggagctggagccggaactgcagcgcaggggatggtgggggccgcgtgacaccaccgacccggtaacgggtgaaccggtcaccatcatgcagggcagcccatggcggctcgacaccatctttcgcaccaacatgtcggtgctatacagtgccggtcgctgggctgagcagatggaaaacactgacgacaggccgtactggatgtataccggtatcagcgacagccatacccgcagaagccatctggttctgcatggtctggtgctgcgttatgatgatccgttctggcaggcattctacccgccgaacggctggcgctgtcgttgtggtgtgattgccctgagtgccgcagatgtgcgggcccgtggcctgaaggtagtggattccggctccgctatgggccgggaactgaagctggtctcagagaaaaccggcgagatgcggcaggtagccaccttcagcaccggcacaactaaagtagccaccgatgccgggtggtcttatgcgccgggtgcggcctaccgtcctgaccttgcccgttatcagggcacactgcaaccgctggcacagcgggaactgagaggataa

SEQ ID NO: 277139 - DNA, 1500 bp, Morganella morganii
atggccagaggtatctgggtttcacccgatgagtttgtcaaatttgccgaacctgctaaaacactgacggagcagattgcctcgcgcagccgttccatcgacttcttcgggctgggaatgtatctgcccaaccccgatcccattctgaaatcccagggccgggatatccgcatctaccgtgagctgcgtaccgacccgctggtcggcggctgtatccgcaggcgcaaggcggcggtcaaatcactggagcgcggccttgaacgcggccatgcctcggaacaggtgttcagtttcatccgggatatgctggacgatctggatctgtcccgcatcatcggtgagatgactgacgctgttctctacgggtatcagccctgtgagatcatgtggggacgctctgtgaaatcctgggccatcaccgatatcgtgggtaagccgcctgagtggtttcagttcgacaacgacaacctgctgcgctttcgcgccagagactcagggctggaaggtgaagctgtaccgccgaacaagttcgtggtaccgcgtcaggatgcgacctacgacaacccgtatggcttccctgatctgtcgatgtgtttctggcccgtgacctttaaaaaaggcggtatgaagttctgggtgcgcttcgccgagaaatacggttcaccgtgggtcatcggcaggcatccgcgcggtacagcacagggcgagattgacctgctgctggattccatggaagcaatggtggaagacgcggtggccgcgatccctgacgattcgtccattgaaatcaaggaggccgcaggtaaggccgacagcagtgatatttatcagaacctgataacgctggcccgcagtgaaatctccatcgccctgctgggacagaaccagaccaccgaggccaacagtaaccgggcatcagcaatggttggtctggaggtgactgacgatatcagggacgctgatgccgatattgtggaaagcgcagtgaatcaggctatcaggatggtggtatcacaaaactttggcgatgtggccagtcccgtctggaagatgtgggagcaggaaacggtcgacgatacccgggcgacccgcgacgagaaactcagccgcaccggtgtggtcttcaccccgcaatactttaaacgggaataccagctgcaggacggcgatattgatgagacgccaccgtcagaacggcagaagaacgctatgctgccgttgtcatttgccgaggcggttgatgccgatgttcaggcacagcaggcactggatgatgcactggatattctgatgaacggaggttcgttaaacggtacgctggaacccgtactggctccgttgtttaagcgggttgagggtggtgtaaatccgtctgaactgctgggggagctggctgaactgtacccgcagatgaaggctgaagacctgcaggaacggctggcgcggattatgtttgttgcaacactctgggggcgtctgcatgagcgtgacaacagctga

SEQ ID NO: 277140 - DNA, 1524 bp, Morganella morganii
atgagtcagcatacacccgttttgcctgatacctcggcactggatattccggttgttctgatgtcataccagcagcgctgggtggctgacacgtctccgctcaaggtgattgaaaagagccgccgtaccggtattacctgggctgaggcatctgacaatgtgctgaccgctgcatcttcagccgctgcgggaggaatgaacgtctattacatcgcctataaccaggacatgacggtcgaatatatccaggcctgtgcgatgtgggcgcgggcattcaactacgccgccggggaaatcgaagaaggtttctgggaagaggacgaagacgacaagcacatcaaaacctataccatcagatttccggactccggctttcgtgtcgtcgcgctttccagccgcccgtcaaacctgcgtggccgtcagggcatcatcgttattgatgaggcagcgttccatgagcaactggacgaactgctgaaggcggcgctggcgatgctcatctggggcggcaaagtgcgggttatctccactcatgacggtgacgacaacccgttcaatacgcttatcggtgatatacgggccggacgtcagggtggcagcatacatcgcatcacttttcaggaggcggtgtcggagggattgttccgccgcgtctgcctgcgcaccgggaaagaatggtcggaagcgtccgaacaggcgtggatggcatcggtgtacaaattctacggtgccggtgcatccgaggaacttgactgtattccggccaacggtggcggggcctggctgtcccgcgctctgattgagtcccgtatgtcggctgacacgccggtgttgcgtctgacctgcagggagggttacgagctgctccctgacgaggtgcgccggagtgaaacgcaggactggcttgatgagcatctgaagccgttgctggaggcgctgcctgcggacacccgctctttcctgggacgcgactttggccgcagcggtgacctgtcggtggactatcctctgttacaggagaagaacctggttcgccgtgtgccgttcgtgctggaactgcgtaacgtgccgttcaagcagcaggagcaaatcgcctggtatctgatggacggtttgccaaacctgatgggggcggcacttgatgcccgtggtaacggctcttacctcgcagaatatgccatgcagcgctatggctcaagccgggttaaacaggtgatgcttactgaaaactggtatcgcgagcatatgccgccggtcagggctgcgctggaagacggcaacctggtggatttaccgaaggatgaagacacactggacgacctgcgggcggttcaggtggtcaacggcgttccccgtgtgccggaacagcgctcaaaagcaaaggcggatggcggcaaacgtcatggcgatgccgccatcgcactggcgctggcatattttgccagccgtgaaataaacaaagggccggtgaaggcgagttcgcgccgtcgccgccagtctgcccgtatgctggagggatactga

SEQ ID NO: 277141 - DNA, 546 bp, Morganella morganii
atggccagacgcagctcgatagagaaactgccggaagatgtgcgccgctggctcgaacgggcgctgaccgaatccggcttcagcgggtacaccgaactggagtctctgctgcgtgagcagggttacgttatcagcaaatcggctatccaccgctatggccagaagattgagcgccgctacggcgctatccgtgcggccaccgaagcggcccgcatgctgaccgaaggcgcggcagacgatcaggatgcacgttcggaggcggtgatcgccctgattcagaccgagctgttcgagagcatcgtccagctgcaggaagcggaggaaggcgaagtcgacccgaaagagcgcgtggcgctgctgtcgaaggtggcgaaaaacgtggccacgttgtcccgtgcttccgttaacctcaaaaagttccagaccgaagtccgtgccagagcgcagcaggcagccagcaatgccgagaaaattgcccgtaagggtggtctctcagccgatgcggtacaggcgctgcgccgtgaaattctggggattgcgacatga

SEQ ID NO: 277142 - DNA, 312 bp, Morganella morganii
atggttgatattacccgtgtgcgccgggaatccctgcgctggagtctgctggtggcccttaacaaaacccgcccgtacaccgccagtgagacgctgctgctggatgtggcccgcgccatttatcctgacaccacgccgctggagttgcgccgggagctggattatctgtcagaccgcagaatggttgatctggagaaaaagccgtccggcgactggtttgccgacctgacacgccttggcgtcgacttggtggaatacaccgtggaatgtggcccgggcattgcccgtccggaaaagtactggagtgaatga

SEQ ID NO: 277143 - DNA, 333 bp, Morganella morganii
atgacgctgcaggttgaattctggacggtggtgggtttctttatcacctttatgagctttgccggagggatggccaagtggcttttcagtaaagcagaggagcggcaggctgccaggtttgcgtcacttgagcagtcgctgcagcagtccgcttccaactggggtgaactggaaaaagaatttatgcggttcaaggccgatttaccgctgaactacgtccgccgtgaggattacatccggggccagacggtcattgaggcaaagctggacgcactctacaacaaactggaagtggtacagcagtaccgtattaccggaggtaaaaatggttga

SEQ ID NO: 277144 - DNA, 654 bp, Morganella morganii
gtgtggattaatctgatacaaaaactgccgtggcgcggactgttgctgaccatgattatcagcgggtttctcgcagggctgtattacatgggatacggcaatggccgcgataatgcaaagcgtgacggggatatcgcaatcagcaaactgcagtctgagttcgacagatacagaagagaacaggcagagcaggagaacgccgcacttaaagcctgggctgcgcgttatcaggagcaggttgccgccgggcatcaggcagaggccggttaccttgagcagattgctcagctggaaagccggaacagacaactacaaaggcaggtaaaagatgtcacacagcgctgggttgatgaaaaaggcacgagccattccattgagtgcgtgtttactcgcggtttcgtgcagcagtacaacgccgcactcggatatgacgacacatccggcagtacaggcattccggacacagctgccaccgctggcaccggcgctggcacaacgtcccggcaacctgaaaccactgatacccggctacgcgactcaggcgtctcacagcgggatgtcctcgccaacatcattgacaacgcacagcagtgccgtacctggcgaagccagataaacgggttgctggatgaacgggaaggattacagaaatga

SEQ ID NO: 277145 - DNA, 612 bp, Morganella morganii
atggacaatctgcttattgcgtggttgctctggtgcggtggttttttcagtcaggccgcagcagcacagcccccgcaggccgcactgaagtaccgcagtgagctgattcgtaatgcccgtctggaatgggggttatctgcgccggtggctgattttgccgcacaattacatcaggaaagcggctggcggcccggtgctgtatctccggctggtgctcagggcatggctcagttcatgcccgccactgccgactggataagccgctcagttcccggacttcatcagcgcgagccgtttaatccgtcctgggctatccgggcgctggtcagttatgaccgctggctgtggcagcgtgtcagtgcagccggtaactgtgagcgtatggcaatgacgctgtcaggttataacggtggtctgggctgggtgcagcgtgacaaacgtctggctctgcagcagggactggacagctcccgctggtttggtcatgtcgccaccgtcaatgccggacgcagtgcggctaactggcgcgagaaccgtcactacccgcagcgtattctgctggaactggccccccgttatctcacctggggaggcggcagctgtgtggattaa

SEQ ID NO: 277146 - DNA, 351 bp, Morganella morganii
atgaaaaacctgaaaaaaatcatccctcccgttaaaaaaccccgcctcatcggatggctgctgaccgccgtgctgctgctcggtattatcggtcttgtatcaccgcagcaactgccggtggtggtctacaaactgtcacttatcacactggctgctgtgctgggttactggcttgaccggtcacttttccccaaagcccgtccgggtcagtacctgatgcacgataaaaagctgatgtcggaaggacgctatcccgttcagacaggccgccatctggtgttttccgctgccctgatccgccgtgcgctgattgttgcggcagtctgcctgtctgtggcaacggggctgtga

SEQ ID NO: 277147 - DNA, 768 bp, Morganella morganii
atgaaacaacaatttttacccatcgtcccctggattggcggaaaacgtcgactggccaaacatattctgccgttgtttcctgctcatacctgctacgtggaaccattctgcggcgcagcggcactttacttcctcaagaacccctgcaaggttgaggtcatcaatgatatcaatggcgaattagtcaacctctaccgggtggtaaagcatcatctggaagagttcgtccgtcagttcaaatgggcactggtcagccgccagatttataagtggctgcaggataccccggaagaaacactcactgacattcagcgggcggcaaggttctactatctgcagaagcaggcgtttggcggtaaggtggcagaacatacattcggaatatccaccaccagtgcaccgcgttttaacctgttgcgtattgaagaggaactgtcgatggcgcacctgcgcctgtccagaacgctgatagagcatctggactggcaccagtgtattgagcgttatgatcgccagcatacgctgttctactgcgacccgccgtactggggaacggaaggttatggtgtggactttccgataggtaactatatccacatggcggaactggccaggagtatcaaagggaaaatgattatatcagtgaacgatatccctgaaatgcgacagatatttaacggtctgaatattcacagtgtagagattaattacagtcttgcagcgaagggaacatcacgaagtgaacttattgtaagtaatttagagtag

SEQ ID NO: 277148 - DNA, 894 bp, Morganella morganii
atgagtggtgatgtaagaaattatcgtattgagttttatcagttatcgtttaagtccacaaaacagttagcaaatctcggagatgcttttcagtctgtagttaataagctgacaccttcatcttcaaatcatgagggttttactagagaaatttgggggttgaaaaaacgcgtggatggttcttttagtggtgagctgaggaaatttcgcaactcgaatatcccagataaaggtgcaccaggaaagcagtctaccccgattccacttgctaaggatgaaggaatcattgaacgcaatttttttgtattttatcctcaaatcaatatagtaggttggcactacaatcatgtggcttgtggcataacccgttttagtgcatttctttcaactatctttggttcaaaggttaagcctgcgcctttgctggaaaaagatgcaattactaggctaatgaggggagatgtcaaaatgaaaaaaattcagttaacaattcctcgcccccgtaaccctgagctttaccctgatactgatttcagccaaaaaacactacaactgcttggtgatgcgggggctgatacaatgcaaattataatggggattaatactcgtcgtggcgatagtgacggtaggcttaaacagaatataaaatttgctatgcaagaattggtcgagttcggggcgaaaaaggcggtaattgatgtgtttgattctgatggtgttgtccatccaatagatttgatcgccgagcgtatttcgtcctatcaatcggtggttactgacgctcgtttccctccagccgaaaccatgtaccgcctaatcgatactgcgtatgctgaaaaccgggagagtatcaatgcatatattggagaagatgaactcggccctattgcttag

SEQ ID NO: 277149 - DNA, 417 bp, Morganella morganii
atgaataaaaaggacattaatgcagtgcttctgcgactaatgtcactgtttaatgttgataacgacagtgagctggctcgtatgctgaatgttaatagacagactttagctagctggagaaagcgagactctgtgccttattcaatttgcataaacattgcagaggaaaagggtatttctcttgactggttacttacaggtaaaggcgaggataggagcgaggtattgacgattgaacccgcaatgcaaaacttcagtccagctgatcttaaaatgcttgaactcctaaatcagctagacccagaggttcgccgagatctcatgcgaggcgctgaagaaaaacagcgtgtaattgaaatggaaaaacaacttaaagaattatccgcaacaattgagcggctaaaaaatgtgggttaa

SEQ ID NO: 277150 - DNA, 225 bp, Morganella morganii
atgaacaaacaacaggttcgggcacgactgattgaacggggcagcagcctacgccagttcgcgcttaacgctggctatgagccacgtactgttacccaggcagtaagccgctgggctggccggaatgagcttccccgtgggcgtctgacgtatcgcattctgcgagatctgtccgtcgtgatcggtaaagaagttacacccggcatccttcaggaggtgtcatga

SEQ ID NO: 277151 - DNA, 306 bp, Morganella morganii
atgagaaaagtaaatatttccagctcaggttcccgcattttgcgtgttcttaaagctcttcgcggtcacacacttaatgggatctcaaatggtgagctggcattagcacttgaagattctccggccaatatcaaccgtgcgttaaatacactgatcgaagaagggctagcaatgaagctggataacggtcgttttgcaccgggcatccagcttttgcagatcgctgttgcgtatagcaacgagatgagccgggcacaggatcgcataaacgaaattaaccaacgggtattagctggtagtcgataa

SEQ ID NO: 277152 - DNA, 909 bp, Morganella morganii
atgggacgcgaaaaaatacaacctgctgaattagtagaaaattcacagctatccgatgatataaacgtcaatcttaatgccatggctgagcatcgccttgaaatcatgcagcagtttggtgaaggtctgccttacgaacgtgatcgtattgtccatgaaacgaagttttacatggcacaatcggcagaagcaatgctggaagcaggtaagcgactgattattcttaaagaatgtgaacctcatggcgatttcactcaaataattacagaacaacttggtcttgcggaaagaaccgccagattggtcatgcaggcagctgttaaatattgctcaccagagttggagtcaaaacggcaagcgcttgccgttttgggaaaaacaaagttgtttgaacttatgactgaagatgatggagacctagttgaattagctgatggcggtacgatcgccggtatgagccttgatgatattgatcgcatgacaagtcgtgaactgaaggccgcactgcgcgaagcacgtgagaccaacgcagcacaacagcgcgttctcgccgataaaaacgagaagattgacacgctctccacaaagctggagaagaaatcccggatacaaccaccaaaacccgacgaagaagtgaagaagttgcgggcagaagtgaccgcattatccactgaggcggaatctgccatcactgtccgcctgttcagcgccttcgagatcctgagcgcctattgcgcagaaaaccagattgatacgccgaaagactttatggcgggactggtctgcgaactggagagcgctgcccgcaacctgcgttctgcatttgatctgccggatgagccgaccggcaacgttgccccttcctggctgacagacccgatacctgagattaacgggcgggaggcataa

SEQ ID NO: 277153 - DNA, 1770 bp, Morganella morganii
atgagtgctgccctgactgaacgactggtttctgttgcccgcgcggcacgtgacgcggggcatggtaaacgtggtgcaatatacgacgccgcctgcacagaactgggtatatcccgtgccacactgctgcgcaagctgaaggaggtatcagtgactgacaaacgcaaaaaacgcgctgatgcaggacgcagctcactgagccgcgatgaagctgcgctgatatccgccacactgcgcgaagctacccgtaaaaatggcaagcgcctgtattccatcgcggatgcggtggaaactctgaggtcaaacggctttataactgcaggcagaacggacgaggccacaggcgagtttttcccgctgtccgatgacaccatcagccgcgcactgcgtaactatggcctgcacccggaacagcttgatgcaccggccccatcttccgaggtggcaagtctgcaccctaatcacgtctgggagattgatgcgtcgctttgtacgctttactacctgagtaacggtcacaaggggctgcaggtgatggacagcgcgaagttctacaagaataagcctgccaaccttgcacacatcgccagtgaccgggtatggagctatgagataaccgatcataccagcggctggatttatgttgagtacgtgatgggtgcggaatccggtgaaaacctctgttctgtgcttatcaatgcgatgcaggaacgcggcggtgcagatgtgctgcacggcgtacctaaaatactctaccttgaccccggttcggcgaacaccgccggcatgacgaaaaacatgtgccgctcgctgggtatcgatctgatagcgcacaagccgcataacgcccgcgctaccggtcaggttgaaaaagcccgtgacattatcgaacgcaagctggaaccgggtctgaagttccgtccggttaacagcctggaagagctgaactcactggctgtgaaatggcgcagtcactttaatgccacagcaatccacagccgtcacggtaaaacccgcaccgatatctggctgaaaatcacggctgaacagttgcagaaagcgccatctacagaggtctgccgtgaactggcggtggcggcaccggaactccgcaaagtcacaccaaaactgcgtgtatcgttccgtggcacagagtttgatgtgtcggcggtaccgggcgttctggtcggtgaaaaactgatgattacccgtaacccatggcgcagcgatgtggcacaggtggtactgaccggcggggacggtcacgagacattctttctggtcgaagaggtcagaaagaacgagtttggctttgccgaaagcgcggcggtgtttggcaaaagctataaacccctgccggagactacggcacaggctgctgcaaaagaaattgaagagctggtcaccggtacggataacgctgctgatgcagcggcagcccgtaaggcaaaaacgctgccgttcggcggacgactggatccatacaaacatatcgacgacaccacgcttcccgcctatatgcctaaacgcggtcaggtttcagatgtgcgcggcccgcgtattgagctacgcccgctgacccatgtggaggctgcgaaaattctgcgtgaaaagttcagcctgaacggccatacctggacgccggaacattatcgccggttaacggcggattacccggatggtgtgccggaagccacactggatgaagtgatggtcgccctgaccaccccggcccgcaacagcgttatcagcattgttaacggcaactga

SEQ ID NO: 277154 - DNA, 1158 bp, Morganella morganii
atgctggtattgaaacaacaacttaaagaagcccgtatcccgcaggcggtggtggcaagagcagttgccgtctccgaggcaacgcttgcccagattgtgaaccataatgagtggccccgcaccagtccggaagatgtgcgccagcgtctggcgtcttatctggaaagtaaggggattgatacaaaaaagagttttgatgccgcacagggcgctgctgcgcccggcacagcgggtacaaccaacctccgtgaggaagagaacatgttacttaaaaaacaggtgttatttccgggaaccaaaaaagcctttggccttttccgtgacccgttcgccgatgaagccatgcagggagcggacgatgtgtttaccacaccggatatccgttacgtgcgggaggcgctgtaccagactgcccgccacggtggctttatggcagttatcggtgagtccggtgcgggtaaatccacgctgcgccgcgatctgactgaacgcgtcaaccgcgagaacgcaccggtgattattatcgagccatacatcatcgccatggaagacaacgacgtgaagggcaaaaccctgaaggcggcagctatcgccgaagccatcatcagcactatcgcgccgctggaaaacatcaaacgcagccaggatgcccgtttccgccagttacaccgagtcctgaaggacagcagccaggctggcttcagccacgttctggtgattgaagaggcccacagtctgcctatcccgacactgaagcacctcaaacgtttttttgagctggagtccggcttcaaaaaactgctgtccatcgtactgattggccagcctgaactggccaccaaactgtccgaacgcaatatggaagtccgtgaagtcgtgcagcgctgcgaagtggttgaactgctgccgctggacaacagccttgaagagtttctggcgttcaaactgcaacgtgccggtaagcagctggctgacgtcatggacgcaggcgcagttgaggccatccgtgcccgcctgagcaatccgggcagcaaccgtaaaagcatggtcagcctgctgtatccgctggctgtcagtaacctggtgatagctgccatgaatctggccgctgaaatcggggttccgcaggtcaacgccgacgttgttaaaggagtttaa

SEQ ID NO: 277155 - DNA, 270 bp, Morganella morganii
atgaaatcgatcagcgatatcaaccggcagatgagtaatgtctgttccgccattgcggcactcaacaccatgaacatgactgtacagagcgtcatgattgcaggcagtaaaccggttatccgtatctcccgcaacggccactgcgtccgtctgctggaacagggaaaagcggggtatacccatgttggccataacggctcaggacgttttcgtcagggcttctttgaactgcatggctgccgtattacctggtcagaatcattacattaa

SEQ ID NO: 277156 - DNA, 612 bp, Morganella morganii
atgaacgaagtaaataaagaagactacatgaaagaccgcaaggggcggctggtgccggttgaccaggtatctgattatgaccttgcgatggattctttcgttaaagaacaagttgccgccgcgaaggtcaaacgcgatgaactcagtgatttcaaacgccgggcttttgacgaatgctatgcctggcttgaccttgtggccgagaagtacggcagaacacgtggcggagccaaaggcaacgtgaccttcagcagattcgacggcagtcagcagataaccatccgtgtgcaggaaaccctgactttcgggccggaactgcagattgccaaagacctgattgacgagtgcgtcaccgagtggtctgaaggtgcgaacgccaatctgagagccatcatcagcgatgctttccaggtggacaaggaaggccagcttaacaccggtcgtattctttccctgcggcgggtcaaaattcaggacgaccgctggaaccgggcaatggaagccatatcagaatcactgcaggtggcgatgtccaaaacctatattaattttcgcgagaaagataaacacggaaagctgattaatatcccgttagatatcgctgctgtttaa

SEQ ID NO: 277157 - DNA, 189 bp, Morganella morganii
atgtctgtcaaatgcaaccattgtaagcaaaacatcaccacactgaagccgtgtgaggccaatattattatcaccggaaaataccatgtaccggcggttctcatcacgctggtttgccctcattgcagtcagcattattacgcggaagtcccggttatggaatttattccgtgcgaggtgaaaaaatga

SEQ ID NO: 277158 - DNA, 210 bp, Morganella morganii
atgaaaatcactaatgtcagtaaactggaaaaaaatattaccgatatgaccaatggattctccttttatacatgtaaaagcagctgcgctatcggcaaaaccgacaataaagtcattgttatcagcgtttataacgtccgtgaatttgaggatgagtttaacgaagattttgattccattgacgaaaaacatttttgcctgagtctgtaa

SEQ ID NO: 277159 - DNA, 510 bp, Morganella morganii
atgaaaggcatgaaattatataaccgttcgactctctacagcatggctctgaaaacttttggcccggaagctcaggctatgaagctgattgaggaggcagcagaactggccgctgccgcagcccgtaatatgaacggattgggcaatgaggttgatttggccggggaactggctgacgttgaaataatgactgaacaattccgtcttaacggactgggtaaactgattgacttcaaaaaacaggaaaagctggaacgtctggccaaacgtatcgggtgttcataccgtacagcagatgatattcatcctaccggcagttatgacgggctggcagcattaattaaaaaactaccccgccgtgaactgcttgaagactggtgtggtgcagttccaaacagtgcatttatcggggcggcagatcaggagattgcggtaatgtcagaatttatcctcgccgtacttgatctgcagaatgccggaatgttcggggggccttatgcaggaaaataa

SEQ ID NO: 277160 - DNA, 690 bp, Morganella morganii
atgcaggaaaataatgaaaagatactggataaattaaaaaaactcctggcactttccaaatcagataatccccatgaagcagcggttgcgttacagcgggcccagaaactgatgagtgcatatggtattacgcaacatgatattgcgctcagtgatatcgatgaaagcatcagtagctactgggcggctggcagtgttaatccgccgcgttatatgctgggtctgctggatattatccaggcggcatttggcgttaagtctattatccattccggctttaaacccggcgttggtttttacggtaataaagaccgggttgaacttgcctcatatacatgggaagtcctggcaagacaattaattgcagcccgtaaaaactatatccgtcagcagaataagcggatcatgaataagaccaagaccagccgtggtgacaaatttgccgaaggctgggtactggctgtacgcagcgaggttcagttattcgcaatgacccgcgaagaaagagaactggcaagcctctggcttgaacaaaaataccctgactcaggaacaacttccggacgtcaggccggaaaatcccgtgatggggatgtctcccgcattaccggttacaaagaggggcaaaacgtccggctgcatcagcctgtcaatggccaggaacagcagaagctggggagtggcttatga

SEQ ID NO: 277161 - DNA, 426 bp, Morganella morganii
atgaataaacagcgccttattcaactcattcacatagcccgcagtgacctccggatggatgaggatacctaccggcagatgctgcagggcctgaccggtaaggcctcaaccaaaggaatggataccatacagctaaaccgcgttctggaatccatgaaaaagaaaggctttcgtattaagcctgccgggaaaggtaagtccggtttgccgctggataaccatccgcagtcaaagaaaatccgggcgctgtggcttgagatgtctgcggctggcatcgtgcgcgacagttcagagcaggcgctggcgctgtgggtcaaacgggaaacgggtatcagcgcgttacgctggctcagcagtgagcaggctggcagcgtgattgagaagctgaaaaagtggcagcgcagagctgcggggaggaagcaatga

SEQ ID NO: 277162 - DNA, 390 bp, Morganella morganii
atgagcgacctgaatcagtttcgcagtaaagggccggaactgttggtggagctggcacaacatacctctgagaccgtccgggaaattattgatattgaaccgggaattgccgaccagattggtcaggccgtcgcaaaccgcatgatgcaggtctggggcgggcaaaacgtctattttccgatgggtatggtatggcgggtcagccagcgtgacagagaaatatttaacgaattcgacgggcgtaaccatcacgagctggcccgtaaatttggtgtttcgctacagtggatttacagtgtggtgaagcgggtcagaaaagaagaattggatcggatgcagggcaaactgtttgatggtgaatccgatgcagacacggggaaaaaggagtag

SEQ ID NO: 277163 - DNA, 1743 bp, Morganella morganii
atgctgaaacacacatctattcttacccaaatcaccggttttatggtgctgcttaccgtctttgcggtgattggcatggggctgaccaatcagatcacggaaagtgtgcagggcaatgcgcacgcgattaataaatccggcacattgcggatgcagagttaccgtttcctgtctgaaatccccctgaccgcacattcacagcagtatcttgatgatttcgaatccgatttaaccctgcttgccggaatgaaagcagtcagtccggccaaaatacagcagcagtttctctctgtggaacagacctggcggcaaaagctgcgtccggcactggaagcggcaaaacagccggaagaggcccgagcgctggtggccgcgtttgtcagtcagattgacagcctggtgtcggctatcgatcaccagactgaatccaccatccggctggtggcggccattcagctggtctttatcgcgctgatgattttactgctgctgttgtcggcgcggcatttccgccgccggatcctccatccgtggcagcgtctgctggcgcaggcggatgcgatggggcaggggaattttcagccgcgctttgcggattatgaccaccgcgacgaaatcaccatgatcggtaataccctcaaccgtacggcagaggaactgtctgcgctctacggagagctggaatcacgggtggcggtcaaaacacaggatttacaggaaaaaaaccagatgctggccttcttatataagagcgggcagcggctgaataacaccaatgacctgaccactcagctgacggatattctgcgtgatctgcatcagatcatgccggaaggcgcactgtgcctgcggatttttgaggataataacgccacccgttttacagaaatcggtgactgcggctgcgtgccgtcacagacacaggaacagctgacctggaatctgagcgggccgattaaccgttacggggtattgacgcttctgttaccggccggacagcagctgaacagtgagcagcagaatatgatgcagatgctgagcaaacaaattatttcagcctttgcactggcttatcagcatgagcagcagcaacagctgattctgatggatgagcgctcagtgattgcccgcgaacttcacgattctatcgcgcagtcgttatcctgtctgaaaattcagataagctatctacagatgcattccgcgcagatcccggaaaattgtcagacactgctgaccgaaatgcgccaggaagtaaacggtgcttatcatcagctgcgtgagcttctgaccactttccgcctgaaactgactgagcccgggctgcttgccgcgctacagagcacgctggaggagtttgagcagcggatgggttaccgcatcggttttgattttcagctctccgggcgccaggtctccgcgcaccagaccattcatgtggtgcagattgtccgcgaggcgctgagcaacatcctccagcatgccaatgcgtcgagggcgcaggtaatatgccggtcagaagaccagatgatttatatcagcgtggaagataacggggaagggatcccggaacatccggaaaaaaataaccattacgggttatccatcatgcgggaacgggcagccacactgcacggaacctgccggataaccacacgggaacagggcggcactcaggtgctgataagctttcccgccaatacaactataagaataaatgaagacgattcaggagcaaggtaa

SEQ ID NO: 277164 - DNA, 702 bp, Morganella morganii
atgacgaacagaatactttcggccggagagattatactcagtgatccggatgaagccgctgacccggcctctccctccacgatcctgctgatagacgatcacccgatgctgcgtaacggcgtcaggcaattaatcagcatggagccgtcactgactgtggccggtgaagccgggaatggccgcgacggcattgcgctggcggaatcactcgatccggatctgattctgctggatctgaatatgccggaaatgaacggctttgaaaccctggatattctgcggcgcaaaccgctctccggccgggtggtggtgttcagtgtgtccaactaccgggaagatctgattacggcactgcgccgcggggcggacggctatctgctcaaggatatggagccggaagagctgctggtggcactgcgtcaggcggccgccggtaaaatggtggtctccccggcactgaccgaagtgctggcaggcgcgctgcgtgaggtgcgcagtgatgatgagccggatatcaacagccttaccccgcgtgagcgcgatatactgaaactgattgctcaggggcagccgaataaaatgatcgcccgtaaactggatatcacggaaagcacggtaaaagtgcatgtaaaaaacctgatgaaaaaaatgaaggtaaaatcacgggtggaagcagcggtatgggtgttgcagaacaaatag

SEQ ID NO: 277165 - DNA, 9780 bp, Morganella morganii
atgcctgtgacttcgtattactcaaaaacaaagagggtaacagcctatctgttactctttttgcagttattttttccggtgtcgacggcaacattatctgttgcctacgcggcagaacatgacaatgaattaatcatgtcagaaacatttgacggacttaatgcattgatggatacatctccgagtccggctccgcctccgaaaccacagggcggaaaaaccgcttccggcagcactctgagcggtgagggatttaccgttgagatgccgtccggcagtgaatacggcgtgatgccggctggttcggacagtggctttatctccggacagaacggcatgccgttcccgatgagtgtcagcacgctgcctgacccggcgaacccggcaccgcgcgataataccgtgcggaccgatgatatcttcagtgccttgccgaccctcggtctgccggatatttctccggaagatgaagcggcacagaatgaagcccgtctggcaggtaacgcctcacaggccgggcagatcctctccagtgaggatgcggtggatgcatctctcggctatgtgcgcggtatcggtgaaaacctgcttaaccagcaggtgaatgactggctgaaccaggtgggccacgcccgtattcagttcggcagcaataaaaccggtgatgcggatgtactggtcccgttagttgataatccgaacagcctgttcttctcacagatcgggcttcgcgctaatgaagaacgtaccaccaccaacctcggtctgggctatcgtcagtatgaagacggctggatgtggggggttaacagcttttatgactacgatatcaccggcagtaactcgcgggtcggtgtcggcggtgagttatgggccaattacctgaagtttgcggctaacggctacttcagggtaacagactggcaccagtcaaaactgcacgaaatgcgcgattacgatgaacgcccggctaacgggtttgatatccgtgcggagggctatctgcctgattatccgcagttaggcgcatttgcaaaatatgaacagtacttcggtgacggcgtcagcctggccagtaccacctcttccggtgaactgaaaagtaacccgtcggtctccaccatcgggctcagttacaccccgttcccgctgatcacgttcaaaggtcagacatcccgtggtgattccaacgacagccagattggaatggaactttcctaccgtttcggcgtgccgctgtcacagcagctggataccgacaatgttgatctgatgcgtaacctggcgggtaaccgttacgacttcgtcgacagaaactacaacattgtgatgcagtaccgtaagcaggaactgctgcggattgccctgccgccgacactcaacggtgaagcggcacagacactgccggtgacggtcagtgtgctgaaagccaaatacggtctgaaatctctgcgctggtcagcgcctgaactgctggcaaacggcggtgaaatcaaacagaccgggctgaccacggcagatattacgctgccggaatatatttttatggatcgtaacggcgggccgcagggctaccgtgtgaccgctgtcggtgaagataacgagggtaacccgtccaacaccgcagaaatgtgggtgaatgttattccgtcagtggaaaccatcaccaaactgaccgtcacgccgaaccaatccttaatcgccaacaacagtgaccagtttaccgctgtggcgctgttacagaatgacaagggcgaagtgctgccgaataaagcagtgactttcagcgtttccggtctgaaaaatccggaaggcgtgaccatttatgatgcggacggcaacagcggccagacactgaccgtgatctccgggccggacggcacggcaaccgtgaaaattatcagtaaatccgccggtaaaggattgctgaaagccaaaatgcgtaacggtaacagccgtaccgaagcaatcacctatattgctgatatcaatacagcaaaaattaaaacccttgaattaaccaataacaaagcagtggctgacggccaggcgaaaaacatcgctgtggcaacggtgactgaccagttcgataacctggtggaaaacttcccgttaacgtccagagcggataacggtgcgacagtcgcggatccgaaccagcagactgacagcaacggccaggtcactatccggttcagcagtgaaacggccggggattccaaactggtggttgagggaacgggcacgtcgaagagtgtgacagcacagtttatcgcggatatcagtaccgcgaagattcagagtgttgtggtaactcaggataattcggcggcggatggtaaagcgaagaacagtgttctggtaaccgtcactgataaccgcaacaacccgatcgccggtgcaccggtgacaatcaaagtaccgggaactgccggttatctgactcagcctgccggtggtctgacagacagtaatggtcagttgcgggtgaatatcaccaataccaaagcgggtcaggataactataccttcagtatcaatgacagccgtgaaactgcggttctgacctttgttccggatctgtccaccgcaaccatcacgtccctgatcagtgacaagaaagccattattgctgacggtactgagcaggcgatgctgaccgtgacggtgaaagatgcctttaataacgtgatcccgggtaataccgttaacctgacaaccacactcggccagcttagtgatcagaatgtcgttaccggcagcaacggtgaggcaacctttacactgaccggtacccgtgtgggtgatgcgactgtccgtgcgatcaacgccacagacgcagccggtaaaaccaccgttgtccgtatcacacctgataacagctcgatggctgtccgcagtgtgctgttaaacggtgatcagacaaccaaagttgccaacggtacagataacttcacctataccgtcctggttcaggataacaatggtaacccgatccagggtgtcccggttactgcatccgcagataatccggcagcagttgtactggtaacaggcactaccaatgcggaaggtaaaatcaccattaccttagccggtaccaataaagcgatggacaatgttcttgtcagcgcggcgctggacggcggggtaagtgtggatgcggataagagtgttaactttatctataacatcgacaccgcgaaggtcagtaaagtcacgctgaacggcgatgtcactcagaaagtggctgatggtctcagcagctttacctataccgcgcagttggtggatggtaatggtaacccgatccgtcaggcagatctggatgtgaagtggacgcagaacaaaggcagcgatgtggtgctgtcggcggaaaccagcaaaaccaacgcagacggtgtggcgactatcactctgatctccaccaccaaagtggcggataacatccgtgtcagtgcgcagtatgccggtacgccggttattcaggcggataaagccgtcagctttatttataacgttgcctcagccagagtcagcaaggtggaactgaacggcagtgtgactgaaaaagtcgccgatggcctcagcagctttacctacacggcacaactggtggatgagaacaacaacccgatccgtcaggcggatctggatgtgaaatggacgcaggacaaaggcagtgatgtggtgctgtcagccgcaaccagtaaaacggatgcggacggtaaagccgtgattactctgacgtcgaccaaaaaagcagcggagaatatccgtgtcagtgcacagtacgcagaaacggctgtggtaccggcaaacaaaactgtcagctttatcttcaacattaatatggccaaagtcggcactgtggagctgaatggcgctgtcacggagaaagtggcagacggcaccagcagctttacctataccgcacagttggtggacagcaacggtaaccctgtccgcaaagcaaacctggatgtgaaatggacccaggataaaggtgcggcggtaaaactgtcctccgttgtcagtaaaactgatgccgatggtaaagcgactatcacgctgatttcgaccaccacggcggtggacgatgtccgtgtcagcgcgcagtaccaggaaacggcagtcgtgccggcggataaaaccgtcagctttatctataacattgcctcagccaaagtcggttccgtgactctggaaggcgatgtggtacagaaagtggcggatggtgtcagcttctttacctataccgcgcaactggtggacggcaacgggaacccggttcgtcaggccgatctggtggtgaactggagccaggataaagggacggatgttgctctgtcggccacaaccagtaaaacggatgccaccggtaaagcaaccatcactctgacttccaccaaaaaagccgtggatgatgtccgcgtcagtgcgcagtatgcaagtaccgccaaagtggatgcgaataagctgatcagctttatctttgaactgacctccgccaaagtcggtacagttaccctcaacggtgatgtgacggaaaaagtcgctgatggtgtgaacgcctttacctacaccgcacaactggtggacggcaacggtaacccgatccgtcaggctggtctggatgtgaaatggacgcaggataaaggcaatgatgtgacgttgtctgctgtcagcagtaaaaccaacacggatggtcaggccacagtcacactgacgtcgactacaaaagcggtggatgatgtccgtgtcagcgggcagtacgaaagtaccgccaaagcggcagcggataaaacggtcagctttatctataacgttaatctggccaaagtcagcactgtgacccttgacgacgctgttattgaaaaagtggcggatggtgtgaataccttcacttacaccgcgcaactggtggacggcaatggtaacccggtccgtcaggccggtctggatgtgaaatggacgcaggacaaaggtaatgatgtcgtgctgtcttcggcaaccagtcagaccaatgccgatggtaaagcgaccatcaccctgaaatccaccacaaaagccgtcgataacgtcacggttaaagcacagtacaaagaaacggctgaggttgctgcggataagacggtcagctttatctatgaactgagttcagccaaagtcggtaccgtgaaactggacggcactgtcacgcagaaaatcgcggatggcaccagcttctttacctataccgcacaggttgtggacggtaatggtaacccggtccgtaaagcggatctggtggtgaactggacgcagaacaaaggtaacgatgttgctctgtcggccacaaccagtaaaacccgtgctgatggtacagccactatcacgctgaaatcgacaaccactgcggtggataatgtcaccgtcagcgggcagtacgaaagtacagctgctgtggcggcggacagaaatgtcagctttacctatgaactgacttcagccaaagtcggtaccgtgaccctggacggcgatgtggtgcagaaagtggcagatggcgtcaatgcgttcacctacaccgcacagctggtggacggtaacggtaacccgatccgtcaggcagatctggtggtgaactggacgcaggacaaaggcaatgcagtcgtgctgtcagcgacaagcagtaaaacggatgccaccggtaaagccactgtcacactgacatcgaccacaactgccgttgataacgttacagtgagtgcacagtacgaagataccgcgaaagtggcagcgaataaggccgtcagctttatctttgaactgacgtcagccaaagtgggcaccgtgaccctggaaggcgatgtggtacagaaagtggcggatggtgtgaatgccttcacttataccgcacagctggttgacggcaacggtaacccggttcgtcaggcggatctggtggtgaactggacgcaggacaaaggtaatgatgtggcgctgtcggcgacaaccagtaaaacggatgccaccggtaaagccactatcaccctgacctccaccaaaaaagcagtggatgatgtactcgtcagtgcacagtatgccggtacagccaaagtggatgccaataagctggtcagctttatctatgagctgagttcagccaaagtcggtaccgtgaagctggacggcgatgtggtacagaaagtggcggatggtgtgaataacttcacctataccgcgcaactggtcgataccaacggtaacccgatccgtcaggcggatctggtggtgaaatggacacaggataagggcaatgatgtcgtgttgtctgctgagaccagtaaaaccaatgcggacggtaaagcaaccatcacgctgacctcgaccaccaaagccgttgataccatcaccgtgagtgcgcagtatgaaagcaccgcgaaagtggcggcggataagacggtcagctttatctataacctgacatccgcacacgtcagtactgtgacgctgaaagatgatgtaacagagaaaattgccgatggtgtgaatacctttacctacactgcacaactggtggatggcaatggtaaccctgtccgtcaggcaaatctggatgtgaaatggacgcaggacaaaggcagtgatgtcacgctgtcagcggcaaccactaaaacggatgtcaacggtcaggcgacggtcaccctgaaatcaaccaccaaagcggtggataccatcacggtgaaagcgcagtacaaggaaaccaccgaagttgcggcgaataagactgtcagctttatctataacatggcgtcagccaaagtcggtacggtgaaactgaccggtgatgtggtgcagaaaattgctgatggggcaaataactataccttcacggcgcagttagttgataacaatggtaacccgatccgtcaggctgatctggtggtgaaatggacgcaggataagggcaatgatgttgcgctgtcggccacaaccagtaaaacggatgcggacggtaaggctgttatcaccctgacctccaccaaaaaagccgttgataccatcaccgtgagtgcgcagtacgaaagcacgccggttgtggcagccgataagacggtcagctttatctatgacctggcgtcagcgcatgtcagtacggtcgcgctgggcggtacagtgacagaaaaagtcgcggatggcgtgagttacttcacttacaccgcacaactggtggatgtgaataacaacccgatccgtaaagcagacctggatgtgaaatggacgcaggataaaggtacggatgtgacgctgtcggatgtaaccagcaaaacggatgccaccggtaaagcgacgattaccctgacttccaccacaaaagcggtcgataccattaccgtgagtgcgcagtatgcaagcaccgcgaaagtggcagcgaataaaaccgtcagctttatctataacctgacatccgcacacgtcagtactgtgacgctgaaagatggtgtgattgagaaaattgccgatggcgtgaatacctttacctacactgcacaactggtggacggtaacggtaaccctgtccgtcaggcaaatctggatgtgaaatggacgcaggacaaaggcagtgatgtcacactgtcagcggcaaccactaaaacggatgctgacggtcaggcgactgtcaccctgaagtcaaccaaaaaagcggtggataccatcaccgtgaaagctcagtatctggataccaccgaagttgcggcagacaagacggtcagctttatctatgacctggcgtcagccaaaatcggtaccgtgaaactgactggtgatgtggtacagaaggtggccgatggtgcgaacaacttcacctacaccgctcaggtggtggatgctaacaacaacccggtacgcaaagcggatctggtggtgaaatggacgcaggacaaaggtaacgatgtcgcgttgtcagcagcgaccagtaaaacggatgctgatggccgggcaaccatcaccctggtttccaccacaacagcggtcgataccattacggtgagtgcacagtatgaaagtacgccggttgtggcagccgataagacggtcagctttatccatgacctgacgtcagcacatgtcagcacagtgaccctggatggtgatctggttgagaaagtggcaaacggcaccaacaactttacctataccgcgcagttaacggacagcaacggcaacccgatccgccaggcgaatctggatgtgaaatggacgcaggataaaggtacagacgttgttctgtcagcgacaacaagtaaaacggatgcagagggccgggcagttatcacgctgaaatcgacgaccaaagcggttaaagatatcactgtgaaggctcagtatgcttcgactgctgaagtggcagccaataagacggtcagctttacggcggatgcagcagcagcaaaagtgatcagtgtgaaactggatgatgcggtaaccagcaaaattgccaacggaaccaacacctttacttacactgtaacggtggcagataccaacggtaacccggttgccggtagtgctgtaacagtattgactgtggcggataatgtcacgctgggcaccaccgaaaatacggatgcggcagggcagacaaaaattaccctgaagagtacgaagactgcatcgtatgacatcatggtcaatgcaaaaggtattactggtgatgcggttgatgcagataagctggtgaatttcaccgcggacagtgcaacagccactatcacgaatgtgaagcttaacggcgtacagacacggaaaattgcgaacggtacggattcttttgaattcattgctgaagtcaatgatgcgaacggtaaccctgtccgtgacatcaccgtgaactggtcaggtaccgccggtgccgctgcaacattctccgcaacttctcagcagacagatgcagaagggaaagccacggttaaactgaccagtaccacaacaccggtctatgacattgtggtcagtgccgcacagggaagtcaggctgcggttaatgcggataagaaagtctcctttgaagagctgttctcaacgtcagtgctggtcattgatgcggttgcagccggagataagccggttaacggcgcacacgttaagattttctcggaagatggatctgaattgctgtacgaaactacaacgaatacaaccggtaagtttaaggttgatctggttggcggcaaatacgcagttaagatcacagcgaataattatgacgactacgatgactttatggtcgtgaagagcggcgcggatacaaactttaagtttgcattgtctccggcgctgggaacacagttcggccgtattattctgcagtggagtgaagctccgggagatctggattcgcacttaatggttccgcgtgtcggcggtggtgcacggtaccatgtgtactacagcactaaatctccggcaggttcggatgcatcactggataaggatgaccgctctgctccgggtatcgaaaccattacgatgacatcaccgcatcaggggacttatacgtatttcgttaaaaacttctccggtccggatagcaagttatcaacagccaaggtacaaattttcctgaataaggatttaactctgaagccgggtacgtcgagaatgatgagctttgatgctccggacgcgagtgtacctacaaaagcgcaatggattgtatttgatattgtggtggatgctaataatgaggtagaggtggtaccaaaaggaacggtgtcatcaacagaaccaacttaa

SEQ ID NO: 277166 - DNA, 1185 bp, Morganella morganii
atgcttaaatatgtgattttcagcttctggattgtgctgatgtacccgctcggggtggatttgcatctgaccggtattccgcagattgccgtggatctgaatgccccggaaagtgcgctgcatacagcattctccatatatcttgccggaatggcggccatgatgctgattgccggatggtgtgctgaccatattgggcgcaggcctgtggcactggctggtgccgttattttttgtctggcttcggtggctgccgggtccgctgtcaccaccgggtttttcctcggcgcccgttttgcccagggcgccggtgccgggttctgctatgtggtgacgtttgccctgctgcgtgatgtccttcccggcccggcacgggcaaaaatcctctctatgatgaacggaattacctgtattgcgccggtgctggcgccggtaattggttttcttatcctgctgtattttcactggtctgtgatgttttacttttctgcgggctatgcattggtgagcattattttctgtctgttctttattaaagagacccggccggataaacacacggcggaaacagcggcagcagccggagacgaacagccggaaggttttctgaatgcttttttcctgacacgactggtgatttcctgcctgggaatgggcgtgatcctgacttatgtgaatgtatcgccgattattctgatgggacaaatgcaatttacatccggtcagttttcagcggcgatggcgttgcttgccatggtcagcatgagtgtctctttttccatgccgaaaattatcgctgccttcagcagtgatgccattttatataccgcgctgggcttgttcctgctcaatgccgcgctgctgggaatatttttgtccggtgcggaatacacgctgatactgattattgtgtttggcttgtgcggtgccggcttttcactgatgttcgggattatcatgagtcaggcgctgtcgccgtttgcaaaacgtgccggtgtggccagttctgtgctggccattgcccaactgagttttgcctcactctatatccggctgatggccgccgcggaaaccggcgcggtggcaatgctgctgattattctgctgacaaccgcgttggcgggtgcgatattactgagacgatatcctgtcagcagcggaaaccgccgggcgctttatgaataa

SEQ ID NO: 277167 - DNA, 966 bp, Morganella morganii
atgaataaatcactgcaccgcctcgatttaaatttgcttatcatcctccagtatctgctggaagagcggagcgtgagcctggttgcggcccggctggcagtgaccccttcggcggtcagtaaagcgctgaccaaactgcgtacctggtttgatgatccgctgtttatccgcagtccgcaggggttaataccgacaccgctgatgctgcgtcttgaaggcgtgctgccggaatttctgcatactgccaaatcagtggcggagatccgcgacagcgataacccgaaaggggttcagttccgtctgctgatggaagaaccgctgaacctgatcatgctgcatgatctggcggtcacgatcctgaatcactatccggagtcggcggtcagtatccgtgactgggattataactcactcagtgaggtgattgcgggagaggcggatatcgggctgctcgggcgtgaaagctacccgaagtcgcgggagagcatcagcgcgatcccggatattgtcaattttgatctgctgttcacagacaggccgctggcgtttatccggcgcggacatccgctgctcagtgaggcgtggacaatcagtaatctgatcaaatacccgcatatcagtacggaatatgctaaccggatcccgtgggcgctggatgatttgctgcatgatctcggttattcgcggcagatccggctctcttattcttcttttgaacaatcattgcagatggccgcgcatccgggacatgaactgatcacctgtgcaccgggctactgccgccactatgtgacgaaatttcagctggatctggagtgccgcccgctgccgtttgaggaatcattttaccggcagctggatattccgtttctgatgctctggcataaacgcaacgcgcataatcagaaaacccgctggctgcgggaacaaatccggcagagtgtggcggcgtttaccggagaataa

SEQ ID NO: 277168 - DNA, 783 bp, Morganella morganii
atgaatattaatcgttgttgctcggaagctgagcaagattttccggaaggtcatgttaatcaacgggtgactgattttttatccggaatgacaaaaaataaaaaagaaaataaacatgacagtgctatcccggtgatttattcactattctgtccgtatgatgataaatgttatcatggcgatatattatatcccggggggatgataaaaaatcatagcaatcatcaccggaaagttcatgatgttatactggtatatccggaaaataataaaataaagaacagtatattcagggataatgtcgccacggaacctttcggtgatatctcacataacatgctatcagcggataaaccaaaaaacgttccggcagaggaggaagattattcaggcgctgatatctcagcagaagaaaagataccggcgggcagtgcaacaactgagttaccggaaataccgttttttctgaaccatccgcctccggggataaagacggaagtaaaaaatcagccattgcggcattatgaacagggaagaggtactcaggaaaaaatacccctgttcgtttaccatacggagaaaaatgcgttatctccggcgtacagcagagctgattattattgctcttatcatttcagacagaaatatcagccaccggaaccggttcatatttacagagataatccgggagggtttaaattagaaacatattcagaatccctgaagcgacgactgaaatcagcagtaaatataaacggaattgataatattgatataatataa

SEQ ID NO: 277169 - DNA, 486 bp, Morganella morganii
atggatgacaatacagattttgatattaaatctctgatcgggaatattttttctcatctggaaagtggaaacatttctgatcttctgatgccaaagaataatgaggatttttcggatgtttattctctggcgtgtgattattatgataaagggcttatagaacaagctgagaatatttttcgttcactctgtttatatgactttagcaatgtggattatttacttggattagctgcagttaaacaggtgcaaaaacaatatcagaaagcgattaatctttatagtttagctattaatttagatgaaaacaatgcatcgatatatttgtatgcaggacaatgctatttatacacaggtgagaaagaatcagcgataagcagtttcaatcattgcctttcattagcgtgtaatgataatgagcgggaacaagcaatacattatatatcaatgctggaaggtggattatgcgtttggaaaataggttga

SEQ ID NO: 277170 - DNA, 1488 bp, Morganella morganii
atgcgtttggaaaataggttgaaagtaaataaagaagttgatgatctcagttataattcctcattgcataatgattttatgaggcttaagataatatatgatgcgctcacggttacagagagaattccgtatgatgatgctgtgaaatatataagagaatactacgatatagtaaatgatagtaactttaagaataatattaaaaataaagttataatgcatgaagagtgtgagggattgattaataaaacgagggtgattgttgatagaattgaacaagaacagattaaatctatggcggggagattttgggagcacttttatgaagataaagtaaaacaaatttatagcgaattagataggattaattatattctgtcggatcctgacactacaagagaacaagcattaaaagaacttgaagcatatgatatattaatgaaggataaagaaaatataaaggcaattaataatgctggtgataatatttcagagaaaataagattgataaataaaggtattcaggagtattttatcattagggatatggtcacatttggttactttgttgagagaatggataatgtcagtgtgtatgcttatgatatttcagttaaatatcagcgcgaaggtatgaacaaatatgttgattattataaaagcgtagcaacaaaattaaatacatttggtgattatattgatgagcccatcaatgatggaaagcagaataaggtatataaaagaaagttttatactgaattatacaacactatgaaaccttatttttattatggagattctgttggccatactttatatacaggtagtatgaagatagttaaggtcggtgacgataaatttaatgttctggttgatgataaagtaatagaagaaaatttatcatataaagatgcatatggaaaaatggaatatttcttttcttgtcatgagccggttattaaagggactaaattatgtaaaatatttaaacccgtactggatgaatttaataatgttattggcttagaagggaaggttgaacagtttctatttccttatgaactttatagttttatggacttagcgagcgatgaaaaaggacttaatcgtataaatgaaaattttgataaatgtttcaaggataaatcaccagatttatcaaggtggaataatgttaatgaaaaatcaatagcggctaccagtgatgtaaaatataccagggaaattttgaaaaaaaactatgatgcaggattcattagttattatgaaaatgaagaagaaagaaatgaatattctaagttttatcaacatgaaataaatagtatgaatcaaaaaatagatggggctaagaaaggacttcaattaacgttggatgaatacactcagcggtataacactataaatagtaactatgacaatatgctgagaacaattacaacaatgattagcgaattggctcaggaattaaagggatttttaagattctga

SEQ ID NO: 277171 - DNA, 1812 bp, Morganella morganii
atgactgtaattattgataaaacatcagattttggtgttttaaataccacaacgtcaagtgaaagtgtaaataaaaattcaggtgcaaataaacaaaatcgtgttaacgatcctatcggagagtttagcaaggtgatggttagtgatgttagtaaaaaatcaacatcagctaatgatggaaagaaaaaatcagaattaaataaaccgaaattggataacccaaagttaaataaagataccgcaggcagtgaaagtactacggaaagtaaaaataccccggaaagtaaggataccacagacagtaaagatactacgggtaagaaaaaaggtggattttcacttaatgaattacattcattgctgacggttttttattctgaagagaaatttaaaattaattcaagagctcatgggtacaatcttaaattcatcaaggaattatggtctgataataaagtaaatcaattatcagagcttatttctgaatccggggatttgattaatgaccatattgaagcaacggcagagtattatttctctcaaatgggcagtgagctgtttggaaagatgccggatggtgagctgaaaaataaattaaccggtaatggtgttgataagtttaaaagtaaagatgaaatttctttatatttaagaagtaaaacaaatgccgatgaagttattaaaaatatcaattcggagtcagtgctttataaggataaaaccaagttatttaaatcattttctgatgagatgaataaatttcctgtgctgggtgatgaactcggttctctcattgccggaaatcgtgaggagattacggctgaattaaattcattacatgaaatggccgctcttcaggatgaagcgaaagatattgtgaaagatatttctgatatattcggctctcagcgtaagtctgatatgaattatagtaaatcattaactattttgatgggtaaaatagcagatctgcggaataagctagcacagcgtaaacttgaaaatgatcgtcttatagccacaattcagcaaaaaacattgcaggataaaaccgatgctgacggagctgaaatggcaaaaaaaataaaaaaagcagagcgtttacaggccctttttaaatggttagggccattattgatcgcattaatggttatattaactgctctgactggtggtttactggcaaaagcactggccgcagtgattgtggttgtcactattattagtgaaattgttaaggcggcgggtggcccggatattatggcaacaataatgacaccggtgacaaaattggtggaagttgtccagaagtttattaaagatatggctatgaaaattggccaaaaacttgggctgccaccggctgagttaaaaaaactggaagaaaaaatggaaattattgccatggtacttgcagttgttgttgtgatggcggtgtttgctgctgcaggtgctgttgccggaaaagttatcggtcaggtggtatcagaatcggtaaaggaaatattgagacaggtaatggtggaggttaaaagattattaatttcaatgatgctgacatctactgtcgttaacggtataaattcagtcactcaggcagaacttaataaagatgtaatgaaattaaacgctgatatagatttagatcaggaattgctggataagttgatggaattgatggaaaaaataatggcagctttttcagaatcacagcaggatttaaataaaatgaaagagcagttaggtaagataggaaaagacgattttcagcgtaagaaggctattatacagtcagggccattagctgtttaa

SEQ ID NO: 277172 - DNA, 759 bp, Morganella morganii
atgacgacgataaccacagcaaataatacgaagcaggtttattcaccggaaattgatagtattatttcagtaaaaaaagatttacaggaaataaatattgaccctgaagttataaaagagattacaaaaaataacagtataaagagcacagaagttacagatgagcaaatttctgctgagatccgtacccgtgcaggctcgctgatgccctctctgttatctgtcagtgatcagaaatggatgaaattagccatagaattatgcaaagtactgaatgatgattcactgagccagcaggaacgccagaataagctggatgtagctgttattgaactggcaaaagaattaaaaaatatgaaatataaggaagccgaacttcaggtcaaagcagccgtcaccggtgcgttagtttctattggtatttctattgtcggtgctgctatgtcaataaaggggattgatgtggctaatccgacggcaccgacacccggcggaatagcggggcaggccatgtccggactgtcccagccggttagccaggtattcgtacaatttattcagaagcaggttactgagttacagggtgatgctgaagttgttcgcgcgcaaaaagatctgaagctgaaaagcggttccgttcatggtaaagcttctaatgacgcgcatgaattaaataaaaaagtaatggatatgtttaaccgttatcttgataacaagcaggcgacatctggtaacttgcttaataatatgcggacataa

SEQ ID NO: 277173 - DNA, 540 bp, Morganella morganii
atgagtatgaaaaaagtggttctcgcactggcagtttcttccgcaatggcaatgactgcacaggcagcaaatcagggcggcggcaaaatcaacttcaacggcgaagtgattgatgcggcatgctctatcgatgcaaacagcctgaaacagactgttgagctgggcagcgtggcaaaagttcagttagcgaaaggtggtaaatcaacacctgttgatttcactattcagttgcataactgcgatatcaccggcaaaaccaccacgacagtcacctttaaaggtgttgcaggcggcgctgcggcagacggtctggataaagcctttggggtcagcggcccggcgaccggtgcaatgggtgtggtcgtgacggatgcgggcggtaaagtgatcgctccgggggcagcatcatccgcatttaccttaaacgagggtgataacacgctgaactttaaggcgtatatgcagggtgcaacaacggctgtcaccgttgcaccgggtgctttcaccgcaacagccgacttcctgatggactatcagtaa

SEQ ID NO: 277174 - DNA, 516 bp, Morganella morganii
gtgaagtcaaacatactcagtaccggactgctggcagtctgcctgactgcttatgcggcagagggtgaacggcagaccgggcaggtctggttacagggatttgttctggactcctcctgcactatcaatatgcaggataaatatcaacggattgaaataccgcaagttgccgccaccgcattatatcagcgcggatacagtccggcctttgcctttgctgtccggctggaaaactgtctgttgtcagtggatgacaaaaatctgcggataacctttaccggaccttcggacagcaacggattgtttgcagtcagcggggaggcggaaggtgtcgggattcagctcagccgggaagagggttcggtgatcataccgggaaaagcagtggcactcccggatataccacagacaaaaaatatcacactgaactaccggttacggctgattgctgatcgcaaatcactgaaaacaggggcataccggtcgactgttaatttcaacctggattatttgtga

SEQ ID NO: 277175 - DNA, 525 bp, Morganella morganii
gtgaagatatccatcccgtgtatgactgtgctgtgttccggtctgctgatgtgtgcagcggcacacggcgcggatgttgaagtaaaaggacagctggtgtttgagccgtgcaccttgtcgcaggcgagtgaaaatatcactctgtcgttcggcacgatagtcaaaaactatttttataccgcagaccggacaccgccggagccgttcaccattgagctggaggggtgtgacacctccattggctctgacgcctatatcactttccggggtgcagaaagtatcgcattgccgggactgctggtaccggataacggcacacttcccgggcttgccatcggcattgaaaccccggaagggaagccgctgccgctgaataaaaccagcccggtatatgccctgagtgacggcacaaccacgctgaattttcagggttatgtacaggcagagccggatgctatccgtgataagacgctggtgaccggtgatttatcagcgacagccacatttgaaatcacctatccgtaa

SEQ ID NO: 277176 - DNA, 579 bp, Morganella morganii
atgacattcataaaatgtgcgcatgctttattacttgctgcgctgttacccgcagcggtgagtctgacaacatttcccgcatcgggtaaaaccggtgatgaaaaccggctgaaaataaatatttcgggcacggtggtggccaccggcaagtgttcatttgtgaattcccggccaccgaatatcaacttcggaaatatctattattcctcagttgccggtgtgaataacataaccggaagttataccggaacgctcgacacccgtatcgcctgtagcggtgataccgccggccatgcttttttccgttttcaatcacgaagcggaacaccggtgaattacgacggccataaattattaccggtttcggtcaaagattcagtgatatcgacaaatgaaaacttgggtattcgtttgctggtcaacggaaaaatacaggatgtggatactgacttcagtgtggatctcgggaacatgccaaaactggaagtggaattggttcagttgaacccggatgacaaaacctgggaaaacggattaggaattgtatcacatgccatattaacactgagttttgattag

SEQ ID NO: 277177 - DNA, 504 bp, Morganella morganii
atgaaaacaaaaaaaaatatgttactgatgttatttgcaatgatggtgacattatcttctcaggctgagcagaaaggggacaccagaccatacaccatgaccggcatattacgcgccatgactatttgccatgtaaataatgaccagataattaccgccgattttaaaaacgtcggtatcaataaactggaaacagaagtctacagtctgccgcttaattacacactcgattgtcccgggataaaaccggccaatatgctgcggatgacctttatggcatcccgtccgtcggcatctgatccgtcgtcgattgaaagcgatgtcagtggtttgctggtacggatactgaaagacgggcagccgcttgaattaaataaattcttcaaaatagatgatgctgcgcagccgccaaagctggaagcgcaactggtgaaagtaccgggtatcgatttaattcagtcaccgttccgcgccactggcacgctggtggcggaatatttgtag

SEQ ID NO: 277178 - DNA, 948 bp, Morganella morganii
atgaataaattaataattcgcggggcggcactgttttttctgctggtggtaactcagcaagttgcagccaaagggtgggttggtgctgaaataccttgtgttccggggggatgggaattagaagcggggtctatttgtgactggaagaatttcgtcggtgcccattacggtcaagggcaggttattggtatgagaacaaacactgataataccggagatgataaagcttatgtgccggtttccggaaattttgaattaaaagtttattggtgttctcttccgaaaaatatggatacctgtagtaaatccagcggaaccttattgatttcaggcggggtggttagattagagtcaagtatttcactgagagatcaattaattattacaggcaataaaacaataaagtctccatcacagggaggatattgtattacgctggaagatgttaataccggatatgaatataaaggcaacatgggatatggccctgacggacgaggtaagttctgcgaggatgctcataagttacctgtcgagcccccgaaatgcaccctgaacggcggtacggatctggatgttcagctggggcaattagagcgtggtgacattccggtaaaatccggtacatcatccgctatggtgacaaaggatatttcggtcaattgcgagggcaatattgcctacaacgccaatatgaaactggaattcacaccaatttccgtcagtaatgaacaggtgatcagcacgtcaaccacaggtctgggtgttgctgtgttatataatggcaggacggttcagccgggacagacatttccgctgagttatcagcccggtattcataccctgaagctgggttttgaagcagtgcgtgacccggctgttgcggcgacagacctgaaaaccggggattttacggcgaatgctgttttggttttcacggagcagtaa

SEQ ID NO: 277179 - DNA, 330 bp, Morganella morganii
atgacagatattctatatgattccgatatggcatcggtaaaccgggctgtcggtggccggcttttttgcagacgaaaagcgctgggttattccggacagcagattgcggcctgtctggggatcagtcagcagcaattatcccgttatgaacgggggcaaagccggattaatgtcggcctgctggtcagggcagcagatattttaaagacaccggtcggctggttttttgccgggtgtcaggacaacgctttatatgaagaaagtctcagtgttcagtctgatatttatacagcggcatcagtgacatcaaaatcagaatatctcaactga

SEQ ID NO: 277180 - DNA, 873 bp, Morganella morganii
atgtcaaaaattataccaattatttccactaaaggtggtgccggaaagtcaaccaaagccggcaatatcgcgggtttttgtgctgatgcagggttgaaaaccctgttgatcgacggcgatcattcccagccgacagccagcagtctgtttaaactcgaatatgaagcgccaaacggcttgtttgagttgttaatgcaactgaccgatctttcccggtcggataccatcatatcacgctccgttatccctaatctggatatcatcatttctaacgatccgcatgatcgtctcccggcggctatattgcatgcgcctgacggcagaatgcgcctgcgtaatattctgcaacatccgttattcgcctcttacgatgtgattatcattgattcaaaaggcgcggcgtcggtgatgctggaaaccattctgttagctgccacagattacgctgtcgggataatcaaacctattttgccggatacacgtgaatttttacggggaacactggggttaatcggcgggctggttcctctgacggcttacggaattcccctgccggaaatacacattcttgctaattgtgttgaagatacggtgttagatcgtgcaacactgactgaattaactcagattattgaccaaaaagcgtacccctttgcagagtcgatttctctttcgttactgaaaacggctgttcccaaactggaaatatttaaaaatggccatgctcagggacaacctgtgcatcgtctggaataccggactcaacgtaaaacaccggcagccgcagtcattatgcatcatcttgtttcagagctgtttccagagtggaaaacccgttttgatgatgtgctgaaacgggaggttcgtccatga

SEQ ID NO: 277181 - DNA, 342 bp, Morganella morganii; identical to SEQ ID NO: 27125

SEQ ID NO: 277182 - DNA, 1353 bp, Morganella morganii
atgcataaaaagtcttcttctgcggtattacctgaaaccctgtactcgccagaggcggagcagagcgtgctgggcgggctgatgctggataatgaccgctgggatgaagtggcaccgttattacaggcggaggatttttgttccagagcgcatcaggaaatctggaagaaaatggccgctctgtgtcagataaacagcccgattgatttaatcacactcagtgatgtactggaaaaagacggcgtgcttgagcaggtgggcggctttgcatatctggctgaattatccaaaaacacccccagtgcggccaatattgtccgctatgcggaaattgtggtggagcgaagtcgtgcccgtggcctgatgatgctggggaatatgttatccacccagagtgtggcggctcaggcgaatattccggcgttatgtgaacaggctgaacagcggctgtttcagctgtcagaaaaagggcagtctgcccattctccgtcgttgctcgatatcctgaataatgttgttcagcatctggaagaggcattaagtgcaaaagggataaccggtacgccaacgggattcagtgaactggatgaaaaaacctgtggtttgcaggcgggtgatttggtgttactgggcgcacggccatcgatgggaaaaacggcactggcgctgactgttgcacagaatgccttgcgtctggcagaaaaaccggtcttttttttcagtctggaaatgccggcggaacaaatcatgcagcgcttactcagtgatttgggaaatgtcccactgacagctatccgcagtgcatctcttgaagaaaatgactgggaatatcttgggggcgccatgtcgcagattgccgaatggggtgagcgtctggtgattgatgataccagtaatatgacgccttccctgttacgtgcccgtgcacggcgttaccgccgtaaagtgggtacgccggggctgattattgtggattaccttcagctgatgcgcagtcctgaacaggaaaaccggacacaggaaatcagtgaaatctcccgcaatctgaaagcactggccaaagagctggggtgtccggtggtggctctttcccagttaaacaggcaactggagcaacgtgcggataagcgcccgacaaacggggatttacgggattccggctcactggagcaggatgcggatttgattttatttttgtaccgcgatgaggtgtatcacgaacactcaccggatgaaggtgtggcagaaattatcatcggtaagcaacggcagggtccactagggacggtgaaagtgcagtttaacgggacgtatacacgtttcagtgatttttctcagggatattatttttaa

SEQ ID NO: 277183 - DNA, 1650 bp, Morganella morganii; identical to SEQ ID NO: 27126

SEQ ID NO: 277184 - DNA, 621 bp, Morganella morganii; identical to SEQ ID NO: 27127

SEQ ID NO: 277185 - DNA, 591 bp, Morganella morganii; identical to SEQ ID NO: 27128

SEQ ID NO: 277186 - DNA, 282 bp, Morganella morganii; identical to SEQ ID NO: 27129

SEQ ID NO: 277187 - DNA, 1266 bp, Morganella morganii; identical to SEQ ID NO: 27130

SEQ ID NO: 277188 - DNA, 714 bp, Morganella morganii; identical to SEQ ID NO: 27131

SEQ ID NO: 277189 - DNA, 528 bp, Morganella morganii; identical to SEQ ID NO: 27132

SEQ ID NO: 277190 - DNA, 2055 bp, Morganella morganii
atgaaactatttttatgcgaaaaaccgtctcaggccaaagatattgcccgggtagtcggtgcgcatcagcgcctggataatttttttcagggaaatggcgttcaggtcgcctgggcaagaggtcatctgctggagcaggctgaaccggaggcttatggtgagcagtttgccgcgccctggcgacaaagtgccttacccgttattcctgagcagtggaaaatggtggttaaaaaagatgcggtttcgttgtttcggactataaagcagttgctcagtcaggcgacggaagtggtgattgccacggatgcggacagagaaggggaggtgattgcccgtgaattactggaggcctgtcattacagaaaaaaggtgcaacgtttatggttgtctgcactggatgaggcgagtatcaggaaggccttaaataacctgttacccggcgagaaaacggcctccttatattcagcgggattgggacgtgccagagcggactggcttatcggcatgaacatgacgcgtctgtttaccctcaaagcccgggaactgggttttggcgggatattgtcggtcggacgtgtccagactcccacactggccctgattgttcagcgggaaagagaaattacgcactttgtttccaaaccgttctggcgggtaaccgcgtctttacagcatcaggggattgtttttcaggcgcactggcgacctgctatgcaatattgtgatgatgagcatcgttgtattcatgttcaggcggctcaggcggtggcgcagctgtgccggcaggcaggcaaggcgacggtgtgtacggtaaatgaaacgaaaggaaaagcattgccgccgttgccgtttgatctcgggacacttcagcaggctgcctcaaaacgttgggggtattccgctgataaagtgcttgaaatcgctcagagtctgtatgaaaaacataaagccaccacgtatccccggacggactgcgggtatctgccggtgtcgatgcgtgccgatataccggttgttttaaacgcattatcacaaagtgatccggccttacagaatgtgctggcacaattgcagccggcgcgtatttcccgggtctggaatgatgcaaaaattacggctcaccatgcgattattccgacccggcatacaccggatttaaatgccatgaatgaggctgaactgactgtctacaaacttatccgtacgcattatcttgcgcagtttttgccggatcaggaatgggacgcgacagaggtgtttttagatatcggcggacaacaatttgttgccaaaggaaaagtggaaagggtgaagggctggtctgtattatttgtgaaacatgaagacgatccgtcagtaaaagaagaggcagaaaccggacaggaagccggaacggaaacattgccgtctcttcatgaaggcgaattcttcgtggtacaggaggcaaaggttctgcaactggcgaccacaccgccgaaaccctatacggatggtacattgattgcggccatgaaaaatgcgtcatcttttattgccgatccgacattaaaaaaagtgctgaaagaaaatgcggggctgggaacagaagcgacccgggcggggatcatcaccacgctggaaaacagaaagttgatagtcaggcagaaaaaaacgctccgggcgacagacactggctgtcagctgattgatgccctgccggcagtctgtacggatccgggaatgacagcgttatgggaacaatcactcgaacaggtggcacagggaaacttgtctctggatgtgtttatgcaaaagcaaatcagctggctggtccatctcattaagaaagggtcggaaatgccgctggcactggatctgccgccgatgccatcctgcccagtgtgtcagaataagatggtattacgggaaagcagtaaaggacgtttctggagttgtcagcattatccggattgtaaagggagtgtaccattaccagaaaaaatgcagggcgtcacacgggtggttaaaaaaagaaagaaggcagtgaagaagagcataacaggactctttacctga

SEQ ID NO: 277191 - DNA, 468 bp, Morganella morganii
atgacaagcaaaaatacggcaacatctgaaaataaatactttaatcttcatgtgaacgggattgggtatttatcgaatatccgtcaggttaacggccctaaagggcagtttttaaccgcagtgattaatgcactcagtggaccggctgataaccctgtgtatgttcgttttgatacgacagtcgtcggggagaatacggtctcactggtcagacggtgtattaaagcggtggatgaggacaaaaaagtcctgaccgggtttacattaagtaatctggcctccgatattttcaccctgacaaaaggtgaacatgccggagaacagcgggtcagcctgaaagccaggctgctgaatattgactggattaaaatcggtaaagaagtggtctataaagccgagaaaaaccagtcaaccccaccggggaatgagcagcctgcatccagagagtatgcagctgattctttttag

SEQ ID NO: 277192 - DNA, 960 bp, Morganella morganii
gtgactaaaaatacacaacaaccggtacatgatgcgttatttaagcagtttttaacgcatcctgagaatgcccgggatttttttgcggtgcatttgccggctaatattctgcccttgtgtgatttaagtacactgcgcctggagccagccagttttgtggagcaccggttacgtcagctgcattcggatgtgctgtattccgtgcagacaacggaaggggaagggtatatctactgcctgatagagcaccagtcaaaaccggatcggttaatgggttttcgtctgatgcattatgcgatgtcagcgatagcgcatcatctgaaaaaatcgccggcggataagacactgccgttggtggtgccgtttctgttttatcagggcagtgtttgtccttatccgtacagcatgaactggctggacgggttcgcggatccggcgctggctcagcaactgtatacccggtcatttccgttagtggatttgagtgtgctcagtgatgaggaaatcctgacacacaagggtgttgccctgctggagctggttcagaaacatattcggacccgcgacggtttaatggcggtattgccgataatcgcgcagataattaactcgcaacacaatacggttgaccaggtgaggagtgtgatagaatatattgcctatcaggggtatattctggatgaatcccgctttttcagccaattgattgcactgtcaccggagtataaaacgatgctgacaacgattgcagaacaacttgagcaaaaaggtatcgaaaaaggtatcgaaaaaggtatcgaaaaaggtcgtgaagaaggtatcgaagtaggtatcgaaaaagggcgtaccgaagccctgattgcaatgacccgctcattattacaacagggcgttgatctgaacattattatgcaatgtaccggattgacccgggaaaagattgagtcattaaaacattaa

SEQ ID NO: 277193 - DNA, 663 bp, Morganella morganii; identical to SEQ ID NO: 84803

SEQ ID NO: 277194 - DNA, 720 bp, Morganella morganii; identical to SEQ ID NO: 27133

SEQ ID NO: 277195 - DNA, 744 bp, Morganella morganii
atgaaaaacataagatgcgtggttttattgggcgggtgtctgatgtccgcaccgctgacagctgcacagtctgtttccgggacaacccaaccggttcagattgaggcggggaaatcggctgagagtcagactcagtcattgcagtatgaggcgcgggaatggggactgagtgcagaggagtatgcccgttttgaggcgctgatgaaagggcggcgcggtattcagtctcccggactggatccgctgacgacactgggcattgaggcccggtcagatgaggagcgccgccggctggctgaaaagtgggtacagcaggaatttgcccgggcggaaaaagagctggcgtttcagcgggaagtggatgcggcctggaaacggctttatggccagatattaccggtcagtctgggaacagccggcggaaccgccgggatggtacagggaacagcacagcgccggcaggcgttgtttgtgcaggcggaaaattgtagtgcgtgtgatgtccgtctggccaccctgctggccggcaaacagccgtttgatatttatgtgctgggcacaaagggggatgataaccggctgcgagcctgggccagacaaaaaaatatcccggcagagcgcgtcagaaagcgggaaattacgttaaatcatgatggcggtctctcgcttcagtacggactgaccaccacaccggtggtgatgcaacagttaccggatgggcggtggcgtccgctcacaccttaa

SEQ ID NO: 277196 - DNA, 639 bp, Morganella morganii
atgcgtaaaaattccctgctcatgcttgtcctgctgctgttttccgtgccgttaccggcgcgggaggtgccgccgggctaccgtgaggtggcccggcaggagaatgtaccggcagaagcgctgtattccctggcactgacggagtcatcctggacattaccggcacatcacccgcaggccggtgaaatccatccctggccgtggacgctgaatgtggccggtaaaggataccgttatccgacacggcaggccgcctggcaggccttacaggcatttttacagacgacatcccccaagcgcatcgatgtgggcattgcacaggtcaatttaggctggaacgggcatcacttccgttccacctgggaggcctttgatccttataccaatctgcatgtggcagcccgtattctgaagcactgttatgacgcgtcaccgggcagctggctccgtgctgccggctgttatcaccatccggcgggcggtcagcccgccacccgttataaaggtatcgtccggcgtcagctggcaacactgacgggcggtacccaacctgtccccgctcatttaccagtagccattgcagaacgaccggtatcgtttgtgtggatagaaccggagaacaaaaccaatgcgaaataa

SEQ ID NO: 277197 - DNA, 555 bp, Morganella morganii
atgcgaaataattctgaagaaaagacaacgcgtgccttttatcccctgtccgtcctggggatgctgctgttttgcgttaccggcggcagtcaggcggcgttaacggtggtggcggattatggcgggcagtcgaccgcgtctttttatgacgcaatcaataatgccccgaatgaatggacaacaacgccggcgtcccgccccctgccgtccatgatggctccatcaatggtgttgccggttgagacaccggaaatgacaccgggtgaggtggatgaccgcgcgttgcatttaccggggattggggctctgtatctggtgggagatgatccgttatcccgggcctggctcactcagcatgccgcccggctgaaggcaatgaatgcggccgggatggtggtgaatgtgaaatcggacgccggattacagacgcttcaggcgctggctcagggaggactgctctccccggcatccggcaccgatttggctcaccgtcttcagttatcccattacccggttctgatcacggaaaccgggctgacccagcaggtgaagtaa

SEQ ID NO: 277198 - DNA, 198 bp, Morganella morganii; identical to SEQ ID NO: 27134

SEQ ID NO: 277199 - DNA, 2148 bp, Morganella morganii
atgagtgatcgttatgtgatagaggcctggctgcgaccggccgtggaattaaacagtgccctggtgtccggcggggcggcgtttgtgtgtgcggtggccccctgggctgtggcattgtcgccgtccgtgagttatgtcaccgccggcgcgtttgccggtttttccgcactgcgtgcgcatcagggattccgggtcttacgttaccgccggaatctccggcgtctgccccgttatcaggtgacctcggcacaggtgccggtcagccggcagcgtctgtttctgggaaaagggtttcagtggcagcaaaaacacacacaacgcctgctggaaacccggcgtccggaagtggagcggtatgttcagccgccggtacattaccggctggcccggcagtttgaactccgttttgaatcccgtttcccggcggtttgccggcttttgcaaaaagacagccggctgaatccggtccgtccgttgccaccagtgggaggagatccggtgttacacggtgtggagccggatgaagtgaatgtgaccatggatttgcgtgaacgggtcggtcatatgctggtgctggggaccacccgtgtcggcaaaacccgtctggcggaagtgctgatcacccaggatatccgccgtgggaatatcacgattgtttttgatccgaaaggggatgcggatttgctgcgccggatgtgggcggaagcgcaccgggcaggacgcagtgaggagttttatgtgtttcacctgggctggccggatatcagtgcccgttataacgccatcgggcgttttggccgggtatcggaagtggccggacgggttgccggacaattatccggcgaagggaacagtgcggcgttccgggagtttgcctggcggtttgtcaatattattgcccgggcactggttgctctgggggagcgtccggattatgcgaaaattttacgttatgtcaccaatatcggggaactctatcagacgtattcgatgcaggtgatcaaagcacaactgccggatttgtttgcccaaatcgagaatgcgcagaacgcgctgacagtcgaggatgtgccccgtcatctgcaaagtgatccgaaagccgtggcgatctgggcaacagagctggcgttaagcagtgagaaagggaaaaaaatctatgatccgattctggacgggttgcgcagtgcgatccgttatgaccggacctattttgataaaattgtggcctccctgctgccgttactggaaaagttgactaccggaaaaaccgccgctctgttatcgccggattacaccaatatgcaggatccccgtccgatttttgactggcagcaggtgatccggaaaaaagggattgtgtatgtcgggctggatgcattatcggatgcggaagtggcggcggcggtgggaaattccatgtttgcggatttggtctcggtagctgggcatatttataaattcgggactcaggatggtctgccggaggaagggcacgccggaaaattaccgatcagcctgcattgcgatgagtttaatgaactgatgggggatgaatttattccgttactgaacaagagcgggggcgcggggattgaagtgacggcctacacacagacctggtctgatattgaggcccggctggggaatgccgctaaatcggcgcaggtcaccggtaactttaacaccctggtgatgctacgcgtccgtgaactgatgaccgcaaaattactgacagaacagttaccggaagtggatatttacaccaaaaccctggtatccgggatcaccgatatttccaatccgggacaggggagtgattttacctccaatacccaggacagggtcagtatggtggcgaaacccttactgttaccggcggatattattcagttaccgaaaggacaggcgtttgctctgctggaaggcggaaagttgtggaagatccggatgcccctgccggcggcggaggacgatgcgctgatgccaccggatttgcaaaaaatcgcacagtatatggagaaaaattaccgtaccggcgaaacctggtggacagccgcgtcattttcagatgcgcggcctgatacagacggaatgaaggtgacagaaatgacgccggatacggaaggaggcaacgatggcaacagctga

SEQ ID NO: 277200 - DNA, 759 bp, Morganella morganii; identical to SEQ ID NO: 27135

SEQ ID NO: 277201 - DNA, 549 bp, Morganella morganii; identical to SEQ ID NO: 27136

SEQ ID NO: 277202 - DNA, 606 bp, Morganella morganii; identical to SEQ ID NO: 27137

SEQ ID NO: 277203 - DNA, 327 bp, Morganella morganii; identical to SEQ ID NO: 27138

SEQ ID NO: 277204 - DNA, 240 bp, Morganella morganii; identical to SEQ ID NO: 272469

SEQ ID NO: 277205 - DNA, 369 bp, Morganella morganii; identical to SEQ ID NO: 27139

SEQ ID NO: 277206 - DNA, 417 bp, Morganella morganii
atgcagaccatcgattttatgccggatcgcttaaatgcggaacccaccgtctttcgcggatttaccacccatgaaatgtttgcggctgccggcgtcggttgtgcgggcgggttcgttatctgtattccgctgttaccgctggccggctgggttattctgccgaccggggcactgattatgccgttggtcgtggtatttttcggcggcacctttctgacccgcatcaaacgcggaaaaccggaaaattatctctaccgccggttgtcctggacgctgcaaaccgggtttgcccgcaccctgccgctgaccgggcggctgaccgaaacatccctgatcacggtgtctcagggctggtttttacgccggacgcaggcgatgtcactgtgccggtattttgccggaggccgccatgagtaa

SEQ ID NO: 277207 - DNA, 645 bp, Morganella morganii
atgagtaaattccgtcatgccctgcaaaaccgggatcagcatattctgaccctgcgggtgatctgcggggtactgattctctgcctgttggtggcgtttaccggctggatgcgggcgccggataaactgaccatccataatccgccggatttacgatccggcagtacgcgagcatggtgggaagtgccgctaccgacagtgtacgccttcagcttttatatttttcagcagctcaatgcctggccgaaagacggtgaggtggactatccgcgcaagattgcgcagctcagtgcctatctgacgccgtcctgccgggcgtattttgagaaagaggccgcttaccgcaccacgctcggggagctgaaaggacgctcccgggtggtgtatgaaatcccggggcgcgggttcagtgaggataaagtccggatgattgaccgggatcactggatagtgcgtctggatttggtcgcggatgaatatttcagcgccgagccggtcaagcgggcgacggtgcgctatccggtgaaagtggtgcgctgggagggggatccggaaagcaatccgttcgggctggccctggactgctatgacgggacacctcagcgtctggaagccgcggagcagaataaggaggccagtcaatga

SEQ ID NO: 277208 - DNA, 906 bp, Morganella morganii; identical to SEQ ID NO: 27140

SEQ ID NO: 277209 - DNA, 1500 bp, Morganella morganii
atgaaagtgacatccaatacgctggtcaaaattctggtgctgtctgccctggcgatggcggtgctgattggtatcaaaagctgtcaaccggagacaccggccggcaacggcgggcaggacagcctgtcccagtcgattaatgatcttgacccgggggagctgaagacgctcgggattgagggggataccccggccgatacgctgcggacgctgattggcaccatgaaaacggtgcgtgaccgtcaggcggagctgattgcccaaaacgagaaattgctggaagagaacacgcagttgcgtaaccggcaacaaaatgtctccggccagatacagtccgcagtggcctccgtccgtcaggaagcggagagccggcaacgcgccatggagcaggagcagcagacgctgatgcaacgtctggataccctgggggcgtcgctgaccgctccgtcaggtggtcaggcagcacagggccacggacacggcgatattccattggggctggggctggatgcccagggcagtgggctgacagtgaaagacgggctgttgtgggctgagccgcaggatgcacagccggctgaaccggggcggatggttaacggacaaccggctaaaccggcgtttccgacgtcctttctggaggataacgccattacccgtcagaaagcggaactggatcgggtggccaaaaatcagcgcacgctgtccggtacggcggacggtgaggcacatactgaaccggcttataccctgccggagaatgccaccctggtggggagtcaggcgatgacggcgttgctgggccgggtacctatcgacggtaaagtgaccgatccgtatccgtttaaggtggtggtgggaaaagacaacctcacggcgaacggcattgagttaccggatgtggaaggggcggtgatcagtggcactgccaccggtgactggacgttgtcttgtgtgcggggggatatcacttcgatcacctttgtctttacggacggcacggtccgcacggtgccgaagccggctgaccggacggacggcggcagtcaggccggcagtggacagaatgcccgcaataacggcggatcgctcggctggatctcggatgagagcgggattccgtgtatcagcggtgagcgtaaaaccaatgccggcacctatctgccgaccctgtttgccctgacggcagccgcctcggccggggatgcgatgtcacagagtcagtataccgcgcagaacaccggttacggtatcacgtccacgctctccggggatgcggggaaagcggcactgggtagtgccatcggcggcgggtttaaggatgtggcggactgggtgaaatcccgctacgggcagacctttgatgcggtgtatgtgccaccggggcagaaagttgcggtgcatatcagccgtcagatcccgattgattatgaatcacagggacgccgggtgaactatggcttttcactgacagagggtgaggaaggaggtctggagtga

SEQ ID NO: 277210 - DNA, 486 bp, Morganella morganii; identical to SEQ ID NO: 27141

SEQ ID NO: 277211 - DNA, 423 bp, Morganella morganii; identical to SEQ ID NO: 27142

SEQ ID NO: 277212 - DNA, 2859 bp, Morganella morganii
atgggattttcattattccgctcacgccggaaagcgaaggtggtttctgctgaaaaaacggctgacaaagccgtacaccgccgtaaaccggcagagaatgccggtttagcccgtcagccgctttcccgtcctgggaaaatgacccgggcggatgagcagaagatttaccacgcgaatccgtcttttattgattacctgccctgggtggaatttctggatgaggagcaatgcctgctgcttgatgacggggtgtcggtcggggcggtgtatgccgttgagccggcaccgacggaagggcgctccggtgaccgtctgctggaaatccgggatgcggtggaggatgcgcttcaggacagcctggatgagcatgatgataacccgtgggtggtacagtttttttgtcaggatgaggacgacgtgagcgtcacgctggccaccttgcgggactatatcctgccggcggcacggggcacggcgtttaccgaagcctggctggccgaaatggcgcgtcatttgcgggggattgcccggccggaaggattgtttaaagacacggaggtgaccgggcaaccctggcgcggtcagcaacgccggacccggatggtggtttatcgtcgtctgggaagtgcgtatgccgatccgatgccgccggtggcgatgctcaatcagatgtgtgaccgcctggtcagcagtctgggcagtgccggggtgcactgtgtccgtcaggacgggaggcaggtgcatcagtggttgctgcgtcatttcaatccggcgccggactgggtggataaagacacattgtaccgggaaggcgcgtactggccggcagcagaggaagccccgggcactctgccggtgctgaaggattttgcggaaacgctgtggtttaccccgccccggtcggatgtggaaaacggggtgtggtggtttgataacctggcacacggcgtggtgaacatcgaaaagctgcgtaaagccccgggccccgggcacctgaccggagagcagaagcgcggtgacaaaaatatcaatgcgttgatggatctgtttccggaagggacgatggtgtcaatgaccatcgtcactcagcctcaggatacgctggagcaggaatttacccgcctggggaaaaactcggtgggggaaaacaccgaatcacagcgtacccgccgggatgtggaaaccgccaaaagtttactggggcaccgccataagctttaccgggcctccctgtcattgctgctgcgtgccgggtcggtggaggaactgaacaaaaagcgcgtggatctcaccgccacgttgctgaatgccggtctggagccggtgaaaccggaatacaatgtggcgccgctgaacgggtatctgcgcgctctaccgatgtgttttgatccgcagacggataaaaaacactggtatacccggctgacctgggtacagcacctggccggattactgccggtgaccgggcgcaccaccggtaccgggcatcccggctggagtttctttaaccggggcggcggggtgctgacctttgatccgcagaataaacaggatcgtacccagaatgcccatctgttgttatttggtcccaccggggccggcaaatccgccaccttatgtgcccagttatcgcaactgatggcggttcgccgtccgcgtctgtttattgcggaggccggaaactcgttcggtttactggcggattattacgccagtctgggcctgagtgtcaataaagtcagtgtcaaacccggcagcggggtgcgtctgccactgtttgcggatgcgcatcagttactgaatatggatgaacgccgtctggcgctgaatgcggatgatctgccggatatggacaccggatcggaagaggatgaacagcgagacattctgggagaaatggaaatctctgcccgcatgatgatcaccggcggggatgtgcgggaagaagcggaactgaagcgggctgaccgggctctgatccgacgggcactgatgatgggcaccaaagcggcttatgccgccggccggcagatgctgccggcggatttgcaggaggcattgtatgccttgtcacggggggaaggcgaagaggaagggcgggcattaaatccgcagcgccgggcgaaagcggctgaaatggcggaatctctgggcatgtttaccgaaccgggcagttttgagcatgagctgtttaatcagcccggggaactgtggccggaggcggatgtgaccctgattgatttggggcatctggcgcgggaagggtatgaggcccagatggcgctgacgatggtgagtcttatcaactccatcaacaacattgccgagcgggatcagtacctggcgcgggacattaattttgtggtggatgaggcacatatcgtgacggtcaatccgctgttgtccccctatgtgaccaaagtggtgaaaatgtggcgaaaactgggggcctggctgtggctggcgacccagaacctggatgactacccggactgtgccgagaaaatgctcaatatggcggagtggtgggtgtgtctgacgatgccacagaaggaagtggaggcgattgcccgttttaagacgctcagtgaggagcagaaacaggtgctgttatcggccagtaaactctccggctgttacacggagggcgtggtactggcccggaaagtggaggccctgttccgggtggtgcagccgagtctgtacctggcactggggatgacggaaaaagaggagaagcagcaacggcgtgtgctgatggaacgctatggatgcagtgagctggaagccgcgttccgggtggcggatgagcttgaccggaaacggggattaccgtcccgcagaagggaatgttgctaa

SEQ ID NO: 277213 - DNA, 1794 bp, Morganella morganii
atgaaaactgcggaatacaaattagcgggtttagtcgtggttgtcagcctttctttattctctggaatgggggttgccggggatggtaatgaacgaaatacccatcaccggtttgacccttcaaaaaatattaactgcggtagtaatggatattatgaaacgggttcatggcgatgtgtgaatgaggggttgaattatttaaacaacaaaacaaaagccttttcggctgaaaagctcactgaaattaaagaagaagcgattaagtctgggttagatgcggcgaataaagctatacaagacgcgaatgattttaccggtaaaaaagtatcagagagcaatgcacggactgacagcttaatcagcaaagagcagaaagcacggacagacgcattgaatacagagaaaactgttcgcgaacaggcggatattaacaccctcaaaaatgcaaaccaatataccgacttaaaaatccaggaaaataacgagttactttcagcggatattgagcaagccagaagtgactttgatgacaatcttaaaacaacaaaagcagcgttagaaaacaacatttctgatgttaatcggtcattaacaaacagtgttaatcgggcgaaaaaatatttatccgataatctggataaaacccgtcatgacctgagtgccagtattattgccagtcagaatgacagtcatcttcgcactgacagattgatcagcagagagcagaaagcacgtattgacgcattaaatgcagaaaaactggctcgggaacaaggtgatgccaataccctgacatcagctaatcaatatactgataaaaaagtatcagagagcaatacacggactgacagcttaatcagcaaagagcagaaagcacggacagacgtattgaatgcagagaaactggctcgggaacaaggtgatgccaataccctgacatcagctaatcaatacactgataaaaaagtatcagagagcaatacacggactgacagcttaatcagcaaagagcagaaagcacggacagacgcattgaatacagagaaaactgttcgcgaacaggcggatattaacaccctcaaaaatgcaaaccaatataccgacttaaaaatccaggaaaataacgagttactttcagcggatattgagcaagccagaagtgactttgatgacaatcttaaaacaacaaaagcagcgttagaaaacaacatttctgatgttaatcggtcattaacaaacagtgttaatcgggcgaaaaaatatttatccgataatctggataaaacccgtcatgacctgagtgccagtattattgccagtcagaatgacagtcatcttcgcactgacagattgatcagcagagagcagaaagcacgtattgacgcattaaatgcagaaaaaactgcccgtgaacagggggatgttaccacgctcaataatgcaaacaaatacaccgatcatcgtattcgctcattaggtttaaatgtttctgatgcgttaaatgattttcaacaaaaaacagatcagaaatttgctcatctcgataacaaaattggccgtgtggaaaaacgggccaatgccgggattgccggggtgaccgcgatttccaccattccgtatgtgaacagtgagcgtttttcgttcgggatggcgatggggcattaccgcgatgcacaggcgattgccaccgggatgcagtataagccaacggccagtacgaatgtccgcctgaatgcgtcatggaataccggtggcgataccagtattggtgccgggtttgcggtgggctggtag

SEQ ID NO: 277214 - DNA, 441 bp, Morganella morganii
atgaaaaaacgatttttatcccttcccgggatactgatgctgtcgctgtcatgcctgccgtttaccgcgggggcggcagtggtgctgtataccacgcataatgacgccctgccgcagacggacatcccgtttgaggtggtgtatctggatgcgcctgagcgcttgctggatgaggtcctgcttcagccggggacggaactgagtgaagcggatgctccgcacatcaccgccctgttacaaagtccggcctggcaggccagagaggcggcattacggcaggcttatcagggggttattcaggcctgggagctgggggtgacccgtctgccggcggtggtggtggatgcgcagtgggtggtttacggcaccactgatattgagcaggctgtgacacagatacagcagtaccgggaacaacaggaaggaggaggtcaaccatga

SEQ ID NO: 277215 - DNA, 975 bp, Morganella morganii
atgacccgacaatcatatcgccggcgtctggcaggcgtactgttactggggtgttcactggtgccggtggcggaagccggactgaataccgccaccctggtcgcgtctgcggcctcgccgtcgtgtatcagctggcgtatcagcgggatttgttactggctgaaatgcggctggggcggctgccgtatccgcacgtcagtccgggtgtcgcattttattccggaggcggtggtctcggcctaccatgccccgggcgaaaacccgtggcaggaaatgtcactggtcagcggggcggccggcgggattgaaaatgccgtgaccggcgtgctgagcggcgtgtctgccggcggcggaaacagtgagcagaagtttgaggcaaaacgtaaaaccgatctgcactttttttatgcggatgccatcggtcatccggcaaccacccttatcggcggcagtatcccggggtattcctgtgacagcgcggccacaccgctgtttccttattacctgagcacgctcgacagtgtgccgtggcgactgggtgtgccggaaatggcgtatccggaagccctgatccccgggaaacgggaaatcgggtcacagcaccggggcaatatgtggggaaatctttatccgcgcagcggttttgtcacccagcaggacggagagaaagcagcagccgtggtggcgcagcgcgtggcagacattatcacccgcactggtcaggtgcatacctatgtgcccctgaaaggaaaccgccgggatggctactggccgccggaggcagtgacggagaataccggcacgaaaaaccaccaatggcagcgtctgtcaccggggctgaaaaaccgctgtgcggtgtttccggatgagagcggcccgcaggcgcaggacggcaattatgcctgggcactgtggcagccgtacagctgctgtaagcgcatggggcaaaaatttctgtacagcacaacgttttaa

SEQ ID NO: 277216 - DNA, 1446 bp, Morganella morganii
atgatgaaagcaaaacgacacactttttttccgccggcgctgacactgatggtgttatgcagcgtaccggcattttctgcccgggctgcgatggatttttccgtcggcgcgaatgatatcggctacggtgcgaatgtctccggcgcggtctctgacaaactgtactacaacctggggggtggcacggtgttatcccagccaccggggcgcagtaatctgcaacgtctggggatgagcatgggctggaacagtgatctgatgtgcggcaattttgatatcaaaaccaccgtgggcaatcagctgaacggggtgacggccggctttaagaatctgatgagtgaggtgatccagaatgccaccggggcggtggccagtctgccggcgatggctatccagcgggcgaatcccggtctgtatgaaatgttgaccaacggggtgttgcaggccaatgtggcgtttgataaggcgcagctgagctgccagaacatggccaaacggatgatggatttttccgagaacaatcagtggacccaggcggcaatacttgaagaagccagaaacatcatcaacagcggggatggtgatgcggtcgggacgatgaatcaggtggaaaaaaagccggacggtaaggccggcgtgccgtggataggaggggagaaacggggcggtgcgggtcagaaagccattgtgccggcgcaggattttgcgcaggccggctttaatatcatgaacggtctgccggcaaccagcacggcttcggtgccggccggccagtgtaccggggcggcgtgccggcggtttaccaacagtgagcaggcggctcaggtggtgacacaggtgctgggcagcaaatcggtccgcacctgcaccaatccggcggattgtcagagcggcggtgaggcaaaccagccgggcagttcccagccggggaccgggctggcgccggtgctggagaccattacccgggaaaatctggaacagttgcataaactggtgaacagccggggtgcggtcagtgcggcggatttggcgaaactgaaaaccggcagtctgacggtctcccggggcgtgattgaagccctgcgccgggatccggataaaacggcattaacgcagcgtctggccggcgagctggcgatggcggatacgatggagctggcgctgacgatgcgccggatgctgatcaccggtcagggggaaccgaatgccggtaattttccgaaagcccaggagatcggcaaccagtcggttgaccagctggatcgcgaaatcggaatgctgcaaacggaaatggaagtgcgtaaatccattgccaataatgcgatgctgacggtgattgagcgtgatcagcaacggacacaggcgaatccggccacgcagacaccggataatacggatgtgcgtgtacaggggctggagcaaaacagtgacaccggaggacgttaa

SEQ ID NO: 277217 - DNA, 339 bp, Morganella morganii
atgacgaaaggaaaaaacgtgcgccggttatggccggtactgaaagtggccgggctgaccttccttggtatggtggtgttgctggctgtggctcagctggggctgagctattacgatgaggcggacagtctgcgccgggcgttttaccgtgcccgctggttctggctggtctggcggtgtgtgttgtacggggcggtggcggccggattatggaaactgtatcaccacccgaaagtcagcgagacggcccggcgcagtctgaagcgcagcgggctggcgatggcggcctttgtggcggtgagtgaatggtctgtttgggcgggaggtgacggcttatga

SEQ ID NO: 277218 - DNA, 1515 bp, Morganella morganii
atgatgacaaacagctatctcgagtattttctcaccctgctggcctgggtagtcaataacggattgtggtcggtactgaccagcaccgggctgtttgcgctgccgctggcctttaaagttatagggatctggctgaaggtgcgggaagagggggaggatgaaggtaacaaaggctcgctggcgattgtgcgcatcgagaacgccctctacggggcttttgtggtgatcctcttttgctgtgtgccgttgatggaggtgagtgtcagcacgctgcaatttgataccagccgggccaaaacctgcggcagctggacaccggtgaagccggaggagtccggttacagcggtgtggtgtcatcactggataatcagacagccaaaatcccgctgtggtggatgctggtgcataagctgtcaaaaggggtgacacaggcggcggtggccagcattccgtgccggccggatttgcggcaggtgcgttttgaggtgcagcacagcaatatccgaaatccggcactggccgccgcactccaggattttacggatgactgttactcacgtgcgctgtatgactggaaagcgaaagatcagggaaaaacgcaggatgagaaaacgttgcaggatattacttggattgggtcggtgacgtttatgaaaggggaatatcatcagatccagtcccggacaccacgggcgggcttttcctgggatgccggccgggatgacgggtatgcgaatgtcaacggtaacggttacccgacctgctatcagtggtggaatgatgcaagtgcagggttactgaagctcgtcaaagagcaggcggatgaagggatgtggttacgtgcccgagctgcgatgaagctgattaataaagactcgaaagagtttgaggaggccatcgtccgccggctggtgagtccggctaacctggatgtctccggtggtcaggtataccggggctacggggggaatgcggatatgacggtgatgaatgatctggcccggatgggcggtgtagtcggtacttcagtggcttcactgggggcattccctgcctttgatacgatgcgccagtccttaccgatggtgcaggggctgatgttaatggcggtgtatattatgatcccgatggtgctgatgttttcggcgtatgaatttaagacggcgataacggtgacgtttgtgatatttgcgctgaattttctgacgttctggtgggagctggcacgctggatagacagctggatgatggaggcactgtataattccgatacgcacagccagtggaatatgaacgggatccagaacacgtctgatgatgtcattatgaacctggtgatgggaacgatgtttttggtgttgccggcgttgtggatggctggattgggttgggctggttcaaaagctggggtaggtatatcgagtatgatcaattcaggtgggcaatctgcatatgattctggaggtaagggagggaaaatggttgagcaagcagtaaccaaaaaaattacataa

SEQ ID NO: 277219 - DNA, 399 bp, Morganella morganii; identical to SEQ ID NO: 27145

SEQ ID NO: 277220 - DNA, 255 bp, Morganella morganii; identical to SEQ ID NO: 28990

SEQ ID NO: 277221 - DNA, 1746 bp, Morganella morganii; identical to SEQ ID NO: 27199

SEQ ID NO: 277222 - DNA, 10323 bp, Morganella morganii; identical to SEQ ID NO: 27198

SEQ ID NO: 277223 - DNA, 381 bp, Morganella morganii; identical to SEQ ID NO: 27197

SEQ ID NO: 277224 - DNA, 561 bp, Morganella morganii; identical to SEQ ID NO: 27196

SEQ ID NO: 277225 - DNA, 405 bp, Morganella morganii; identical to SEQ ID NO: 28994

SEQ ID NO: 277226 - DNA, 474 bp, Morganella morganii; identical to SEQ ID NO: 27210

SEQ ID NO: 277227 - DNA, 882 bp, Morganella morganii; identical to SEQ ID NO: 27211

SEQ ID NO: 277228 - DNA, 273 bp, Morganella morganii; identical to SEQ ID NO: 27212

SEQ ID NO: 277229 - DNA, 396 bp, Morganella morganii; identical to SEQ ID NO: 84814

SEQ ID NO: 277230 - DNA, 336 bp, Morganella morganii
atgtctatagaaaatttgagtaaaattgatttaattacagttacttgtgagggaatagtgccttcacaagtaatattagtaattacagatcatttacagtggtcagaatataccaatgatcatctatatcaattacaagaaaaaatcaataaatatattgagtttattgaaagtggagaaatgttggaaaaatatccagatgttttgggcaaggagattatgtttaaaatttactttaaatatagtattccgaatgaatgcatcgaatttataaatagagttagagaaattttgttgcctattaaaattcagctagcatatgaagaaaaaagctaa

SEQ ID NO: 277231 - DNA, 489 bp, Morganella morganii; identical to SEQ ID NO: 84816

SEQ ID NO: 277232 - DNA, 909 bp, Morganella morganii
atgtccagaagagcaaaagccctgtcccgtgaaatgcatatccttgcccgtcaggccggagggagctttaaaaccattgcagaccgggtcaaaattgcagaacgggttgcggcagagctggccgggctgaatattcagatacgatctgttgagcagctgaaatcccgtcatattgaaatgtacattcatgcccgcagagaacagaatatcagtttacgcacctgtcaaaacgaaatgtcggctatccgggcgatatttcgtgttgccggacgtcataaactggctgatcctagacatgagcgcctcagtaatgaggcgctggggatttcaggtgccagcagggctggcacccgtaccgcgatatcggacgagcgctttcacggagcgctcgcccggattgagccttatgatcagggagtggcattaaccatgcagttatcccgtagtctggggttgagaaatgaagaagccgtgcagtcagtaaaatcattacggacctggcaacaggcgcttaaaaacggtaaagatcgcgttcatgtggtttttggtacaaaaggaggcagaccccgtgaagcattagtgccggataaagcccgtgtattaacattaattaataaagccattgaatatgcggataaacataacggttatttaattaatcgtccgtcattacattcagccaaagatcgttatattaatgtgatgcgacggataggcggatttattcacgaagaatcaaatcatggtttacggtatgcctatgctcaggatgttgaaaaatattatctcagtcagggattcagtcaaaaagaagcttatgcattaacctccatggatttagggcatggtgacggtcgtggcgattatattaaacgggtttatagtcagaaaggggatattgaggaataa

SEQ ID NO: 277233 - DNA, 642 bp, Morganella morganii
atgaaagtctgtttaattattttatttattaattttgctttttgttttccgttaatggcgaagacattatttttaggtgattcgttaacggctgtttatgaaaagtccgcaaaatatgttttggatgaaaaaatagaagcagaatatgtttccggttcggggttaataaataaaagcaaaaaagactggatcgcttttgtgaataattttgatttgcgtgaatttgataatgtgattattagtctcggaacaaatgattttgttcaatatggttcggatgaacggcagaaatattacagtctggtatttcaattaattgctgaaattcaaaatgaaaatcccttagcgacaattatctggatatctccgccacatttaaaaaatccggaacatgaacattatttaatacatacccggcatataattaaacacagtgcgatgttattaaatattcattatctggatattaatcagcctcatatattgggtacacaatggcaacctgttattcatcatgaaactgtccggactgatgatggaattcatattacccgtaaagggggggagcgggtaatcagggaagtggtaaaaaatcctgaatggacaggattgacaaaggtagaaaaaatgactaaaaattaa

SEQ ID NO: 277234 - DNA, 363 bp, Morganella morganii; identical to SEQ ID NO: 27106

SEQ ID NO: 277235 - DNA, 438 bp, Morganella morganii
atgacgttatttaacctgatttatggcattgcccgtgggctgttctttgtggccgatcacgtctgtcgctattcccggggttgggaatggctgatgtggctggttgaggaagcccggacactgcgaaatgttgaggctgatttgaaactggctgaaaggtatgccggggagcaaaaccgtcctcattccgtttcgctgatgcagtgtacgctttatgatgccggatttgcttacggtagattattactatggcaggcggatggtctgatgagaccctggccggcatatttgcttcgccgtttaccggatatcggtcagcggattgatgcagcggtctggcagaaaggctgtgaagccggccaggatgagactgtcactgaatggatggcaatggagatggctgatgaatacctcatcggtattgaactgagcaattaa

SEQ ID NO: 277236 - DNA, 357 bp, Morganella morganii; identical to SEQ ID NO: 27107

SEQ ID NO: 277237 - DNA, 513 bp, Morganella morganii
atgggatatacacattattttacacaaaaacaaagcgttgaccccctgatgtggcagaacttccgtgaacatatggacaagctctatcaccactatctggccaatcctatatccgcagagcagatatgcggcggatacctggataaaatcatagtgttgtgtgatggtctgggtgaaaaccggctgaacgatggttcattattcaccgatgacggtgaggcactttgttttaacggcaatgcggctgatgatatgaatcatgagacatttattgtacagcgcgaaatccccgttgaggactactgggattgctgtaagacagcatacaaaccctatgacgtgtttgtggtggcggcattactgctgctgcacaacctgtgccccgggtatttttcggtctcttctgacggggataccctggactggcaaccggtgctggactatgtcagtaaggcattcccttatcttatcctgacgttaccggcaggcattgatgtgccggaggctggataa

SEQ ID NO: 277238 - DNA, 261 bp, Morganella morganii; identical to SEQ ID NO: 27108

SEQ ID NO: 277239 - DNA, 411 bp, Morganella morganii
atgggactcgatatttacttttatgccagtgaaaagcgcggtgcagacaaaagccggatacccggctcacgttatgcagaagcggacagcgacggcgatattgaagtcgggtatttccgtaaggtcaatgcattgtttaagtgggtgcatgaccatatcggggcttttgaaaactgtgaaaaagtgccggtgacagaggctcatctgcgggctttacagcaggatttgcaggcactgacaccggaaaactgtcagacacgttttccgaccacagagggctttttctttggttcaacagcttatgatgaggcgtactgggctgatgtggaagacgtcagacgctggctgtcagagataacggagacgtttgattttgaagcagagtcactgtgttttgtggcctggtggtaa

SEQ ID NO: 277240 - DNA, 975 bp, Morganella morganii
atgaaaaaatctgaccgtaaacgctgtccggctgcggataagcctgttcgcgatatttatcaggaagtgacagaccgtattgtgaccgcgctggaaaaaggcacctgcccgtggaaacggccgtggcggccggcagaagggacgggcaccggttttccggtgaacgccctgaccggtcatccctatcaggggatgaatgtgctgttgttatggttgtcggcggcagagcagggctttggttgtgatatctggctgacttaccgtcaggcgcaacaactgggtggttatgtccgtaaaggtgaaacggcgaccgataccgtgatattcaaaccgttgaacgtaccggcaaaagaccgtcacggtgagctgctgcgggatgaacacggtgaggtggtggtgacggagataccaatgataaaggcgaatccgttatttaacatcgcccagtgtgatgacctgccggcacatttttacgaaaaccggcgacaacccggagaggagacgacaggaataatcctgccggccacgcaccgggcactggatatcctgaatgccagcggcgtgaaggtgaccagtgcggcgcagaaccgggcgtattacagtccgtcacaggaccggattgtgatgccactgtcgtcacagtttgaccgggatgccgattactgggctaccttactgcatgaactggtgcacagtaccggtcatcagtcccggctggcccgtgaaggcattacctcatcgtccctgaaatttggtgacccgctgtacagctttgaggagctggttgcagaaatgggcagcgcttttctctgtgcgcagttaagcgttgagggagaggtgaatcatgaaagttatcttgacagctggctgcgggtactgaaagcggacaaaaaagcgttgttccgggcagccgggcaggcccgtcaggcctgtgagtttttactgaatacggccgcctcccgacaggccgcgtag

SEQ ID NO: 277241 - DNA, 294 bp, Morganella morganii
atggacaaaatcaccattatccgttttcagttactggtacatcagttactgaaagtgcattacgggattacgctgagtgataccggattgtctgatgatgcggaggtatcccggatgattgaactcggaatatcgccggtatcggcggtcaaccgtctggtggataaataccatctggagaaactgaatgcatcctgttatctgccggcatccccgtatgtcagtgataccgatgccttacatgcacaggctcaactgagcggtgccattaacccggatgtcatgcccggataa

SEQ ID NO: 277242 - DNA, 948 bp, Morganella morganii
atgccggcgcttaaacactggatatatgcggatgacgggatacccgcctggcagacggcgatagcacaaagtctgcatttgttgctggccggctgtgcggggatactgaaaccggtaaaaccgctgtcttttccgccgttaccggaactgacctcatacggggaaaccggccctgtttccccgggaaacaccgccttcacgcactgggttgagatgctgataaccgcaccggatttgacgccgtcatgttgtcagcaaatccatcagtggtatcagatgtggttatctgaaggtggggtgtaccattcctgggactcgctgacggcgatgcagaaagcgatactgtcaccgttgttatcggccggcagttttgactggctaaaccggtttaccggggaggatgagagccgggtggcgacagcctgggaggatattcagtatcttcgcggtacaggggaagccgtaccaatggatatgcggacattgttaccgaccagccttgcggctgaattacacggcttcaacggtcgtttatggaaaacaccggaagttatctggagacaggcgcgctggcaggcgtttgcccccggtaacagtacatatcacctttatcagtgtcgttatggtgtgaaatggccgaacggcagtggttttcgctgtattgatgacggggaggccaccacgctgtcagtgacgtttgatactccatggagtctgccgtcagcagaggtcttgtgtgctctgtctacgcgtttccgctgtcaggtccgtcatgtctatgccgaagaaggctgtggtttctgcggatacagcgagtatgaccatggccggttagccgaccatgaatctgatgagattgagtacagtgatgaagagaatgaggatggtttccgggatgtgacgggaccggactatattcttgattcattaccacattacggagggtga

SEQ ID NO: 277243 - DNA, 147 bp, Morganella morganii; identical to SEQ ID NO: 27109

SEQ ID NO: 277244 - DNA, 204 bp, Morganella morganii; identical to SEQ ID NO: 27110

SEQ ID NO: 277245 - DNA, 1689 bp, Morganella morganii
atgttaccgtggtttcgtaaatcgctttcccggaaagcggaagagaaaatattacctgtttccccgggaaacacgcaggaaaaagcattatttatccgtgacagtgacggtttttatttaccgcagtcggctgacatattgctggccacaccacagcgacaaaactggttacagcaaatcagccgggtggtggcgttaccggataaccagtaccgggcactttgcctgtctcctttgcagacgctggcagaacgacttcagtgtgtgccggcatcaaaaaccgggaaatatgccggcgaagggggcttgctggatttaacgctgaatacaacggattggtgtatgcggatgtcccagaaagagatgctgccccgggggcttccgtcggaagagcagagccggcagttcagtgcctggaatgtgtgcgtgttttataccgggctgttttactggttgccgttaaccgctcagtttgaggggcaactgaacagtctgtcatcgtggcagccggggatcagtccgccatcagagccgtatcgttttcgctttcatgagccggtgccggatatcacgcattttcgccggacaacaggggccatgatggctttccggctattaccggagaaggtgatccactggttgtcgggtacaccaaaggcgcttcaggcgttgtctgacgtggtgaccgggcaggtaaacggtgataatgatttacagcgtgtgctgaatgaggcactggctgcgtttgaagttgatactttgcctgatatttcgggttcaacaataaagaaagtgtttcccggggaaacaacagcggccacacagctcaaagagaatatacaggatatttcttcttcgggtttgatgagttcaacatctttgcatgatgacaaggtattttcgtcctcgttatcggtgccggctgcggtagatagctatgcttctgagtcttttaattcggatacagacaatcagagttgtgtgcaatcagccgtgcctgttgtacagcctgatactttagttaaaccggatgacgatcttcagtatgcgctggctttatccgggattctgtcttcagaaaataatgacagtgcagataataaggatgaagtgaatatggttgagaacactgcgctatcagaagttgcaaattgtgaaaacaagcatgatccccagatacaaagagatatcattcagaatcccattgagtcagttacagaaatcacagaaaagaaaactgtacccgggaatatcgtgaataccggtaaggttaataaagaggaagtagttgctgataatgtgtcgccggctattttagccgaagattttattacctggcttcatcattctttgtcggaaaagacattaccggtaaatattcccgggggattggttcattccattgcagggtatttatttttacgttcgccacagatttttaccttatatctgagtcggagtccgtataaatttgagcgatatactccggttcagcgtgcattcgagtctttacgtctgcacaggagaaacggaaaacaatcaggtggactggttcattgttgggttcagagtactgcatcatcagaggaaaaaacgagttggaaaaaaactgccggttatttggtaaaaagtcagaagttgttaccgggtgaggatcgggacgacagtttgtatattaagtttgaataa

SEQ ID NO: 277246 - DNA, 1050 bp, Morganella morganii; identical to SEQ ID NO: 27112

SEQ ID NO: 277247 - DNA, 228 bp, Morganella morganii
atggctcgcatgctttctgttttctttacccgccgcccgcgcttttcacatctgaataaaaaaaccaccgtttatattgacggtggtttttttgtatctgactcagacaatttcgctaaatcattcaatctgcagcaaggcggcaaagtgaggacatccggggagcatacaccagtatgtgacccgcgtggccgaacgaagccaacaccgctgcaggttgaaggatga

SEQ ID NO: 277248 - DNA, 840 bp, Morganella morganii
atgagaaaaacagttaccctgctggcgctctgcctgccgctgtccgcagcaatggcagacgacagcagttgtacggacgcacagcgtcagctgaaccgggaaaatacctatattatcaccggcctgtatctgaacgggccggtcaaatccgttgttaccacacgcaataacaaacaaaaatcttacggcagcagcgaaaccaccattacattgtcaccgtgcggtgccgtgacgcagtatgagcagcagatgtactatctgataagcccggacgtttaccggaaagaacagtacaaaacagatccggataatccgcttcacctgaccggcacagcagaatacaaatttcacggtaaacacattaattcacagacagacatcacccggacgataaatgataaaggacagattgccggctataccttactgaataaaaataccggtgacgatgaacaggaggatgccgttactgcccgtatcaattgggaaaacagccggctccacagtatggatgaggtgaaaacggacggagaaaaatcagaaagtctcttttaccgctatgattcacaaggccgcctgtcacacgtttcccgtggctccggttcctcagagacccgctttacttacactgctcagccgtggccatcagtcactttaatctctatttacagcggcagcgaactgctgaatgtactcaccgaacgttgtgaacaatgggatcatcacggtaactgtctgctgcaaaaaaattatatcgccgattattacggctattctgcggatgacaatccggagccggtcttacaaaccattcagcgttaccgttatgaatattactga

SEQ ID NO: 277249 - DNA, 315 bp, Morganella morganii
atgaaaaaaatctctgttattatcccgtttgtcttactgctgtctgcctgtgccaccaaacaatacccgcaggccgcagcggtatccggtgaggaatctgccttaatgaactgtcatgatattaaaacggaaattgccaaaacccgcagcattcagcaggaaattgaaaaaaccgggcagtttgacggcaaaacggtgctgggatttctgggagatttcggtatcggtaacgggattgccaaagatgatgccagggcaaaagccactgtccgcctgagtcagctgacggcgttacaggaaaaaaactgccgctga

SEQ ID NO: 277250 - DNA, 2103 bp, Morganella morganii
atgaaagcgttcaaacaacttgccggcgtgctgctcgcaattgtcggtgcctttgccctcgggtatatcgcactgaacagaggcgaacagatcaacgcgctctggatagtcgttgccgccgtctgtatttatctggtggcataccgctattacggactgtatatcgctgaaaaagtgctgaaagtcgatgcaacccgcatgacccccgcctttaaaaataatgacgggcttgattatgtaccgacagacaaaaaagtgctgttcggccaccactttgccgctatcgccggtgcaggcccgctggtcggcccggtacttgcggcacagatgggttatctgccgggcatgctctggctgctcgccggtgtggtgttagccggggcagtacaggactttatggtgctgtttgtttccacccgccgcaacggccgctccctcggggaactggtcaaagaggagatggggaatgtcgccggtgttatcgcgctgatcgcctgttttatgattatggtgattatcctcgccgttctcgccatgatcgtggtgaaagccctgacccacagcccgtggggaacctacaccgttgcctttaccatcccgctcgccttctttatggggatttacacacgctacatccgcccgggacgtgtcggggaggtctctgttatcggtctgattttcctggtgttcgccattatctccggcggctgggtagccgaaagcccgacctgggcaccgtattttgattatgacggcgtgcagctgacctggatgctggtcggttacggctttgtcgcggcggttctgccggtctggttactgctggcaccgcgtgattatctgtctacgttcctgaaaatcgggacaatcgtcggtctggcgatcggtatcctgattatgcgcccgatgctggaaatgccggcactgactaaatttgtcgacggcaccggcccggtctgggcgggggatctgttcccgttcctgtttattactattgcctgtggtgcggtctccggcttccacgccctgattgcttccggcaccacgccgaaaatgctggctaacgaaaaccaggcctgctttatcggttacggcggcatgctgatggaatccttcgtggcgattatggcactggttgccgcctgtgtgatcgacccgggtgtgtacttcgccatgaacagcccgatggcaatgctggcaccggccggtaccactgatgtggtcgcgtctgccgccagtgtggtcagcagctggggcttccagataaccccggaaaccttaaccaatatcgccaatgaagtgggcgaacagagcattatctcccgcgcggggggcgcgccgacactcgccgtcggtatggcctatattctgcacggggcgctcggcggcctgatggatgtctccttctggtatcacttcgccatcctgtttgaagccctgtttatcctgacggccgtggatgccggtacgcgctccgcccgctttatgttacaggatttactgggtgtgatttccccggcattgaaacggaccgattccctgcctgccaacctgatcgccaccgcgctgtgtgtgctggcgtggggttacttcctgcatcagggcgtggtggatccgctcggtggtattaacaccctgtggccgctgttcggtatcgccaaccagatgctggccggtatggcactgatgctgtgcgcagtggtgctgttcaagatgaaacgccaggcttacgcctgggtggccctggtgccgatggcatggctgttaatctgtaccatgaccgcaggctgggaaaaagtgttcagcgaagatgcccgtgtcggtttcctggcggtagcgaataaattccaggcaatgattgacagcggtaacatcccgtcgcagtacagcgcgtcgcagctgtcacagctggtgtttaacaaccgtctcgatgccggtctgacactgttctttatggttgttgtggtggtgctggctgtcttctcactgaagaccgcgctgaaagctctgaaatccgacaaaccgacggacaacgaaacaccgtacgagccaatgccggaaaattatcttgatttagtggcaaacagcaaatccgctcactaa

SEQ ID NO: 277251 - DNA, 303 bp, Morganella morganii
atgatgacggggaaaatccggtcagatatatactacgcactgactgagaatatttataatacactgttatgtgataaatacaccgaaatgcctctggatttcagtgccatcagagaagagacaagagcacaggtactccgtatcgctgaagagaaaaaacacacatctcctgcaaaatcttccggctcagtagatatcgacgatatcgttcaccgttcatttgatttcagcacgagggtgacaacatcctatccggaacaggatattacccatgtcatggacatcctgaagcgaatgtcatga

SEQ ID NO: 277252 - DNA, 624 bp, Morganella morganii
atgaatttagttaacaaactatccggcactcaaagaataatcccggaagaaaacaacctgaaggacatgtcaaaaataccttttctgaaaaaactactggatcggttaagcgcaccgcaaaatacgaatgtcaaacttacaggaaactacgtcaatattgatgtcgacaccacaactctgagcaggcagatattatcctttgtttataaatcagaactctcaattcccggcgccggaaataaccacaaaaaatcagaaaacagacaaaaagaaattaatgatggtgtgaaaaaatggcttacccaggaaaaaagtatcataccggtaaatattatcaaacgggaagttgacctgatgtatgcagagaaaaagcttgtgacaacaccagaagaactggacaaaataattgatattgttaaagaaaaacatctcggaaacaaagagctggaaaaacctgggattaactgctccactccgtccgttcttaagcttaataatatcctgactaacgaaattaatgagccggggataaaaaaacagttaagtcacgactttactaaaaaaatgcctgaaatgtcagataatttaaaaaaagaactggccaaccatataaaaaaacgttaa

SEQ ID NO: 277253 - DNA, 603 bp, Morganella morganii
atgggaccaatacagggacatcaggcgattcagaccctgaacaatgatatttacggttcagcgggcagtaacagctcatcatcgtatgtcagttcatccgggattaaatccgttttattaaatgcatggaatgccgttaaatccgctgtttccggtatgttgtcatcatttggtctgcatctcagcggacagcagggcagtgataaaccgggcagagaaattgtgatggatatgtcttcacggccggcgcagccgttaccggttgatattcagtttgataatgatatttatgagagcagtggcgggaatgtttatgattcggtttcatcaccgggacagggttcactgagttcgtcattatcggcatttgaatcagagaatctgtatgaggaaatcggtaccggtcagatacacactctgcctgagattccgccgccggtaaatctttcgacccatccgtcattatctgcatcggagtcagagcatctgtatgaggaaatcggtgctggtcagatacacactctgcctgagactccgccgccggtgaatctttcaacccatccgtcattatcgcggttacccggccctgatgacgatatttag

SEQ ID NO: 277254 - DNA, 2406 bp, Morganella morganii
atgcacccgaacaaagaacatcatgagcatactcataccagcagctgctgcggcagcaaatctgcctgcaccaccggcggaaagagtgagtcacaggctcatcagacacacgaccataccgcacacgatcacagtgagcatgaacatccggaacacgacgacgatgagtcccgtgcgcatggtcatgccccgcacgatcatgcgcattctgaacatgaccatgaccacgccggtcatgaacacgcacacggcagctgctgttcacacgatcacaccgccccggatgataccgcactgcctgaattaagcggcagccagcgttacaactggcaggtggaagggatggactgcccgagctgtgcgcgcaagattgaaactgccgtcctgaaaattgcggcggtcacccaggcaaaagtgatgtttgccaccgaaaagctggtggtggatgccgccggggatgtccgcgcggatgtgaccagtgctgttcagcaggctggatttgtgctctgggatctgaacggcggcagcgccgcaccgaagaaaaaagaagagcagagcctgctgaaacaggcaacaccgatgctgattctggcagtgctgattgccctcagctacgccctggagtttgtgaacccggagttcggcaaatacgcctttatcgcctcaacgctgatcgggctgttcccgatcgccaaaagctcgctgcgtcttatccgctccggcaccccgtttgcgattgaaacgctgatgacggtcgcggcagtcggcgccataattatcggcgccactgaagaagcggccatggttatcctgctgttcctgctgggcgaaatgctggaatcctatgcggcaggccgtgcacggcggggagtcagcgcgctgatggccctggtgccggaagatgcggtggtgattaaggacgggcagaaagtacccgtaccggttgcacagctgcgtcccggcgacattattgaaatcgcacctggcggacgcctgccgacagatgccgaacttctcagtgagtttgccagctttgacgaaagcgccctgaccggggaatccgtcccggttgagcgggcacagggtgaaaaagtggctgccggttcgctgtcagtggatcgcgcagtgcagatgaaagtggtctccgagcagggtcagaacgccatcgaccgtattctgacactgattgaggaagcggaagagcgccgtgcaccaatcgagcgctttatcgaccgtttcagccgctactatacgccgatgattatgctgttctccgccctggtgattgttattccgccgctgtttatgggccaggaatggtatccgtggatctaccgtggtctgacactgctgctgattggttgtccgtgtgcactggtaatttccacccctgcggctatcacctccgcgctggccgccgccacccgccgtggtgcgctgatcaaaggcggtgccgcactggagcagctgggtaccgtgaccactgtcgcgctggataaaaccggtacgctgacagagggtaaaccgcaggtgactgatattgttgccctgaataatcacagtgatgctgatgtgctgacctttgcctccgccgtggaaagcgggtcacatcacccgttagccaaagcgattctggagcgcactgaagctctggggctgactatcaccgaagcggaaaaccgtaaagcccatgccggtaaaggggttgaaggtgaactcagcggtgtgaccatcctggtcagcgcaccgggtaaactggcagacggcctgctgaccgatgccgctgcagcagaagtgacccggctggaaaatgaagggaaaacggtcgttgctgtggttgcaggtaaccggctgaccggacttatcgccatgcaggatacgctgcgcagtgatgccattgaagccatcagccagctgaaagcgatgggtgtcagcgccgtgatgctgaccggggataacccgcgtgcagccgctgctatcgccggtaccatcggcatggatttccgtgccggactgatgccggaagataaagtcaaagcggtgatggcgctgaataatgaacatcacaccatgatggtcggcgacggtatcaatgatgccccggcaatgaaagcagccagtatcggggttgccatgggcagcgggaccgatgtggcactggaaaccgccgatgccgcactgactcacaaccgcctgaccggcattgccgaagtgatcacgctgtcgcgggccacccgtaagattatccgcgagaacattactatcgctctgggtctgaaagccgtgttcctggtcaccaccctgatggggctgaccggcctgtgggttgcggttctggctgactccggtgcgaccgcactggtgaccgccaacgctgtccgcctgctgcgggtcatgaaaaaataa

SEQ ID NO: 277255 - DNA, 1098 bp, Morganella morganii
atgaaacatctcttttccgggctgctgctgatggcattttcgctgctgtgcggggcaaaaaccgttacggacagtctcgggcggacagtcacgattccggatgatccgcagcggatagtactcggtgaaagcaggatgctctataccctggcactgatcgaaaccggtaatccggcggcgcgtgtcgtcgggtggccggctgatttacagcgactcgattcgcagacatggggaaaatatgcggctgcatttccggcgatcagggatattaccattgtcgggaacgataatttttcacagcttaatattgagaaaatcatcgccctgcaaccggatctgattattatgccggtgtatgccaaatcccgtcctgatgaaacgcaatttgcacaccagaccgcagccgccggtattccggtgatttacctggatttcagggtggatccgttgcggaacacggttccgtcactgaaaacgctgggcgaagttctgaaccggcaggaaaaaactgccgcttttactgcgttttatcagcagcatatggacgtgatccgcaaccgtctggctatgcacaatccgcatcgccccaaagttttgctgcagttacatctcgggaaaaaagcagaatgctgcacgactgcagcttccggaaatctggccgatttactggccttttccggcggggataacattgcagcagggaagttcagtggtgttttcggacggctcagcccggagcaggtattgtcggataatccggaatattatctggtgaccggcagcggcggaagggataaccgggggcagttacaactggggccggatctccgccctgacaccgcccgacaaagcctgcaggaacaattacagaaagatccggtgattgccgcactgcctgctgtccgggaaggacggaccgccgcactctggcatcatgtttatctcagcccgtggcatctgctggcagcggagtttttcgcgcgggaactgcacccggatctcttttctgatgttgatccgcagaagacactggatgaaatgaaccggcggttcctgtctgtaccggaaaccgggacttactggctgttttcgcgataa

SEQ ID NO: 277256 - DNA, 2118 bp, Morganella morganii
atgaaatctgctgcgcatttacgcagaccgcattgctgttcccggtttgtgctgacattcccctttatctttattcctgtttttcatgcggttgccgccgatgatactctggttgtcactgccgccccgcaagaccgcgaagggagttacagcggggataatgtctattccactctgaaaacactgaccccgcgtaatgaaacgccgcaatccatcagtattgtcacgccgcagttgatccgtgactttaatgtcacttcagtggatgacgcagtaaagtttgtcagcggtgtaactcagggcaacacgctgggcggcattgaggacgggtttgtcaaacgcggcttcggctccaatacggacggctctgtgtttatcgacggggtacgcagcaaccaggggctggcgatggatgccactactgaacgtgttgatgttctgaaaggctcttcttccctgctttacggtattctgaatccgggcggcgtgataaacctgatctccaaaaaaccacagtatcagtggcagggacgcatcagcggacggacaaacagcaacggcggcggtaccggtacgattgatgtgaccggccctctcggcaatggcgtggcagtccggctgatagcagaacgccgccatgaagattactggcgcaatttcggggaagatcagcacacgttgctggcaccttccctgagctggctcggtgacagcgcctcgttcaatgtggcttataccgaaaataaattcgatgtgccttacgatcgcggaaccgcttttatcggcggcagcccgatccgtattccttataatgaacggatagatgacaacgctaatcacgcatacgggaaaaataaacgtctgaccgcagaataccggcaggaatttgacggcatctgggaaaccggaattaagtatgcgtggatgcagcgccgctacgacagtaatgaggtccgcgcgacggctatcaacccggagaccggaattgttacccgccgtgctgatgccaaccgtggctttaatcatcagaccacctatatcggctgggatatcagcggtacaccggaactcgccggtatgcggcatgacatcacgctcggggctgattacgaaaagaacgaaacctacaaagcctggtccttccgcggcaagccgtcaaaacaattcaatatgtaccatccggtatacggcgaatcaccggtcaccacagataaaaccgccgatgacgcaaaaagcaacctgcgcgccacggtgtacagcagttcactctatgccaaagacagtatccatctgaatgaccagtggattgtcgtgctcggaggccgtctgcagcgctatacgcaaaatggcagcagcggatggataaaccatcagacaacactcaatgacagcggttctgaatttgttccgcaggccggggtcgtctacaaactcacaccggaactggcactttacagcagttacagccaatccttcaccccttccgcacaggtggatgatgacggcaatgtggcctccactgaaaaaggtcagacatacgaactgggtgcaaaatggcagacaacaccaacgatgctgacgacctttgccctttaccgtattgatgaaaaagacatgtccatctttatgaacggcctgaaccggaatatcccgaaatcccgctcggaaggtgcggaactggaaattaacggcgaatttgcgccgggatggcagatagcggcaaactacagcctcaacagaacgcagattaaagaagataatctgaaaccccagaatgtcggtaaccagctggtcaatgccccgcgcaatatgggcagcctgtatctgacgcataccctgactgtaccgggcttaccgggtgaactgcgcttcggcggcggcggacgctatgtcggcaaacgtgccggtgatccggaaaacagtttttacctgccggcgtataccgtcacagatgctttcgccgcgtggaacgggactgtcagcggacatgagacccaactgaaactgaatgtgaacaatctgctgaacagggaatactatgcgtccagcgcgggaaacctgcgtgtcatcgccggagagccgcgcaccctgttcctgaatgcctcagtggacttctga

SEQ ID NO: 277257 - DNA, 126 bp, Morganella morganii
atggctgcctattctttgacatctttgtttggtatgagcggagctccgggcggatttccggtcattctgggttttgaacagcagctgttattactgtggcggggctttatgctgctggcagtctga

SEQ ID NO: 277258 - DNA, 135 bp, Morganella morganii
atggatttgaaacggtttatgtcggatgagaattttgcactcgaccacagctttattgaaaaagtcatttatatcaatctggaatcccggccggatcgcaaaaacgatattatggaagcactggaaagtatttaa

SEQ ID NO: 277259 - DNA, 393 bp, Morganella morganii
atgaaaatgatcgctgaaaatgactggggaccggtgctggttgttgaggatgactgcaatttttattgcgatgatgaacatattctgcaggctaatctctttttatccgcgcttcagaaaagagagtgggatgttgcattattaggcggaaattattacaacgtttatgagcatgaagcggatatttgttctctcagccttaaatatgcatattgtgccaatgcctatattgtgaaccggggttatgcggaaaaaatgatgcatatttttgataaatctgttcagaaacatccgccggagcggatgtttcacaatagtattatttattatattgctgtgtggctttgcctgaatgcaattaccatttctttttcagtaaataatcgatactga

SEQ ID NO: 277260 - DNA, 2361 bp, Morganella morganii
atgagcggcatccggcgtgtaatacagaatctggcggcagtaattatcctgctggcgctgtttctgaccggattccgcctctggccgcatccgccgctgtcagaaggtgtgcctctgtcggttgcctattatgaccgcaacggcacactgctgcgcctgacgctggcaaacgatgaccgctaccggctgtggacaccgctggaagaaatgtccccgctgctgacagagggaacgctgcgttatgaggatcgctggttttatctccaccccggctttaacccatacagtctcacgcgcggtttttttgtcagttatatcagcggggagcggcttcagggcggctcaaccatcaccatgcagctggcacggatgcgctggcatctcaacacccgcaccctgcgggggaaaaccgaacagatcctgcgggctgtgcagctggaactgagctattccaaacacgacattctggaagcctatcttaactatgccccctatggccggaatattgagagcgccggggcagcctcactggtctatttcaataaaaaaccggcggatttaacgctgccggaagccctgacgctggcggtactgccgcagtcgccgggatatcgtgtcacacccggaggtgcggatatcagccagccgctgatgcaggcacgcaaccggctctggcagcactggcggcaagagcatccggacaatgaaaacatggcggcactgtttgaactgccgctgatgctgcgtcagccggaacagatgccttacatcgccccgcatctgattgagcagatagcccggcagaaccggttcagtgctgaaaaaccgcagacggtggttaccacgctggatgttaatcttcagcgcattgccgaaaaacaggtggctgcttttatcgcccgccgtcagcaggcgggattgcacaacgcggcggtgcttcttgttgatacccgtgatatgggcgtgcgggcgctggtgggttcggcggattattacaacacggagatccacggccaggtgaacggcaccaacgccaaacgctctcccggctcggcactgaaaccctttatttacgccctcgggctggagcagggcgtgctgcatccgctgaccattcttaaagatgtgccgtccaccttcggcagctacgcgccggagaactttgacctgcgctttatggggccgctgccggcaacacaggcactgaactacagccgtaatattccggcggtggatatcgcggcaaaactcagcaaaccgaatctctatcagtttctccgtctggccgggctctccgggatggcgggggaaaagcactacggactgtcgctggtcctgggcggcggtgaagtgaccgcgcaggagctggcaaaactctatgcgatcctcgcaaaccggggcgttctgcgcccgctgcggatgaccgaatccgaacagcccgccgcgccggtccgcctgctgagtgatgaagcggcatttatcaccctggatatgctggggcagcaccgccgccccggtaacaccctcgcacaaaaaccgatgacactgccggtgtactggaaaaccggcacttcctggggattccgtgatgcctggagcagcggtatcaccggcccgtatgtgctggtggtctggctcgggaactttgacggcaccggaaacagtgcgctgattggtgcggaagctgccgcaccgctgtttttcaatattatcgacaacattatggcggagtacccggcactgcgggagccggactttccgctgccggaaaacctccgtcaggtggaggtttgtctggccagcggcaacctgccgacgcagtggtgtcagcggcggggcaaaacctggtttatcccgggtaaatcccccattgcggttgataccatctaccgcccggtggcgacggataaaatcaccggcgacgtggtctgcccgccttatgatcctgcacaggtgaatattgatatctatgaatactggccgtctgacctggcgcgggtgtttgccctggccggtctgccgaagaaaaccccgccgtctgtcgcacactgcaaaggcggcaacagcctgatcggcggtacaccaccacaaattacctcaccgctgcgcaacaccacctacacactgcggcggacagcaaaccagccatcctccctgttttttaccgccaccgccgataatgacagcagcgtgatttactggtttgccggtgatgcatacctcggtaacagcaccagccgccgcccgctggaatggaaaccggaagccgccggacgctaccgtatccgcgccgtggatgaccacggccgcgcagattcacggattattcaggtggatattctgggggtgagggacaggtaa

SEQ ID NO: 277261 - DNA, 4680 bp, Morganella morganii
atgacaaagcaacgtaaactggggcttgctctgcttattgctattgcactgtccggcggggcctggctgacgtattcagtgacgtccggcagcaccccggcagataaaggctatgagctgtatttatccggggatactgacggggcattccgttatttttccgcagaggcggaacataatccgcaggcagcctatgcattgtctgtaatgtatctcaacggctatgatgtaccggccaatgcgttgctgggttatcagtggctggaacgggccgcaaacgccggtaataaaagtgccttatacaacctcggttattaccgctatcacggtataacacaagataccgcacaggatcagtacggtattacctccctgaaggctgcggcacaggccggtgtccgtgaggctcaggaattactgggcactatttatctcctcgataaatacggcaatattccgtcagatgcagaacaggcgcggaaatatatgactgcggccgcagatcagggatcgttttttgcaaaattcgcgctgggttatatcgcgtatgaatatgataaagattataaaaaagcggttgatattctgacaccgttactcagcgagcaatttaccctgcctgctatgctgctttccggaatatatgaaaaaggcggtcacggaatagaagccgatccgggacaggcaaaaaaataccgctatatggcattttcacaaatcagctcactcaatgaagatgatttgatgccgaaagcattatcccttttcggctcagaaacggcagatgaaataaccgcccggctggcaaaactggaaaaaatggcagagaacggcaatcagtatgcccgttatgccctctatgacacttatatgcagggaacgggtgttatcgcagataaagaaaaagccctccgctatttacagccgctgattaatcaaaaagatccgaaagccctttatacctggtatcttgataccaaaacaaaccctgaatatctgacagccgcagctgatgccggatatcccgatgccctttatctgctctatcaaatccaccgtaatatccgttttgatgatgccttcggttatgaccgggagcgggcggcgaaatacctgaaacaggccgcgaataccggacatcacgatgcattaatcaacattattgaggatattgccgacagctatcagtttccggataacgacaccaacgcacaggtatctgcctatttagccaaactactggaaaaatatccggatgacccggaggcgctgatgctggcttccgcacgttacggtgaccaggaagggaatatttatgatccggttcgcgcctttgaactgaataaaaaatcggctgaattatctcccctgccggattcacaggatcaactggcctataaatatgccagaggtatcggtgttgagcaggatatgaaaaaagcggtcgggatctataaatcgctgctgagagatccctattttcaggataaggcttaccggcgtttaaccgatctctatttttcctttgataccggcggtgagattgatgaaaaagagattatcgcgttcctgaaaaaagatatcgaagaaaatgataactaccgccaggcgtatttttatgccgattatctgttgcaggaagatccggtaaaaaaccgtaaacaagctatggaactgtatctgaaagccagcgaatatacccccagtgctgatgttcacctggcaaaatcgcttatttcgctcaataccggcaataatgaacaggctttaaagctggcactggaaataatgaaaagcggatatgcccgttccctgctgacggaaaaagaatggcatgatgtcacgcagattgtattctccgaaggtaaaaacaacctccttgccaggcaattctgggtcctgcttgccctgcgggataataacgcggaagcgcagaaactgattgaaccgctgctgggtcaggatcctgttgtcacgtattactatgcgaagctgaaactggaagatgcggaagataaaccggatatgaccgatgagatcctgcgtccggatattgaactgatgatgaaagcggcagcgctgggcaacacagacgccggtgaatacatggtgaatcgtctgaagagcgcgacccgctccggcacgcagagcaacctgaatcaggcgtttctgcggataaccggactgacagaacgcgatattgtgccccggctgacacagtgtgcagatgccggaggatgggcctgtatgtatgaattgggcgagatctattatgaaggtaaatacggtgtaaaagctgacctgaatacctccgtcgcctggtacgaaaaaattcctgatcgcgattaccgtttcacagaatcacgcctgagcaaagtcaaaaagagccgtgacaccctggcagacctgaatgcccgcgtacagaaaggggatgctgaagccgcctatgaattatcttatgcctggaggaacggcaaccacggcctgattcaggatccggaaaaatcacggtattacctgaaaatggcagccgaaggcggtaacgaaaatgctgtcaccacactgattgatgactacaaaaacgcagacacgctcagtccggaagataaaaaattgcttctgtcgctgtatgacaaactcccgggaaccggcaataacagctatctgcgtgatctgggtacacagtacctgcagggcagcaatcttgtcagcgcagatcgtcagaaagcccgttattatttcagcaaagccggtgattacggtgctcacgagctgaaagcaatggatcagtttgaaataaatgtaaaactggcggatgaaagcccaaatgctgcttatgaaaccggttatgcttattttctcgggcgcggcacacaaaaagatctgctgcaagccctgccatacctgcaaaaggcagcagatgccggtcataactatgccacaatcctgctggcagatacctatgaaaagggagagtacgataaagagacacagcgacggattatcacaccggactgggataaagccattgtcctgatacgtgcctacaaagggccgcgtgatgtatcagaaaatatcgcattctatgagagcacgataaaaccggcactggccggagacagcagcgccatgaacgccgccggggaacactataagagcagcggctattatgataccacccgttactggtttgaaaaaagcgcggaaagcggttatctgcctgcattctgcgctctggccggagcgactgaaaccaataacggtaaaatggcggtattacgccgtggcgcggagaaaggtgacaattgctccgataccatgctggccatcatgcagctcagagagaaccgcattacacaggattcaccggagtggaccggtattatcacccgagtggaaaacggtctgaaaaacagtgatgaagaggtgtcaaaagccgcgtttgaagcactgactcagctgtatcgcggcactctcagagatgacaacggcagctatctgtataaggcagacaacaaaaaatatctcacactgctggaatcggaggcagataaacgggcagatgcacaaatcgacctgttctattattaccggcagaataatgacatggataaagcactgtcttatctgcaaaaaggccatgatagcggcgatatcgctgccacagaaacactctacgaatactatatgtcgccggaatattgccgccgtgacaatgccgatcccgctaaagcggagcagtatctgacggagtggctgaaaaaatcggactatccggaaaataccgataaccatatgctgatgccgccggaagagcggaccaaagccatgggtgatgcgtggcttgaaggcttctgtaaccgggcaccggatcctgacaaagctatcgcgtggtatacccgctcactgacgtataacaacacacatgccctgaaaggtatgtatgacgcgcagatagtgaagaagaatgctccggaaacctattactacggttcactcgccggtgtcagctcccgggagggggacgaccttatcgccacactgacggatgcagaacgcaacaccgtgctgcagcgtattaagaaaaagcaggtgtatgagcaatacggtcgttatgaacaggaaattgaagcgaagcggcaaaaagcagaaagcggtgacggcccggccgcattctcgctgggggtaaactatgcccgtggcgaacgcgttccggaagatacggaaaaaatgatctattactatgagctggccggtaaaaacgggtacgcccgtgcttacaacgtgctgggtaatctctaccgcaaaccgaatgagcgcgggatcccggtcgacggtaaaaaagccctcgcgtattttgatgcgggagcaaaactgggtgacagcaataccgcacacctcgccggggatatgctctatttcggtcaggccgggctggaaaaagattatccgcaggctgcccgctattatgaaatgacctctcttgaacagggcaatcatcatgaaatggcgaaatataaagtcgcgtggatgtactatcacaaaatggccggtaccggcagcgatgatgatctgcgaaaagcacgggataacctgatattgtcggcaaaatacggcaataaagatgccgcagaagctttaaaagagtgggatttttcccgtatcagcgataaaaaataa

SEQ ID NO: 277262 - DNA, 1782 bp, Morganella morganii
atgaaaaacagtgcgcttcaggcaccggcaagccgttttgtctatgttattgttattgtggtggcgctccttcaggggcttacactgaatgcaacatccgattaccttatccgcagttcgtggcaggtgccggggtcgctggtctggctgccgatgctgctggcgctgtttgtgccgtcggtattcagttatctgattaaccgtttttcttcggcggcactctgggcagggctgctgctgactgccgttctctgtgtctggatgaatttctggtatctgagtgaggcaacggcgggccacacccgtgagctctcttcactcattcctctgatggtactgctgttctggctgattctgccgtggtttcagttgcggcagttgtccggctcgtggaacccggattatgcgctgttgacagagcagtatgtcagaaataccgtgctgggtgcgctggcggggcttatcggcctgctggtgatgggaatgctgtttctggcggtttacctgttccggattgtgaatctggaatttctcagtgactggctgaatgattctctgtatttctggatgagtttttgtctcggattcaatatcagccttgtgtttatccgcacggtattcaccttcagcaccggcaaaatcgccggttatgtggcgcgggtactgttaccgctgctgactgttatcggtgtgattgcggcaggcggattgctgttatccgtggtgaccggcgtccgtgtcagcgggctgggttcattcaccatgatctggtttgtttcgctgaatatcctgctgctgaatctggtttacggtaatgaatgtgtgccacgcttccgttcatggctcaacggactggtattggccggtgtgctgttgctgaacgttttttctctgttatcggtttacggcattctggtgcgtgttaatcagtacagctggagtatcgaccggttatacggattttgtatcgcgctgttcctggcggtggtcgtgctggcgtacagcgcggcactgttatggaaacgcagcggatgggccggattgctcgggccggtcaacaaagccggattactgatactgatggcgattatcctggtgatcagcagtccgctggcggattttaaacagatcacggcaaacagtattctggcgggtattgaaaagggcagaatcaaagtcacctctgatatccgctatatcctggaagacctgggtaaacggggagaggcggtactcgcgatgctgaatgaaaatccggaatacagtaaagcactgacatactcctcttatgatcaggataaccgccggacactgcgggaggtaatgctcacagtagcgggcagcccggcgctgccggaatcctggtgggaaggaaaatatgatgtgacacgcgcctggttctgtactgaatcctccgcaggcggggagtgtctcggctttatggcggatgcggatggcgacggacaggatgatgcgctggtctgtgtcagcggttattctgatttatcgttctattgtcagatctggcagcaagccacggaagtcacagacggtcagccggataaacaggtctgggaagagcgtgattaccaggatattcagtatgcctctgaagaagagaagcaggcggcctgggcagcgctgaaagcgggacattattcactgaaacccaaagtctggatgatggtggttccggagcctgaaaagggtgcagaaccggaacaggctcctgaggtaatacaggagcccgcaacaccggctccgcttgttattcagccctga

SEQ ID NO: 277263 - DNA, 351 bp, Morganella morganii
atgagatattacaaaacaaaaaataacgaagtttatgcacttgaagataatgactctgtaaaagagtggataaaagaaaaagtgactgaaatcaccaaagaggaagccgataacatcacgaatccgcctccgaccaaagaacaactgatcgcaaaagcggaatatgataaacaggcactgattacagaggttcaggctgaaactcagttactgcaaacaaaacatgctatgaaacgcatcaagccggacgaactgatattgttaaacacttggctggattacctggacaaattggaaatggtagatacatcacaagcacctgatattgaatggccttcaaaaccagtttaa

SEQ ID NO: 277264 - DNA, 909 bp, Morganella morganii
atgttcggactcgacaataaatccggcattaacgtaatgccaccaatcgccccggccgatagccaaaccccgctgtggttcactgaaggtggtgctgggttatcagccacctatccgggacaggactggtttaatcagattcaggctgagttgcttaacatcctgaaggcggcggatattacaccccaaaaaggcacactgaatcaattgtcctccgcgatttccaaactcgccagtgcttatgcgctttcggttgttcaggctacaggccagtctctgacgagcgtgatgagccagaaagctgttacagatgccctgatgaatacagtgaaagattatttgaaactgaccggaggcacgctgaccggacagctaaatatcgaatatgtcggaggtcagggattaacgacaaaagcaacagccggaacatcaatttatcatgaactgtatctgcttggaaaactggttgcctggtgggggattgtaaacagtaacgaattagtacttgaaaacagagtcactggtcagaaattaattattggccccgatggttttaaaattaacgataaaaatattgcgaccactgatcagcttttcggcgcaggccagacttacaaaaacctgactgggagccgtcaaaataaagtctggtacaccaataccgacagcaagccgcgtatcgttcatgttgagacaaacagaacaggtacacaatatccattcagtattgatattcagatcattcataacggagtgcagcagcgggcggattatcgctggactacagctgatgaagtcatttgccttactgccttaataccacctggcgcacgatttagtgttaacggtgggtggggtcagcctgtcgagtgggaagttcttaaatattggctggagtattcattatga

SEQ ID NO: 277265 - DNA, 582 bp, Morganella morganii
atggcgatgaccgcagagcactatcagcgcgccggattgcagttacttcccaacggccgtgcatggtcaaaagacccgcagggtgacacgggaaaactgatgctggctaccggcgaggaactggcgcgtgttgatgcggttaatgaatcactgttacaggaaatctttgctgaccgtgcatttatgctgcttgaggactgggaagactttaccggtctgccggattgcagtattgaccgtgaatcctccgttgatgcccgccgcagagcggtcaaagccaaactggtgatgtccggcagcctgtgtaaccagttttatgagcgtctggccgcagaccgcggctataacatccggattgaggaacgttacccgcatcactgtctgcgtacctgtcttcacccgatttatccggatattaactggttccgcgtgttcgtccatgtggccgacagaaccactcactgggctaccgttctggacaactgccagcagcgcctgcgtatcgctgatgcagctgatttggagtgtcttctggaacgttacgccccagcagaaactgaatttgtctttatttatgagtga

SEQ ID NO: 277266 - DNA, 1074 bp, Morganella morganii
atgccatataaagcccccacactctccgcattaattgcccgtagccagtctgatattgaaagccggttgccgggcacctatgcccgcacacgcttcagtgtgaccggtgccattgcttacgccaacgccgggaacgctgccgggctacatgaccatctggcatggacaagccgtcaggtggttccgcatcttgctgatgatgacaagctgctggagcactgcgagttctggggtgtctggcgcaaacccgccactgtggctgaaggggaaagtgcagtgattgccactgctgctacatccgttccggccggaacccgctggctgcgtcctgacggtgctgtctttgagtccgtgaaagatactgtgattgctgccggtgacagccttatcagggttactgcgcttgaggaaggccgtaacggcaacacggccgccggtgtgccgcttgagctgatttcccctgtggtgaaccttcagccccgggccgtgtgccgttatatcggcggcggcgcagatctggagactatcgattctctccgctcccggctgctgttccgtgttcagtacccgccagcaggcggtaataaatatgattatgagcgctggacgctggaagtacccggagtcacccgtgcatggtgtctgccgcgctatcgcggtcacggcacagttggcatcatgtttgtgatggatgaggaaaccgatattttccccggtactgatgacctgaaacgggttgaggagtatctgaccggtcatattaatccggtcactaatcaggtcgaaggtaaaaccaccggcgcggaactgattgtgatgagtccggccgcaaaagtagtgaattttgagatccgtttgtcaccgaacacggaagaagtccgtgaggccgtcagggggaacctgaaaaccctgctggacagaaagctgcccggcggcatggtgtacctgtctgagatacgggcagccgtatccaactctcagggagaagttgataacagcgtgctgtcaccgttaaccgatatcgttgccggtgaaaatgaaatctttgtgacgggagatatcacatggcgatga

SEQ ID NO: 277267 - DNA, 447 bp, Morganella morganii
atgaatgcaatatgtgatatcgcactgaaatggcagataaataacgccgacattgctgttgagaatgccgatatcgtgctggataactccgtgggtacgctggtgattatttccctgtttactgaccgccgggcgctggattctgatgtgctgcctgacggcggcactgaccggcgcggatggtggggggattcttatcagcaaaaccccatcggcagccggttatggctgctttcgcgggaaaaacagatgtcatctgttcttcgccgtgcaaagttctacgcggaggaagcccttgcgtggatgacggaagacggacatatccgcaatgcggcggtttcggccacgtccccggcggacggttttttattactgaatgttcagctgaccctgcctgacggcagtgtgttaccgctggagttcaaaacctttttaagcgggatttaa

SEQ ID NO: 277268 - DNA, 546 bp, Morganella morganii
atgataaatcagctgaataaaatcactgccggtatcggccgccgtatccgtctgctggtcagccggggcgtggtgaattttgtggatgacacccttaagcagcaaaacatgcaggtgtcattactggcagacgaaacagcagacgatgtggagcgcttccaggactacggtcacagcagtgtgccgcccgccggaagtgaggccattgtactggctgtcggtggtgtccgtcagcatctggtggcggtggccgtcgatgccaaaggtgtccgtcctgtgggtctgaaaagcggtgacagcgtggtgtatcaccttgaggggcataatattctgctgacggaagacggggtgatccgggtgacctgcaaacggcttgagttcgttgttgaggaggaaactgtgtttgattgtccacaaaccacgattaaaggaaaccttgatattctcggggtgagcaccgccgaagaccaccagtccgggggtaagagcggaaaagaccacactcacgatgagcatgacggatacactacgggcaaaccgaaatga

SEQ ID NO: 277269 - DNA, 1095 bp, Morganella morganii
atgactgataccgtcgaactgacattaggcaatcagatttattcaggctggaaaacactggatgcgaccagcagcctcgaagacatgtccgggcagttcagtctgggcatcaccgtaaaaaataatgattccccgctggtgatgaaaccgggtgccgcctgtcagctgtccatcaacggccagccggtggtaacgggttatgttgatgcggttgatgtcagcatcagcgcggatgaacggacgattacgttatcaggccgggataaaaccggggatttggtggattgtgccgccgctcacggcaaaggccagtggcgcagcgtgagtctggaaaccatcgccaaagacctgtgtcgcccgttcggggtgactgtccgctgggaagtgacagacgcggcggccgctgccgttttccgccagtggcagattgaacccggtgaaaccgtgttcgataacctgtcccgtgcggcccgtcaccgtggtgtcatcatgaccagtaacgccgccggcgaattagtttttgcctccgccggcagtaaaaaagtggcgacgctggtactcggacaatccggcaaacccggcgtgaaaattttagatctcgatacttcgctgtcatggcttgaccgtttcagtctgtaccgcgtgaaaggggccaccgctgccggtggcaaatggggggaaacacaaacggccgttcagtcaacggcggtttacatggacgcaagagacccggaaatcacccgttaccggccgaccatgtttatcgcggatgacaacatgactaaagccaaaggcaccgcccgtgccgcatgggagcagaagcgggcaatggcacacggcatacgcgccacggctggtgtcagaggctggctgaagcctgacggtcaggtgtggaaaaagaatgaacaggtggtgttacaggctccgcaggccggtttcccggatgaaaccctgctgattgtttcggtcaattacctgctggacagtgacagcggcactatcacccggctggagctcatgccgcgtgagggatttaccgaaccggcagacccggagaagaaagtcaaaagtgcagatgtaaggtggaagccatga

SEQ ID NO: 277270 - DNA, 1335 bp, Morganella morganii
atggaatttgagcaggtaatgtcacttttcagtgatccatcgtggcgcagccggattacgcccggcctcggttcattccggggcgtgccgttttatatcgtcgatgatgccacggtcagcggtggccgccgtgtggtgcgccatgaatacccgctgcgtgatgacggtgaaaccgaagatatggggctgtccacgcgggaatatgccattaccgccgtggtgttcggtgatgactatctggataaaaaagaggcgctgattgacgcgctggaagaagaaggacccggtgaaatagaccatccgtattaccgcaaacagcaggtgcagattgaaacgtggacggtacgcgagtcctgttatgcgggtggtaaagcggtcttttcggtgacctttattccggcggctgacaatacctccccggtggtatcgtctgaggcagagctggacggctccgcgctgacggacagcacactggccgatatcaccgcgaactgggaagccttcacagataacgtcagttacctcactgagcgtttaaatgcggctgaaagcacccttaacactattgtaaacggtatccgcagcctgcctgccgggtcaggtatgaacgccctgctgggggcagcgctggggctgaaaggctcactgaagaacctcattaatgccccgggggatctgttcggttcggtcagtgacctgattggcgggattgcggatgtcgcggttcctgatgcggccaaccgggcactgcgaaaaacctctgccgccattgcgtcacagtatccgtcaaatacccccgctgtagcggaatttcagaatgtgatgaacaccaccacgcaggtttttattgcccgtgaactggcggtgctgacactggatgcggccgttgcctctgcccgtgagcagcagaccgccccggcactgacggcggtcacccgtcagcgtgacctgaccccgctgctgcccggcagtgaagcgtcagctgatgaggcggccatcccgctgattgaaaccgtggatgatgtgcgtcagagcagcgcagaccttgacgggacactgacacagttaatcgtggataccggtgatttcggctggttccgtacctcagagcagttacgtgacttccggatcatctttcttgagctgatgcagaccacggcggaaatgttaccggcggccgtgaccgtccgggtgaatgacaccgaaccggcgcttgtcctgctttaccgtgaaaccggcaccatcgcacagattgagcggtttgtccgccggaacggtgtgcggcacccggcctttgtgaccggcgcactggatgtggaggtcatcaatgactga

SEQ ID NO: 277271 - DNA, 1830 bp, Morganella morganii
atggccgcagagaacagaacaaaatttattgttgatctggtcgggaatgtcacccagcgtgcccggcagttcggggccagtatccgcagtttcggtgctgaaggcagccgctcaatgcggctgttttccggtgcggtaacgggtgccaacagcattctggataagtttgacaataagctggccgggttcgtgaccggcggtggtctggcaatggccacaaagcgggttgccgaacatcagcaggcaatggttgagctggggacacaatacaatctgaccgctgaccagatgaatgcactggacgcacagattacccgggtggccggtaaccggaaattatcgtcttcagagctgatgcaggctgcaaatgcattcctgctgcaaacgaacaattacgatgccactattgcccaactggataacatcgcgctgagcattaccggcatcaaaatggaggctactgctgccggtactgaattaggcgggatgtttaattccggctataactccccggagaaaatgcgtaaatggctcgacggtgcagttacggccacacagttcggtaccggaaatctcaatgaccaactgagtgcattacgcagtatggggaaaaataccccgtggaaaaatcaggaagaccagatgcagatgctggcgctgatgcgtgttgccagtcaggaatttgatgatccttcacaggcatctgctgctgttcagggtttttttgataccgccggaacggcggacggacagaaaaaactgaaggcttacggcaatgtgaatatcaaaggtaaggacgggaagataaaatccccggctgacctgatgacggaaattatcaaagccggatacgggaaagaggataaccttaaacaggtgttttccggtgacacactgaaactgatgatggtgttcaccgaccccaaaaagcaggctcaactccgtgatgccgcaaaccccgccaatatccgtgatggttttcttgatgagaaagccacgcagaacgtgcagaccttcaatggtgccatgacctcactggtgaatgccggggagcgttttgcacagctgaagctggcaaagccggtgcaggagctggcagatgccattaatgacctgtccccggaagaactggataaatacgcggaaaccattgaaaaagcagcctacgccattggtgcagccgttgccgcccgttatgcatggcgcggcggtaataagatactcaactttgttaagggcggtaaaggcggccctggtgccggtgccgccggaggggatgccggattaggtgacggcagttctgtggtgcccgtttatgtcaccaactggcgggatgaacgccgtggccgtgataacggcggcggaggctctgatgcaggccggggaatgacgaacggcctgagagcaaagggacttgccgtagcgggagcacttccgttcctgtctgaagaagaagcacgggaaaacatcgagaaacgccgtgaacagttgaaacgggactatccaaacggtgataaagggccgtcatggcttccggctcaaattaatgactggtggtacagccgcgatgaaaaacttcaggaaccccgtaaaccatctccgtatctgaccggcgaaaataacaactcgttcggcaactggccgtccgcctatcccggccagcagctggcagcggccgccaaaccgcctgagccggtcaaaccgcctgacgggcaaatccgggtgattgtggaggctgctcctgatttggtggtgaaaacaaaatccgtggagtcagagaacgttgatttacgggtcaataccggatacagcggcgggagtaaaatgtaa

SEQ ID NO: 277272 - DNA, 354 bp, Morganella morganii
atgcattttcagttaatacacggcctgccgtacggcaaagaagaagacgcggagcttcagtttgatacggaactgcgccagctgaccgccggtgacattatcgaggcggaagccgccagtgaacgtgtggtgatgaccccgaaaggcccggcgctgttgtccagtccgtcccgtatggggtttgagctgctgcgccgttctgttgcccgtatcggtaaaattcaggggccgctgccgatggagatgctgaaaacactgcatcaggcggatattgagttgttactggataaagcggagctgcagcgcacggcggcactgaaagccgcagagcaggtggctgacgaggggcgatag

SEQ ID NO: 277273 - DNA, 360 bp, Morganella morganii
atgacaagtccgtatcagtacaccggcattgcctatatccatatgaacggtaaggaactgccgaccaaagaaggggcacagctgacgccgggcggtgtgagccgtgacccggttatcggttcccgtgtttacggctggcagcagaccccgaaagaggcgcgggtcagctgcaccattccgcaggggccgggtgtgagcctgttcgccattaaaaacatggttgacggcactgtcgtctttgagtgcgacaccggcgaaaaattcatgctggcaaatgcctggtgtgacggtaactgcacactgacggccaagggtgatatttcagctgaatttatcgccgtcgaatgtaaggagatctga

SEQ ID NO: 277274 - DNA, 1470 bp, Morganella morganii
atgatttcatacaatgacattccggatgatatccgtgtgccgctggtttatatcgaaattgataattcagctgccgtcagcggaacaccgcagacattacagaaaaccctgctgctgggcattaaaggggctgacggaaagacaccggcgggtgaaccgttccgcattacctcaaaagatgccgccggtgccgcgttcgggcgcggctccatgctcgccggaatggcggcagcgtttatccgtgccaatgcctttgcggatttatgggcggttgccgtggatgatgatccggacggcgtgaaagccaccggtaaaattcaggtgaaaggcacggttgcacagaccggtcagattgccctgatgattgccggtacactggttcgggtcacggtgaaagccggtgatgatgccgccgctgtggccggtaaaatcattgcggccgtcagtgcaaaaactgaccttccggtgacggctgccactgacacgcctgcggataccgtgctgttaacggcaaaatggtcaggtgaaaccggcaatgatatcgatgtccgggtgaattattacaccggtgaaatgctgccgtccgggattgatgtggtcatcaccgccatgagcggagccacaggtaacccggatttggccggggcaatcaccgggttcggtgacacctggtggaattacatggtgaacccgttcaccgataccccgaacctgaacctgctgcgtgatgagctggtcagccgctgggggccgctgaaaatgattgacggcatttgctggatggcaaaacgcggcacactggcacagacatccacgttcggccagtcccgtaatgactatctgttttccacgctggcaaccggcatttcaccacacccgccgtatctgtgggccgcaacgctggccgctgtagctgtccgctctctgagcactgacccggcccgtccgcttcagacacttcagttaccgggacttctgccgccgtcagtcagtgaccgctggcagctgaatgagcgcaacctgctgctgtatgacgggatttccacgtttaccgtggacaccggcagcaacgtgcagattgaacgtatgatcacgatgtaccgtgagaatgcttttggttctcctgaccccagctatctggatgtggaaaccatcgccacgctgtcctatctgcgttatgccgtccgtacccgcatcacccagaaattcccgcgtcacaagctggcggatgacggtatccgtgtcagtccgggacaggccattgtgaccccgcaggttatccgggcagagctgctggcgctctttactgagctggaatatgccggtctggttgaggattacgcacaattcagtgaaaccctgattgtggagcgtgatcagaatgaccgtaaccgtatcaacgtgcgcagtaatgagaatctggtcaatcagttccgtatttacgcccacgccattcagtttcttttatag

SEQ ID NO: 277275 - DNA, 177 bp, Morganella morganii
atgacagaactgcatttaaaacccgctaccgggctgactgtccgtgacccggaaaccctgcagccgctggctgaaaaaggggaacgcaagccccgcaccacttactggctgcgccgtcttaaagacggtgatgtgaccgaagttcaggccgcgccgaaaaaaggaaccccatcatga

SEQ ID NO: 277276 - DNA, 543 bp, Morganella morganii
atggcggctatcagtgatatctcagacaacctgattgcgggggttaaagggctgttcggcaataccctgacccgggttgacacccatcccggccagtggagcgacagtgcggttgccctgattattaacaccgctccggcggtttatgttgcctggctgggcagccgtcccggggaaattccgaacactgcggtttccacctgggggctgtttgtcagtgcgcaggtactgaacggcaaccagactgacagaccgggtatttatcagattgtggagcggctgaccggctggctgaaccgccgccgtgttgaaccggcgggtgtgttcaccctgacccagattggcaacctgtggagtgatatccagagcaatggcggtgttgctgtttacggcctgtattttgaggctccgcagctgctgccggatgcggcggacgtcagcagtctggatgattttgaaacccactttcagcagtgggcgcagcctggcggcacgccggaacaggaagcgctcatccgtttaccgatacaggaaaaaccatga

SEQ ID NO: 277277 - DNA, 453 bp, Morganella morganii
atgagttacgcgaccattgccgacatgtatgcgcgttacaaccgtgatgcgctgcatattctgaccctcaataaagtgccggaccggcagagcctgtcaccggaggcactggtacaggctcaggagcagctgattcaggtcgcgcttgatgatgctgctgccatgattgacggctatatcgacggacgcgccacactgccgcttgagaaggttcccgtggttctggttcgtactgcctgtgtgctggcccggttctcacttgaggaggggcaggctaccgacaaagccgcgaaggatgcggaaggcgctgtccggctgctggaaaaagtcgccgccggtgaggttgggctggggctgagtaaagacgcagagcgtccggccggtggtgatgttgccgttatcaccagtcagggcagtgtctggtcacggaacaaatccagagggtttatctga

SEQ ID NO: 277278 - DNA, 384 bp, Morganella morganii
atgtctgataaagcgaatttatcgccggatgatacaggcagtattgccgaaatggccggggtctttgtggttaacacggcgcatgaaggctaccggcgtgcggggttggttctgcacagcggggaaaacacattgccgccggtatctgtttctgttctcgaagcactggaagcagacccgcgtctcgttgttacggttatcgcggcagatactgacagtaacacaccggggcggctggacaatccgggtgcatctgctgcggtagctgaaggtgaacagccggaagtcacactgacagcggatgcgccgaatgtgcctgccgcagccggacaggtggctgaggatgctgaaaaacctgccgttaaaggccggggcaaaaaatga

SEQ ID NO: 277279 - DNA, 924 bp, Morganella morganii
atggctatcttaacccccgcgttaatcaaatcgctttttaccggctggaacggcgactttcaggacgggctggcagatgctccgggccagtatgaaaaaattgccaccgtggtgccgagtaccacgaaatccaacacctacggctggctgggtaaattcccgggcatgcgtgaatggattggtgaacgtgccatcagcgacatgcagacacacggctaccagctggttaaccgttcctttgaaagtaccgtcggcgtagatcgcgacgatatcgacgatgacaacatcgggatctattcaccgctctttaccgaaatgggccgcgcggccggtgttcagccggatgagatgtgctttggtgcgctgaccaaaggtttcagcacactgtgttacgacaagcagaatttctttgataccgaccatccggtttacccgaatgctgacggcaccggtgatgcggctgttgtcagcaacattctggcggaagaaggctataccggtcagccgtggtttgttctggactgctcccgctctatcaaacctgttctgttccagcagcgcaaagccccggaactggtggcaatggataaagtggatgatgagcagaacttcatgaaaaagctgatccgctatggtgtcgatacccgctgtgaagccggttattccttctggcaactggcttatgccgcgaaagccgcactgaccgcagacaacgtatggacggttatccagaacatgcgcagcttcaaatctgacggtggccgtccgctggcaatccgtccgactcatctggtggttccgccgtcaatggaaaaagcagccacacagctgcttgagcgtgaactgacggttgacagcaaaggcggcaccatcagcaatgaaatgaaaggccgtcttgagctgattgtcggcgattacctttaa

SEQ ID NO: 277280 - DNA, 1218 bp, Morganella morganii
atgaaaacaccaaaaaccactccgaacaaacgcatcgccgttttaagtgccgcgatgacagacagcgcagacggctggtatcagttgctgcctgccggatacttcagtgcccgtgacggtcgtcctgaagatgtgcccggcggacagtggtttattgatgccgctgttgcggaacgttttattcaggccaccgccgctgtcggtcagccggtgctctttgattacaaccacgtcaccctgaaacaggatgatgaccctgctgcctgcacagaagcccgcgccgcaggatggctgcgtgacccgcgtaatgacatgcagtggcgtgagggcgaaggtctgtttgtccggctgtcactcaccccggctgcacaggctgcggtggatgcccgcgagtggctctatctgtcggcggttttcccgtatgacgaaaacggacaccccctttatctgcgcatgggcgccctgaccaatgacccggggcttaccggtatgcagtcaatggccgcactgagtgcccggctcaataccttaatctctctcccccctgacactaaggatgaactcatgaatgaaaccctccttcagttgcttgagcgactgggcgtcacgctgcccgaaaatgccgaggaactgaccgaagaacagttacaggaactgctgacgcaggcgctggctgctgctgacaccctgaagacctccgcgcaggtggcggtggacacacaggaagtcattgaaaccacacaggcacctgaagacgttgctgatgatgtgaccacactcatcgatgacaacagtactgagcttgctgaagcggagcagattctggaagaagccgcgctcagcggtatggatataagcaaagtggttccggcccgtgcttatcatctgctgggtaaacacgccgcctcactgagtgcccgcgtttccggcagtaccaccgacagcattattgccagtgcccgccgtaccggccgtgtttctgccggggaagtgccttatctgcgcatccttgccaatacacagggcgttgcggcactgagtgcagtcctgaaaggccgtccggcaatcgccgctctgaccggccgccagacaaagagtctgaaaagaccggccggaaaaatcgctgtgctttccgcatcagacaaagaagccgcccgtctgcagggacgttctgaagcagacttcatcaaactgaaacagaaaggagccgtgaaataa

SEQ ID NO: 277281 - DNA, 471 bp, Morganella morganii
atgagaattgattcacatattgacgtaaaaccggtacaggatgcctttcagcggctgatgaagctgggaacagatccgaaagtgatcacccgtgcggtttctgccgtactggtatcggaaagtgaggacgcctttgccgcacaggcagacccgtcaaccggcacgccgtggaaggcgctctcagaccgctaccgcgaaaaactggaaaagcgcggtcataacgggccgatgctgcagcgcacgcagggcggactggcggcatcactgacacccgggtatgacgccaccagtgcctctgtcgggtcaaataaagtttacgcggcaatccaccagtacggcggactgtcatccatgccgccgggtccggcagcggttccagcccgtccgtatatggggctgtcaccgcagggtatcagtgatatcgtcagtatcattaaccagaagcacgcagaggcattacggcagcgatag

SEQ ID NO: 277282 - DNA, 1284 bp, Morganella morganii
atgccggaacccgttgacttaggctatgcagccacgctggagccggagctggccgtcgattatttccgcagcaaggggtatgaaattacctggaactggcaggaggcgaacgcggctgcccatgccagggcgtttactgtcgccaaagcggcccgtctggatattctggaaaccatcagtggtgaggttgataaagcgaacagccaggggatcactgagcggcagtttattaaaacgctgacaccacaactgcaggaacagggttggtggggtaaacaggtgattgttgacagtaacggcggcgcagagatggtacagcttggcagtccgtcacgtctggcaaccatctaccgtaccaatgttgccacggcgtatcaggccgggcgctatcagcagcagctggcaagttcagatacacacccttactggcagtatatcgcggtcatggacggcagaacgcgcaaaagccatgccgccatgcacggccgcgtgttccgttttgatgaccccatctgggaaaaactctatccgccgaatgactggggatgccgctgccgtgtccgcgccctgaccgcagaacaggtcaggcgtatgggcctgacggtggaatccagtaccggagccatcagcagtcagcaggtggaaaccggcgtcgataaacgcaccggcgaggtgtatgaggctgaaaccaccacgtttacgcgcggcggacagaccatgaccaccggtgcgggctggtcgtccaactccggtcagctggcaatgggggccgatatcagcatggcccgtaagctgcttgaaatgcagaaccgtgagttgcgtcaacaggtgattcagtcactgaataatgcgccggtgcggcagaaagccttttcagactgggtgggtgagatgatgaccacccgccgctcggcagccgggcagcagtcgctgggatttgtctctgacagggtggcatctgcactggagaaatccggacaggcggcacccggcgtgctgaccgctgacggtaacaccctgaaatccggtctgacaatggcggaatatcaggcactgccgggcatcatcggcagacctgcagcggtgctgagggataacaccgggcagcagctgctgtacgtgggcaccaccgggcgtgacaccggccggacggttgtccgtgttccgctgtccgggcagatgactgtcaccgggcggccggtacatgcggaaaccttcccgctgaaagcgttacaggacggactccggagcgggcgttatgacctgattgaggggaagttatga

SEQ ID NO: 277283 - DNA, 1581 bp, Morganella morganii
gtgctggtgaaaatattacgacgtatggtcgatgccgtggggcatcgtttctggtttaaaccggacagtcagacacaagatgatgaatcccgtgcatttcagttaaaccgttactacggtgaccatcctgtatccggactgaccccggcccgtgccgctgagattctggttgatgcggaacgcggtcagttactggcgcagtgtgagctggcggaggatatggaggaaaaagacccgcatctgcagtcagaactcggcaagcgccgacgtgcccttcagtcactggactggaaaataaaaccgccccgtaatgccagccgtgaggaaaagcgggacgcggagctgctgacggagattctggatgacgcggactggctttccgactgtatttttgatgccacggacgccattttaaaaggcttcagctgtcaggaaattgagtgggaggaagtcgaagggctgttaattccccgctctgtggagtggcgtgacccggcatggtttcagaccccgcagggtgaacgtaatgagctgcggctgcgtgacgggtcagcggagggtttgccgctgcagccgttcggctgggttcagcatgtggcaaaatccaaatcgggttaccttgcccgtaccggattaatccgcacactggtctggccgtttattttcaagaactattctgtccgtgatctggcggaatttctggagatttacgggttgcctatccgggtcgggcagtatccggccggagccactgaaaaagagaaaaacacgctgctgcgtgcggtgatgtccatcggtcataatgccgggggtatcattccgaaatccatgatgatcgactttaaaaatgcggcggacggcaccgcagatccgtttatggcaatgatgtcatgggcggagatgagtatgtcaaaagccattctcggcgggacgctgaccagtcaggcggacggtgcgaccagcaccaatgcactgggcaatgtgcataatgaagtccggtttgaagtccgtgacagtgacgccacgcagctggcggccacactgacccgtgacctggtctttccgctgtatgccctgaactgtcagtcatttgacaatcagcgccgcaaacccgcgtttgagtttgatttgtctgagccggaagatatcacggtttatgcggcagccctgccgcaactggtcaatatcggcatgaaaatcccggcacagtgggcacacgataagttacagattccggtggccgctgacgatgaggacatcctgaaagctgctgcaccggcagtgcctgatttttccgccgcattactgagcgcaaaaccggaagcggtcttgtccgcagacccggcagcaacggacgtcagcaccatgaccggggctgtatccggtcaggaatgggcctcaacggttgatccgctgctgatgccgctgattaacatcatcagaacagatggctatgaatccgccgtgcaggcagcgtctgagctttatgagcagatggatgatacgcagctgactgacatgctgcaccgcgcgatgtttgtggctgaactgtgggggcgtctgaatgccggaacccgttga

SEQ ID NO: 277284 - DNA, 1560 bp, Morganella morganii
atgctggccgcaaagctgaatccgtcagcggaatttattctcagttcggctaatgacagttcgttcagtccggacgaggtattgctgggctatcagaaacgctggattgcggacgactccccgctcaaaattgcacagaaatcccgccgtaccggcctgacatgggctgaggccgctgatgctgccctgacagcggcacagtcccgtgaagcaggcgggatgaatcatttctatatcggctccaacaaagagatggcgcgggagtttattgacgccgttgccatgtgggcaaaagcttacgggctggccgccggggaaatcggtgaggaagtctttgaggatgaggacaaggacattctgacctttgtcgtctacttcagcagcggcttcaaagtccaggcattatccagtaacccgaaaaacctgcgcggtatgcagggtaacgtcaccattgatgaagccgcattccatgaacagctggctgaagtgctgaaagccgcgcttgcgctgaccatgtggggtgcgaaagtccgcattatttccacgcataacggcaatgaaaacctgttcaatgagctgatacaggactctcttgccggacgcaagcgctattcagttcacactatcacgctggatgatgcctgtaatgacgggttataccgccgtatctgtcaggtgcgccgtcagaactggacaccggcggcggaagacgagtggaaagccaatctgctgaaagacaccgccacggaagaagatgcgcttgaggaatattactgcgtaccgaaacagggttcgggtgcctacattccgcgtgtgctgattgaccgcgccaccgatgaaaactgtatcgttgtccgcttcagtatgccgaaaggacatatgacatggacggaagacgagcgtgtaaaaaccgttcagaccttctgcggtgaagagttattgccggtactgagccactttgatccggatacgcgccacgcctacggacaggactttgcccgcagcggtgacctgtcggttatcggtgccggaagtattgaacaggacacccggcggaagctgaagctgacggtcgagctgcatgatgtgccctacaaccagcagcggcagattgccttttttgtcatcgactcactgccccggctggtcgggattgcggtggatgccaccgggaacggcggttatctcggggaggcgctgcgcctgcactacggtgaggatttggtggatgcggtacatatcacagacaacttttaccgtgagtggtcaccgaaatacaaagccctgtatgagtcgaatgatatctccatcccgaaagatgaggacatcattgctgaccagcgtcagatgcagaatatccggggtgtgccgaagatagacaaaaaccggcgcaaaggggctgacggcaagaagcgtcacggcgacagcgccggtgcgtatctgatgtttacgcgtgcgacctatatcgacggtcaggaaattgattttattccgctgccggataaacgggccgtcagtgatgacgatgattatccggattttgaacgggggtgctggtga

SEQ ID NO: 277285 - DNA, 573 bp, Morganella morganii
atgagtgagaaaaaaacgcgcgggcgtccctctaaaattgacctgctgccggaagctatccgtgaccagcttcatacgctgctgcgggataagcgccacacgcaggaggatatccgggcggcggtcaatgaactgattgatgagaacggcctgccggatgacctgaaaatctcccgtaccggcctgaaccgttatgcgtcccgcatggaaaccctcggggccaaaatccgcgaaggccgcgaaattgccgacgtatgggtttcccggctgggtgatgcgccgacctctgacgtcggtaagctgctgcaggagtttgtgaaatcactggcgtttgaaaccaccatgtcattgtctgagaccgataaagtcgttgagccgaaagcactggcgcagctggcactggtcgcggcccgtattgagcaggccgctatgatgagcaccaaacgtgagaaagagatccgtgcagcgtttgcggcagaagcagccgaacaggcagaaagcatggttaaacaggccgggctgactgaagaagccgccgcaaatatcaaacgtcagattctggggattgcataa

SEQ ID NO: 277286 - DNA, 300 bp, Morganella morganii
atgtcgatgcgtgaaatcttaaatgaagatcagcggctggtactgctgcgctccctttccgactgcggcggtgatgccaatgagtctgtactgcagacctgtcttgatgcttacggccaccgtgagtcacgggatgtgatccgttcccatctttactggctggcggaacagggtttgtgctctgtcaaagatgtggccggatgtctggttgcctctgtgaccgggcgcgggatggatgtggcggaaggccgcagtacagttcccggtgtcaaacgtccccgtccccggagcgggttatga

SEQ ID NO: 277287 - DNA, 303 bp, Morganella morganii
atgctggacgtccttagagaacactggtcaatgatttataccgtggtcaccggcgcggtggccatcggtctgttgctgctcagtaagacttacgccaaacgggatgaagtcgaactgatgaaccggcggctgagtgagctggaggttgcgctggcaaccctgccgaaccgggcggaactgtataaccttcagctggaaatcgccaacctgagaggcgatatcaaagctgtggccccggaacttcagcagctgcgccgcatgagcgacctgttattacagaacgaactgaaagagaaaaaataa

SEQ ID NO: 277288 - DNA, 222 bp, Morganella morganii
atgagcagacaaatcgacaaagcctgtgagcttgaacagttttaccgtgagcaggcgctggccgctcactttgataatcagctgcaggacggaacaggcgtctgtttatcctgcggcgaagatattgaccccgcacggctggcagtgaatccccgctttgaacgctgtgtgacctgtcaggaacgctttgaatacaggaaaaaacatgctggacgtccttag

SEQ ID NO: 277289 - DNA, 597 bp, Morganella morganii
atgaccggcgcactgaaaatttacggcgttgtcgcggttgtgggtgcagcactgggcggtgtgttcggctcactggtcaccggtgtttccatgcagagccggattgatgatgaaacacggaaacgcaccgatgcggaaataacgctgctgtcggaacgtaatgcgctggcggatgagaacgccagagcactgaaacagattatccgtcagcagcaggaacaggcgaaacagaatgcagaactgtcagaaaaattcaggaacaccctcagtaccctgtcaaccaccacgcgccgtattgagcgcagtattccggccgctgttgccgctgatggtgacggctggaatggccttggtgacagcgggctgcggctctaccgcgaagccctcggttacggtgaatccggcagtgatagtgtcatcctgtccgctcccgccgccggaactgctgtacctgccgccccggccgcagccgccggagtccggcgctccaccggtgctgctgaaacacgcggcgctgttcggggaatgggtgcagacactggaaaacaagctgctggcgctgcaggaatgggcagcgaagcaaaggcagaacaatga

SEQ ID NO: 277290 - DNA, 237 bp, Morganella morganii
atgttcgccattcttaaacagctgattaccaatccggccaccggccgtctgtccacatcagacaccacccttatcggggcttttgtcgccagcacgctggttctgctctggatgacggtcaccgggaaactggcagactgcgagtggctgtttgtcggatatctggcggcgtgggtcacccagaatcaggcatcaaaacaggccgccattaaacgtgataaggagctggggcaatga

SEQ ID NO: 277291 - DNA, 279 bp, Morganella morganii
atgaacccggcggcgaacattaccccgtcacaggcagtgccccatgcactgctgctgcggcagataccggcactgaaaaatccgcggtatttcagtatttatcagtccggccgtgagcgctgtcttgcagaggcactggccggaaacgatatctctcaggtgccgctgtacagccacagcaacacctatcagtccctgttctcccggggctggcgttcagtgaatgagcaggatatccgtctggcaaaagcgggggcatgtcatgttcgccattcttaa

SEQ ID NO: 277292 - DNA, 435 bp, Morganella morganii
atgacaaacccatccgatttacgcacccggggatttaaattcagtcagcgcagtgaaaataacctcagaggggttaaccctgttctggtcgcaattatccgccgtgcgctggaattatctcccgttgattttgctgttatcgaaggactcagaacgccggagaaacaagctgagtacgtccgcaagggaaactcccagaccagtaacagccgtcacctgaccggtcatgctgttgatattctgccgtccgccatgaagcccggcatgagctgggacgaaaacaaacacctctttgagccggttttacaggccattaaaacggcggcagacgaacagggtgtgatactgcgtttcggtaaaaactggcaaagtgatcctgctcttctgggtcagaccaaattccctgattacccgcatgtggaaatcccgcgatga

SEQ ID NO: 277293 - DNA, 426 bp, Morganella morganii
atgaatactcttccgctttttgccgatagtcacgaagaactgggacagctgttggataatctggacaatattcctgaaaccgaactgcagtcccgctggccgcagctgctggccgatatcgtagatctgttcagtgcagagcttgcccgtcagggatatgatgtgcctgcagctaaattatctgccggaaaactggccggggcactggcgcattactacggtggccgcgcagtctacctgcctaccggtgatgcgctgaaagctgccctgcgtgataatcagctgttcctggactggtcactgtcaggcggcgatgttgacggtcttgcccgtaaatattctctgaccaactcgacagtttatgccatactgcggcaacagatgatattgcaccgcaagcgttatcagtcagatctctttgagtaa

SEQ ID NO: 277294 - DNA, 309 bp, Morganella morganii
atggatagtgatcttttctttatattattgccggtagcggctggattctgggtatattttgacgctcacagtcatcatatcggctcttatcgtgatgatgcgggtaagatgcgcgggtgttctcccgtgttctggggtgtaatgactcagttagtttgtattattacactgccggtatatctgattatccgtaaaaaattattacagactgccgccgaacatccggccagcagtgataaaagcatcgggattttaatcatggcagccgtaggtggttttattctctggtatttctggttccgatattaa

SEQ ID NO: 277295 - DNA, 519 bp, Morganella morganii
atgatgaaaattggccgttgtccgatatgccatacagactggcaccttgaagcgttatgtgaagatgatgccagccgtcagttactgaaaatacttgccgatttaccggggagttgctccaggcatttggttgcttatgtaggtttgttccgtcgtgaaaaatctaacctgagcaatagccgggcattaaaactggctactgaggttctggcgctttatcccgccgggcgggtgctggctcatgcactcagtgaaaccgttgagcgtatccgcgaaaaacgcgcaaagggagatgttaaaccgctggcaaatcataactatctgaaaacggtgtatgagtcatcaaaacagatgtattcacaaagcagcaatgtgaaatcccgggaaaaagaacagacatccggttctgattccaaggatgcttacttcagacaaatgcagcagtttggagttgatttgggtacactacccggcggcaaagagtggttagagaaacaaaacggaggtttagatggatag

SEQ ID NO: 277296 - DNA, 522 bp, Morganella morganii
atgatccgtgatcaacttatccgccttattcatatcgcgaaaactcagctgaagctggacgatgacacttaccgttcggcactggttgctgccaccggaaaagactcctgccggaaaatgacccatgcggagctgacactggcctatgacgcttttgttgaacgcgggtttaaacgccgttttaagcgtgaaaatcggcgtgtaaaaggcagaataaaaacagccgaaatcagcaaaatcaccgccatctggatcactatgcaccgtcagggttttgttgcagacgggtcagctgcagccctgaataagtttgtccagcgccagactgcgaaagagaacggcggtgccggtgttgccgaactcggctggcttaacggagaccttgcttatcaggttctggagtcactgaaaaaatggcacgtccgtctgatgcttgatgccatcaaagcccgccgccagcgccagcctgattttcgcggttatgacgcggtatgtcaggcatacaatcaggggaaaaaatga

SEQ ID NO: 277297 - DNA, 219 bp, Morganella morganii
atggttaagattaaacaaatcggtctggtcagcgctgtctgcattgaaatagctaatcagcatcacgggattaagctcagccagaaacagttagctgtgattgtatctgctgctgattctgtctgcgcggcttttaatgaaccggatatgtgcgacaactgtaatgacaagctgcgtggtggttgcctgccgacatgcaaccagtacctcgggaggtaa

SEQ ID NO: 277298 - DNA, 726 bp, Morganella morganii
atggcaaatgataaagaacgttatttgcaaaaaataaaaaaacttctgaataaggccagaaataacagcagtgctgaagaagcggccacggccatgaggatggctcagaagttaatgcgggaatacggactgagtgaatcagatatatcactcagtcaggttactgaaagcggtactcacaaaacgccatccaaagcagtgaagcccccgcgttatatgatcatgctgggtggtgccgtttgccgggcatttggtgttcgttattacctcagttatgaccagtccggccgccggacaattgtattttatggcccggctgaacgtcccgaaatcgcctgttatgcctttgaagtactgacacgccagttaatcagcggacgtaaagcgttttacaacagtattcataaaagaaccaaacccgcgaaaaaaactgatttagcggatacctggtgtgaggcatgggttcatggggtctggcaggttattactgagtttgtacctgaagaaaatgagcgtcaggttatgacccaatatatggagcgcaaaaaagagcagacaaaattcagtgatgtcagtatgcgggacagtaaaaagcatactcagtcagacggtgcggcgcgtgacggattccatgcaggtaaaaaggcaaagctgtcacatggtgtaagtggttcgtccgtgacgcctgcggcaattattcatagccgggagatagctcatggttaa

SEQ ID NO: 277299 - DNA, 204 bp, Morganella morganii
atgtcatttaagcactatgcaacaacagcggccaccgcagaacgcgacggccattacaaggaagccgggcgcaactgggctgatgcagcgggactggcgaaaaaacgggaaaatcagcagtgggcagaacgccgtgctgaattctgtgccaaagctgcgggcggacgttataccgcattaatcagttcagatattaattgttaa

SEQ ID NO: 277300 - DNA, 639 bp, Morganella morganii
atgtcagacaaagatacccagtttactcagcatacggttccggacggatactggcgtgacgccagaggctgcctgattccggttgatatgctcaaagacattgaccgcgcccgcgacaccgtggtcggcgatattgtcagccttgcagaagcgcaacaggaggcacttaaagcctttaaaaattatgcctttgatgaagtggatgcattccgtgaactgtcatccgaacagtacggtgtggggctgggtggcaaaaaaggcaacattcagctgcacagttttgacggtgaataccgtgttcaggtggcaattcaggatcacaccgcatttgatgaacgcctgcaggccgcgaaggcgctgattgatgagtgcatccgagactggtcaaccggtgcccgtcctgaaatcatggctattattgaggatgcctttaaagtcgataccgtgggcaatatccggacaaaggatattctcaaactgcgccgtctgaatattacggatgaaaaatggctgcgggccatgaccgctatcagcgaatctatccagaccatcagcagcagtcgttatatccgcatctacaaacggagcggcactgacggtaaatatgttcagatttcattagatatcgcgggggtgtga

SEQ ID NO: 277301 - DNA, 225 bp, Morganella morganii
atgtcagtaaaaatcacaatcaccattactgaggatgacgaaggaaaagtaggtttccgcgtcagtggcagaggtgctgccggaaagcacactcacactgaagcgcaggctgcaggccggttagtaaaaatcgtggccggatatctgaagtttttaaaatcggaggggcataccggttctgatgagaattgtgagtatatgtacccgaatcaggttaaacactaa

SEQ ID NO: 277302 - DNA, 282 bp, Morganella morganii
atgaacatcaccatcaataccgaaaatcagtcagtgatatcagcgctgttacaggctgaatccgtggcgcagcagcttactgagcgcggtatatcagtcctgagtgttgtggcccgttgcggcagagcctgcattcatattgcccgtcacagttactgtgatgaattaatccgcagcggcaaagcatcttatcagtatctcagcaaaaatttttccggtgtccgtcagggggtgtttaacgagtcaggctgtcgtgtgtactggtctgaatccattcattga

SEQ ID NO: 277303 - DNA, 954 bp, Morganella morganii
atgaccaacgttattgaaatgacacagacacaaaccgcacaggctgatacccgtgctgccatccgcgccattgttgacaatgacggcgtgacatacagcgcgatagcccgcgaaatcggtttgtcagcgacagcactgtctcagtttatgaatgagaactatcgcggtgataacgacagcgtgagcggcaaactggcagtgtggctggaaaaccgcacccggaaaaccaacgaaatgccgcaggcacctgactttgttcagacccggacagtaaaacaaatctggtcggcattgcagtatgcacaactcgctcagtgtatcagcgtgatttacggcagtccgggtgtgggaaaaagcaaggcattacagcagtttgtccgtgagcgcccgaatgtctggctgattactgtttccccgtcccgcagcagcctgagcgaatgcctgtatgagctggctcttgaacttggtgtcggtgacgctccgcgccgtgccggtcagctgggacgtgttatccgccgtaaattacgcgggacatccggcctgctcatcattgatgaggctgaccatctggattatccggtactggaagagctgcggattttgcaggaagaaaccggcattggtctggcgctggtcggtaacaatcaggtctattcaaagctgaccggcggcaactcccggaatgttgactttgcccgtctgttcagccggatagcaaaaaaggtcgccattctgaaaaccaaaaaagacgatgtgaaagccatttctgcggcgtggggactgggtgacagagagcgagaccttgtgacgcaactggctgaacgcccgggggcattgcggacggtatcccacacactgcgccttgcggcaatgtttgccaccggcgcaaatgaagcactgtgtgaaaagcatatccgcgcagcggtaaaagacctggagggaacagagttatga

SEQ ID NO: 277304 - DNA, 1983 bp, Morganella morganii
atggatatttgggttacggcgcaagagtgtatcgggctaccgaatttaccaacagccccctttaacatttctaatcgccttaaaaaacatgcgactgaagatatgatccggaagcgcgaaggctcaaaagcttttgagtttcatatcagttgcctcccaccggttgcccgtgcagccgtactaaaaaaacaaggtgtcattgaagtatccggcactccgattgcaatcaaaaaacgccagtccggaaattactccggggaactgctctggcagaactggaataacgccagcgacaaacagcgtgaaaaagcacgcgaacgctgcgaggcagtgatagcggttgccgaattgctggacagcggcatcgatgtcctgaccgcctttgactctgttggtgaggcgttatcagtcgctccggcatccgtgcgccgctggtattaccaggtcaaaaattttgaccgctcagactgggcggctgcactggtcagtcagcatggtcgcagtcttgaagcccggcggaagaaagaagcggaatgcagctctgacgcatgggattttttcctggctgattacctgcgtcctgaacaaccggcactgcgtacctgctacgcacgactgacagaagccgctgccgcacatggatggactattccgagtctgtcttccctgcgccgcaagctggagcgggaagtaccggctgaacaggtggtgttactgcgtgaaggtgaacacgccctgatgcggttatatccggcacaggaacgtaccgtgcttgatttggatgcaatggagtggatcaacggtgacggctatcagcataacgtgtttgtccgttggtttaacggtgaagtgctccgccctaaaacatgggtctggcaggacatccgcacgcgtaaaattttagcgtggcgcacagatgtttccgagaacagcgacagcatccgtctcgcattggctgatgtggtggagcaatacggtattccgaaacatatcaccatcgataacacccgcgcagcggccaacaaatggatgaccggtggtgtgccaaaccgctaccgcttcaaggtaaaagaagacgacccgaaagggatcatcccgttactggggatcaaactgcactggacaagcgtgctgttcggtcagggtcacggtcaggcaaaaccgatagaacgtgcattctcgcacggggggctgggtgaagtggttgaccgtcatccgtcactggcgggggcatataccggcgcgaacccgatggcaaaaccggataattatggtgaccgggtagtggatgcagaggtatttctgaaagcactggcggacgggattgcattctggaaccgtcagccgaaacgggacactgaagcctgtcagggtgtgctgtcattcgatgccgcatttgagcagagctaccgtgaaagcaccgtccgtaaagcaactgcggaacagcgcaatctgctgctgttacctgctgaagcggtcacagtctacaacggtgcattcacactgaatgcaggcggcaagatttcagcccgtaaaaaccggtattacaacgagcagttactgggcatcaaaccgaacaaagtggtcatccggtttgatccgcaatcactgcatgaatcggttctgtgttacacgctggacggccgctttatctgctccgctcagtgtattgaaaaatcagggtttggtgatagtcaggcagcgcgtgagcatcaccgtaaccgccagcgttttgttaaacgcaccaaagaagcaaccacagcacagcagcgtatgactgcgctggaagtggcagaactgatgccggagatagtaccgccggaaccaccggaaacccatgttgtggaaatgtaccggccagccggtaacaccgtccaccgtgagcaggttcatgtctctgcggagacagagaatgactacgattatgcgtttgaaaatgccgttgctcagttcgacgagcgccggaagaaaaatacgatttag

SEQ ID NO: 277305 - DNA, 219 bp, Morganella morganii
atgtcattaaacacgcaagattggcaccgcgcagatatccgcgcggcgttagagaaacgcggtactaatttacggaccttatccacggccgcaggtcttgcggccgatacattgcgtaatgcgctggttcgcccgtggcctaaaggtgagcagattattgctggtgctatcggcgttacgccggatgtaatctggccaagtcgttacaccaaacaataa

SEQ ID NO: 277306 - DNA, 594 bp, Morganella morganii
atggagaaaatgcacactgaatcaggcaaaactacagaccatacttttacatcgcgtggaatatcacgctttggtgagagattatctacgctgattaacggagaaccctacaagtcttttgccaagaaatgcgacatgtcagataaagctatacgcgattacgtcagcggtagaacgtacccatcattagaccggattgctcatatagctgaagtgacgggctgttcttttgaatggttagcaactggatatgatttcactgagactgcgcctatgccagaagagatggtgaacataccgccatctgataagcaacaaaaagcatggcttgagatacttgagcgaatgaccccgacagaaagagatgcagtcctcaacaatgtatttcggcagggtattaacgcgctgctgaatcaacatcaaatgccagggcgagaagatgctgtttctggtctgtcagcagatgaagcattagttggacgcatgtatgcgtctttaacgccggatgaacggaagagttttttggtgtctctcattgacgaagaacaaaaagaaactaaccgccgtgtaggcgacaaaagtaaagccagctaa

SEQ ID NO: 277307 - DNA, 972 bp, Morganella morganii
atgcaaatgatgcaggcagtaaatccggtcaaactgaagtcagttataaaattgattattgttgccgttattctcctcgtcgcgggagtggttacttttaattcgtatactattgtgcaggatggttcggtaaaagtcggaacctttttaggtaaggttaacccggtcgcttatgatgccgggctgcatttcccgattaacccgtttatgacatttgatacctattcaacaaaagatatccgggtgtcactgaaagagttacgcgtaccgtcacaggacaaactgaaatccatcgtggatattacggtgatgctccagtttgatggcgctaaagcccccattctccgtattaacggcggtacagaaagtgaagcactggataaatatgtccgccagaaactgatttccacgattctggaattcgggaaagatgttgccaacgcacaggatctgtataccgcagatacccagcggaaattacaggaatctatccgtgatgccattcagggttatgcttcaccttacggctatacgatcaaagagattatgatccaggatattacgctgccggaagtggttcaggagcaggttgtgaataccaagatgcgtcaggagcagataaaccaggcaaaagcggaagcagagaaagagcgtgaactggctcagaaaaaagtggttatcgcacaggcagagcgtgagtccgcagaacagcaggcacttgcccgtgagcgtaatgcccaggccagctcttatgcaatgcgtcaggaagccgatgcacgtttatatgccgctcagaaagaatcagaagcgaacgccgtgttacagcagacaatcacccgcgaaatgattaactggaagcagcttgaaatagaacaaattaaagcagagaaatacaaaggtgaagtgcctaatattgttgttggtgcagactatgacggaaaaatgatcatggatatgcgctcacaacaataa

SEQ ID NO: 277308 - DNA, 1287 bp, Morganella morganii
gtgttccgcaaagccgcactcgataaccgaaaaatgaaatggcggggtaaggccttattattacccggtattccgctgtggctgattatagtatgcagttttctgtttttaatggtttttctgacctttatcttgtccggcagctatacgcggcgggtcagtgtgaccggagaaatcaccaccaatccccgggctgttactgtatatgcaggtgtgcagggatttattaccgggcaatatgtgaatgaagggcagattatccgcaaaggggatccggtttaccgtattgataccagcagagccacagccagcggtgtggtcagtgaaaatcagcgccgtgaaattgaaaatcagttacagcatatccgtgatatgaccgcccgtctcagagataacaaacagaccactctggcctcgctcgaaaaacaaaagtccctttatgcacaggcacagttgcgatctgccgggattattgaacgggcacaggaagggatccgcattatgaaacagaatatggataattatcatcattaccgggaaagcgggctgataaataaagatcagtggctgaatcaggctgcgctttattattctcagcaaaacagtctgctgggattaagcggacagaatgaacagaatattctgcaggttacgtctctggaaagccagatcctgactcaggcggcagaatttgataaccggatttatcagctggaattacaacagtctgagctgatgaaagagcaagtgaataatgacgcgggtggtgagattatcgttcgtgccctgacagacggccgtgtggattcccttggcgtgaccgtcggtcagatggtcaatcccggtgataccctgctgcagatcctgccggaaaatatccgtcagtactggctggtgctctgggtgcccaatgacgcgctgccttatctgaatgtcggtgacgcggtgaatattcgttatgaggccttcccggcagaaaaattcggccagtttgccgccaccattcaggtgatttccaaaacccctgcctctgcacaggaaatgatgacctatgccggggcgccgaaagtcagtcagatgccgcagtccatcccctattacaaagtgattgtacgtccggaaaaacagatgatcgcctatgacggccgcgaactcagcctgcaaaacggcatgaaagccaataccaccctgtttctggaaaaacgcaaaatctatcagtggatggtatcgccattctatgacatgaaacagagcgcctccgggccaacaggagcagacacaccatga

SEQ ID NO: 277309 - DNA, 2115 bp, Morganella morganii
atgcgctgtttatccctgaaaaacctgctggaaaaactcgatctcagtctgcgtcagcgcattccggtgatccaccagaccgagtcctctgagtgcggcctcgccagcctggccatgatttccgcccattacggcaaaagtatcgatctgatttccctgcgccagcagttcaatctctccgcgcggggcgcggccctggccgggctgaccggtatggccgccgagctgggcatgaccacccgcgcgctgtcgctggatatggacgacctgccgaacctgcgcctgccgtgcattttacactgggatttcaatcactttctggtactggtgaaaatcagcggcaacaaatttatcctgcatgacccggcctatggccgccgggtggtcggtattgaggatatgtcgcgcaattttaccggcgtggcgctggaagcctggcccggcagcaccttcaccaggcaggaggtggtgaaaaaactcagcctgcgcaagctgatcggcaatattcacgggctgaaaaaagcgctgctgaaaatcttcgcgttctccgtggtgattgaggctatcggcctgattatgccggtcggcacacagctggtgatggatcacgctattcctgccggagatcaggggttattgtccctgatttgtgtcgggttactgttcttgattctgttgaaagcagcggtcagtatgtgccgcgcctgggccagcgtgattatggaaacgctgatcaacgtccagtggcagtccggattattcacccatctgctgcggctgccgctcagctattttgagcggcgcaaactcggggatattcagtcccgtttcggctcgctggatattctgcgtaccacctttaccaccagcgtggtcggggcgatcatggacggtatcatgctgatcggcgtgtttatcatgatgatcctctacggcggccatctcacctggattgtgctcgggtttaccgccgtatatatcgggctgcggctggcgacctaccgttattaccgccagctgtcagaggaatcgctgatcaaagaggcacgcgccgggtcgtattttatggagtccctctacggcatcaccacggtgaaaacccagggcatgagcgatcgccgggggaatcactggctgaatctgaaagtcgattccatcaataccggcatccgcctgaccaagatgaacctgatgttcggcggggtgaatacttttattatggcctgtgaccagatagccatcctgtggatcggcgcaggtctggtgatcgacaacgccatgaccctcgggatgtttgtcgcgttcagcgcctaccgcgagcagttttccgaccgcgctgcctccatcattgagttcctgctgcagctgcgcatcatgagcctgcacaacgagcgtatttccgatatcgcgctcaacgagcaggaaaataaaaagccggatgtaccgtacgagccgcagatgcaggccgccgggctggagacccgcaacctggcgtacagttacgacagccagtccgtaccgatcttccgcgatattaatctgtcggttgcccccggtgaaagtgtggcgataacagggccgtccggctcgggaaaaaccacgctgatgaaagtgctgtgcggcctgtttgagccatcggatggcaaggtattcattgataacattgagatccgccagctcggcgtcaataactaccacaaaatgatcgcctgtgtgatgcaggacgacaaactgttttccggctcgatccgcgaaaatatctgcgggttcaccgaaaatcccgacgagcagctgatgatcgcctgtgcacaggccagttatattcacaacgtgattatatcgatgccgatgggctatgaaacgctgataggagagctgggcgaaggactgtccggcgggcagaaacaacggatatttatcgcccgcgccctgtaccgaaaaccccgcatcctgtttatggacgaggccaccagcgcactggataaagagagtgaatcttacgtcaatcaggcgatccgccaactgccgatcacgcggattattattgcgcaccgcgagtcgacgattgagtcagcggaccgcattatttttctcggcgggaaaaacaataaataa

SEQ ID NO: 277310 - DNA, 876 bp, Morganella morganii
atggcatctgaaaaaaatcattcatctgccgcagaagcggaaaccttactgccggcagactgtaaccagaacgtgtatgaagatcagagcaccggcgcggaactgacccgcaaagatatcaaccgggtcgcgtggcgctccctgctgttacaggcctcctttaactatgagcggatgcaggcggcgggctggctgtacggtttactgcccgcactgaaaaaaatccacaccaatccgcgtgatctggcgcgcgccatgaaaggccatatgggattcttcaatacccaccctttcctggtgacctttgttatcggcatcatcctggcaatggaacgctccaaacaggatgtaaacagcatccagagcaccaaaattgcggtgggtgcgccgctgggcgggatcggcgacgccatgttctggctgaccctgctgcctatctgcggcggtatcggtgccagcctcgcattacagggctcaattctcggtgctgtggtgttcctggtgatgtttaacgttgtccatttcggactgcgtttcggcctggcgcactatgcttaccggatgggggttgctgccattccgcttatcaaagccaataccaaaaaagtcggccatgcggcttcgattgtcgggatgaccgtgatcggcgcgctggtggccacttatgtgcggctctcaaccacactggagattaccgccggtgatgcggtggtgaaattgcagagtgatgtgattgataagctgatgcctgctttcctgccgctggtatacaccctgtcaatgttctggctggtacgccgtggctggagcccgctgcgcctgattgtactgaccgtggcgctgggtattatcggtaaattcgcccatttcctgtga

SEQ ID NO: 277311 - DNA, 255 bp, Morganella morganii
atgggattgaaagtacatttacaatggtttgataaaaaaacggaagactttattgataaggaatattcagtagatttaggggatgacgacactgtgattactcagacagtcaacccgacagaaaatatcattaataacggttggtttgatgttatttccgcgtgggtgccttatcttcagaatcaccttaaacataaaattgatctgggtaaatacgattatcaggtggcctttgcttaccgggataactggtaa

SEQ ID NO: 277312 - DNA, 1212 bp, Morganella morganii
atgtcagataagcatgacccttcagacggtacgccccatattaaagttactgtatacagccccccttgtgagagtgaagagtggccgtctattgataattttaacgtattccagtatcccggtcgcaaccgcccgtccatcctgaaagaatatctcgatgaagcacgcagggaaccggagcggatggtctatctcagcagtgccgcagcagtcggccggagtgcattaatttttccggttaacggcactctggccgcaaccattgcatcctggattcagtctttcgatttcagtgctctgctggcaggactgagagatacattccccctggcggggcggataaccggtattgccgcattattgtggccgactaaaatggggaacgctgaattatatcagggtgccggaccccttattgatttaaaccgtgcgaaacttgtcgatatgaggcaggcggatatggttgtcacgctgccgtctgaactggtcaccactgtaaaaccggcagacatcaggggacaaaaaacggttcccgcaatggttgtggcacagggtgtggtggatgccgttaagcaggagcacacggttgcactcacaatggcggaaaatacggatattccggtcatcacggcacaaaaaacgaagaaaccgaatgtgtataccgcagaggttgtcccgggtatgaagccgctgcggataagaatggtgtcaccatcaggtaagcaggttcccccctcaaaaagtgtggaacttccggccgcagagcattatcttcctcagccggacagcggaaaaacccatcatgcgtttattgttttcggcgatgattatcagccggtttatatttcggtgacgcggaaggagtggcaggtaaagccttatgttgaggctaaaaaagcggaagaagaaaaaaaacgtcagggtgttaaggataaaggtcatagttaccaccctgaaccagatgttgaagaaattaaagggttgggggaattaaaaccaggtaaaaagaaaacgcctaaacaaggtggtgcaggtaaacgcgcacgctgggttggggataaaggccgtaaaatctacgagtgggactatcagcacggtgagctggaggggtatagagccagtgacggccagcatcttggagcatttgacccgaaaacgggcaaacaactgaaacccgctgatccggaacgtaatatcaaaaaatatttataa

SEQ ID NO: 277313 - DNA, 312 bp, Morganella morganii
atggatgacagagaaaaggcggttgaaaaagtcagaaagctgatgtctcttgccgaaaatgccggtaatgagaatgaagccgcgaacgccttttcaaaagcgcggatatttatgaaaaaatatcacctcgaactgtctgatatctattccgcagaaccgtctcccccgccaccctatccccgcagaaaagcaccaccgcgtccgctgaccccggaagaggagccgcgcccggtcagattacacttcaccggcccggcactgattttcattatgctgctgttatttgtggtttatatactgtatttacagtaa

SEQ ID NO: 277314 - DNA, 2142 bp, Morganella morganii
atgactgattcctgtaacgcatcctgccgccctgcccgcctcacgccgctggcactggcgctcgctgttatcagcggcggcagtatcgccgccaccgcagataccgaagacccggttgtggttgtcggcaactggctggataacactgataacagcgatacgctgctgaaccacggcggcgcacggaccatcaaaaccaaaaaacaaatcgatgagtcaggggcggaaaccatagcggacgccctgcgtggtattccgggtgttcaggtgcgggacagtaacggtaccggcggcagtgacgtttcactcaatgtcggtatccgcgggcttccggcacggttgtccccgcgctctaccattctgctcgacggtattccgctggccgctgccccctacgggcagccgcagttatcgatgtcaccactctcattaggctcaatcagcagcattgatgtgatgcgtggtgccacctctgtccgctacggaccgcaaaacgtcggcggcgtgattaactttgtcactaaacctattccggaaaccttcagcggttccgcgtccgtcaaaacacagggtgcacgcaccggcgggctgaaaaccctgaccgatgcctctgtcggtggctcaaaagaagacggttctgcaggtgcgctgctgctctactccggtctgcacggccagggctaccgcaagaataatgacaataccgatattgatgacatcatcctgaaaacccgctatgccttcagtgacactgatgagttgctggcaaactttcactattaccatgcgcaatccgggatgccgggcggcctgacagaggcacagtacaaagccgatccttaccagtctgtccgtccgtttgaccgttttgaaggcaaccgtcaggatatgtcctttaaataccgccaccaggaagatgataaacagtttgaattactgacctggttcagcaaaagttaccggggcagttatattgaaagtgagggaacaaatgcgagtgccggtaagagccgccttgtttcctatccgcgtcactacacagcttacgccattgaaccgagctattcacagctgttccgctttgataaccagtcccacgaaatcaccctgggttaccgctatctgaatgaaacggcggatgaaaaagcctaccgctccggctggtatccgaccggttctcaaagctcacgccctcagaccgacagctactatcagcacacctccggcggtacagaggcccatgccatctatatcgatgacaccattaatgttggtaactggacggttattcccggcctgcgttatgaaaatataaaaattcatctcgatgacggtttccgtaaccagttccgcagcaagagctacagcgaaccgttaccggcactgtcggtgatttatcatattgatgatcagtggaaactgttcgccaacgccggcagctcattcggcagcctgcaatatttccagctcaataccggcggcgcgggtaatgatccggcaaacggcctgagtgcggaaaaagcccataactatgaagccggtacacggtttgatgatggtctgctgtctgcggaaatgaccctgttctatatcgatttcaatgatcagctgcaatacattgaaaactcgaccggctggaccaacctcggtgcgaccacccatcagggggtagaactggcactgaattatgacctgagtgaaaccgcgaaatggctcgacggcgtcagtatctacagcacttatacctacacaaaagcagtgagcaaacgcggtaattttgcggataaagatctgccgttctactcccgccagctctttactgccggtgcccgctatgaaaccggaaactgggtgtggaatctcaacacctatgcgcagtcaaaacagcagtcaccgggaaccgggaaaaattacattaccgaaggcagtgcagacggacgttacggcattattccgggctatatgatgtgggatgcgcgtgcggagtatcatttcggcccgcaatggtcagatctgacacttgccgccggggtgaaaaacctgtttgatcaggccagctttacccgttcaacagataataactacggcatttacgccgggcagccgcgcactttctttgcacaggcttccgtgaagttttaa

SEQ ID NO: 277315 - DNA, 225 bp, Morganella morganii
atgctgattttttggttcgaaattcgggggttaaatgatagtcgtgagaattatttttggtgtgaatgtgatcttgctgttttagcggggaaagggcggttttatggattaatccgcctgttttattctttcgttccacatctggatgcaagtgcatttatccatcttctggtcagttgccttaccggtttatatcacgccaccttaccccaaaataccggataa

SEQ ID NO: 277316 - DNA, 981 bp, Morganella morganii
atgcggcggatttttttatgtatactgatccgcaggataacgctgcgggtgacaggcatgaaatacgatctgaatgacctctattattttgtgaaagtggtggaatacggcggattttccccggcgggcgaggcgctgggtattccgaaatccaggctcagccgccgtattgctgacctggagcagaagctgaatatttcactgatctaccgctccacccggcagtttcatgtcactgagatcggccagaccttctaccagcagtgtaaaaatgtgattgatgaggcggagatcgccgaagagattatctgctcggtacaggggcatccgcgcggcagcgtgaagttttcctgtccggtcgcgctgttacaggcttatcttcaggatctgctgacagattttatggtgaaataccccgatattgatgtgcagatcctggcagttaaccgtccggtggatgtgatcagcgaagggtttgatctcgcactgcgggtgcgctccctcccgctggatgattccgggctgaccatgaaagtgctgggctattcgcggcgtatcctggttgcttcaccgctgttatttaccggaaaagcggcacctcagcatccggacgaactgacagaattcccgatcctcgccaacagcgaacaaaaacaaaactacacgctgacactgaccggcgaagacggcagcagcatcaccaaacacctcacggcacgcctcgccactactgatgtcatgacactgcaccgcgcggcatgcaaagggctgggcattgcccgtctgccggaaggtgtggttctcaatgatttgactgccggacggcttgtccgtgttctgccgggctggcagtttccgcaggatgtgatccacgcggttttcccgtcccgcaaagggctgttacccgccgtgcaggcactgctgaattatctggcggaacatgtgccgcagacggcggcgttttcggggacgggggaatag

SEQ ID NO: 277317 - DNA, 1098 bp, Morganella morganii
atgtggatatgggagcatcatagctggcccggatttacgtatgatttgccgcagctattgccgctgctgcgggaggctgcatttcttcagggtgatttatacggcagtaataaagcgcttgagcttgctgaagataagacactggatacgattctggcaaatattatctactcaagtgatattgagggggaaaaaccggatgcccgttctgtcagatcatcactggctaatcaccttggtatttctgaggaggtctcttatccggcggacaaacgtacggaaggtctggtggagtcagcgctggatgcaatcaataatcccggtgaaccgctttctgcggctcgccttctgaaatggcatacctggttattccccgaaaatgacaccctttttaaccggacaaccggcgggtgtttccgttccggggctgttcaggtggtatccggcaggctggataaaccggtcattcattttgaggcccctccggcggaacgggtggagtcagaaataaacgcatttatcgcctggtttaatgaaagcagagataacgcgggtattgaccccgttttacgggcaggcattgcccatttgtggtttctgactattcatccttttgaagacgggaatggccggattgggcgtcttattatggatctggcactggctcaggcagaaaacagcactgtgcggttgtatgcaatgtcacagaccatcaatgagcaccgcaaagaatattataatgtgctggagcagacacaacggcagggaacggacattacgccgtggctggagtggtttgtgaaaatgctggttgtgtctgtcggcgcaacgctggcgcaaatcaggcggacactggaaaaaaacagatactggcaccggtttgatcagaaccggctgaaacctgagcaggctaaagtactgaaccggatgctggacggtgattttgctgacggtattaataaccggcagtatatgtcagtagcaaaagtcagccgcgccagtgcaacacggcatctggctgacttggttgagtccggttatctgacggaaagtgaaagtggcgggcgcagcagccgctattgtctgaataagggataa

SEQ ID NO: 277318 - DNA, 624 bp, Morganella morganii
atgggaaacgttccaaaaagtaatgaaagacagtttatccgaataaacattttatgttcatattcctgcccggcgcaccttcgccgggctttttatttctatccctgtcacgcttcggataacactaatagattaaggcactgtaagccgtacctgctgagccgcgaaagtgtcgcgcaacggcagccgcacagtgacccggggatggtttccggtgcaccgtctgacggcacaatggtgaataaagagaccggtgcggaacagttcaggccggataacggtcagatgcgcagaccggatgcacaactggtcgccgggggacagagcggacaaaccgccccgcagggacaacaaagcacaccggtttcctctgatcgtaacgggaaagtgcctccggcacgcccgcaggctgaaaacagccggatgtcatccgtgaaaaaagagataacgtcagcggcggaatccgccatgccgtctgtggatgttgacgcaccgtcaatcacggccccggaagtgggcatctccgttccgggaacctccgcgccaacgcttgatatcaaagccccggcagtcagtttaccgggagcggaagtcccggtccctgcactgaaaaatccgttctga

SEQ ID NO: 277319 - DNA, 1665 bp, Morganella morganii
atgagcacaccacgcctccagcaccagtttatccgcctgtggcagtatcatcagggaaaggagaccgaaaccacccttcaggagatcgccgatatcctgcattgttcccgccgtcatgtccgctctctgctcagcagtatgcagacagcgggctggctcagctggcaggcggaaaccggacggggtaagcgctcacgtctttgtttcctgcagagcggacgggatttacagcacgcccgtgccgaactgctgatcgagcaggataatatcgaaaaactggtggcgatggtcaatgataaggacgcgatgcgtcagatggtattatcccagctggagcgcagcttccggcagggaaaaagcctgctgcgtattgtctattaccgccctttttataatttactgcccggttcgccgctacgccgctcggaagttcatctgctgagccagatttttaacggacttaccgcaataaatgaggaaaacggggaagctgtcccggcgctggcgcatcactggcagcagaccggtgacaaacagtggcgtttctggctgcgtccggcgatatttttccatcacggccgtgagttgcagatggtggatatcatttcctcttttgagcgcctgcgtgacacacacccgctgttcagccatatccgcactgtccgttccgatatgccttacatcatcgatatcacactgaatgaagccgacagctggttcccggtactgaccggcagcccgcacgccgccattctgccccatgagtggcaggaactgccggatttcgcccgccgccctgtcggcaccggtccgtatcaggtggtctgtaacaatgaccgtaaactgacgatccgcgcctttgaccattattacggcttccgcgccctgctcgacgaagtttcggtgctggtggtgccggagctggaagaaaaaatggtctgcaccaccctgcatatcggcgcggacgggccggagcgggattctctcgacagccggatggaggaaggctgctatttcctgctgcacgacacgcgttcagcaaaaggagagcgggaagatatccgccgctggctcaacagcctgatgacccccgtcaatctgctgtatcactgcgaacccctgtatcagcgccactggtggccggcttacgggctgctgctgcgctggcatcacagcaaacttatcccgccctgtgaaaaaccggctgacctgacagagctgacactgacctattatcaggatcatcacgaataccatgctatcggcaaattattgcagcagttactggcagaacagggtgtaaaactgacgattaatatcacggattacgacacctggtttaacggcgattgtgacagtgatttctggctggcgaccgccaacttttataagccgctggatttttcggttttcgccaccctgtacgagctgccgctgctgcgccgctgtctgggcgatgacctgcgtgcgccgctgaagcaatggcggcagcgttccctgtctctggcggcatggtgtgagcaggtcattgacagacagatgctgttcccgctgttccatcactggcttgaattacaggggcagcgcagtatgcggggcgtcaaaatgaataccttcggctggtttgattttaaatccgcctggtttatccccccggaaagttaa

SEQ ID NO: 277320 - DNA, 555 bp, Morganella morganii
atgcttactcttggtaccccgcgtctgcacctgcgtccctggacaccggatgattatgcatcgttccgtgcactgaatgcggatccggacgttatgcgcttttttccggcctgcctgagtgcggcagaaagtgatgcgatggcggatgaaattatccgtcgttttgaacggcagaaagcattcgggctgtgggtggcggaagaaaaaagcagcagggaatttaccgggtttgttggtcttaatatcccgtccgcgccgtttgatttcagtccgtgtactgaaatcggctggcgtctggcgaaacgctttcacggtaaaggttatgcaaccgaagcggcaaacgcggtgctgcgccatgcctttatgacgctgaatatgccggagattgtcgcgtttaccgcgaaggtaaatctgccttctgaacgggtgatggtgaaaacgggaatgcggtatcagcgggagtttctgcatccgtcactggaacaggggcatccgttacagacgcatgtgctgtataagatcacacaggcggaataccgcgcgcgtcagtcctga

SEQ ID NO: 277321 - DNA, 525 bp, Morganella morganii
atgaaaaaattgatccttcctgttatggccatgttcgctgccgcaggcgcttatgctgaagaagcaaaaaccactgatatggagccgctgaagattgtgaaaactgacaacggcatgagtgagttgaaacacttcccgcaggctgcgtcagatcaggttcgccatgtgattgccgtagagccgaaagccgatgaagggcagtacaaaattgagctggtgatcggtaaaaaacagatggtggactgtaaccaccagtggttcggcggtacgctgacacagaaaaccgttgatggtttcggctatgactattatgagaccggcgacttaaccgggccgatgtccaccatgatgggctgcctcaataatgaaaaacgcgaagcgtttgtcagcgctaacctgggtgacgaagcattcgtccgttacaacagccgcctgccggttgtggtgtacgccccgaaagatgtggaagtaaaataccgtatctggagcacggataatcagctgctggatgcaccggccaaataa

SEQ ID NO: 277322 - DNA, 873 bp, Morganella morganii
atgatgaaattccggggatgggaaaaatgcagcttcagtgactatgaagcctgctgtgaaaagttcggttataatgcggaaacttcaccgcactatattaagtttgccatggagcagggcgttgaaccggatttttatgcctatacaaaaaaaggcgttattgaaggtgctgtctgcacagataacggctggctggcaaacgacaataataaccccgcaaaccgcctgaagtggatgtatttcccccgctactccatcctgctgccttttaataaaaatattaaatgttttctgccgtttaaaaccaaatccctgagtacagaatgccgtcagttttataacagctcattttcgctgttttcccggcgtcatgtggccgtttcaaaagatctgtctgctttttcttccaaaaccagagccacccggaaaaaagagatccgtaaatttatggctgatggcgggacatttgaaaatgtcagcacggccggaccggattttttatttgaaacctacttccggttatatgccgaccggcgggggcatgaggtggagaacgatccggttatccgcgcactttttcatcattgctataataactttttcggggaaattgcgtttttggacggtaaagcagtgggtattcagttattgctttccacaccgtcaaagcggggaacatttattgattttctgaacatcggctacgatatgaatttacgcaagtattctatcggcacgatgctgatgtggcgcaatctctgcctgacagcagaattgcccgcaccggtgacctattcttacggcatgatgtccggggagtataaagcccgctggtgtgacccggtcagtattggtcgttccattaccttctga

SEQ ID NO: 277323 - DNA, 201 bp, Morganella morganii
atgagcagcgttgtttttcatgatgtacgggattgtgcaccactgaaaaattacctgaataatgccggttattatctttaccggacgcaggatcagggacaggatgaaatctggttatccgcgcgggataaaaaagcgctctattctctgcaccgggataaacagggccggtttgtccgcctttcccgcagttctttataa

SEQ ID NO: 277324 - DNA, 1170 bp, Morganella morganii
atgaaactctctgcaaggcaggttgaaacagcgaaacctgagattaaagactataaattacctgatggcgcgggtctttttttactggtaaagactaacggagccaagtactggcgctatcggtatcaatttgccggacgtgaaaaaatgtacgcgataggggtataccctgatgtatctctggccgatgcccgcactaaacgggatgaagcccgcctaaagctaaaagagggtatcgatcctgttaaggcccgacaggttaagattgtttccgggcgtgaaaatacgttccggcgtctctccgttgaatggcatgaatttaaaaaatctcgttggtcagaagggtatgcgtccgatattttggaagcgtttaataaagatatctaccccctgataggtgatttgcctgtcgacagtattgaacctatatatgctctgaaagctctttctgccattgagcaacggggggcaactgaaaaagccagtaaagtgcggcgctggaccagcgaagtttttaagtatgctatcgcgaccggtagggcaaagtataatcctgtggcggaattacgcagtgctatgcgtggtcatgtctccagccggtatccgttcttattgttacacgaaatccctgattttttatccgcgctggaaaattacgcgggtaatcctgtaacggtaattgccacgaaaatgttgatgttgtccgggctgcgtactgttgaactgcgtaagggggaatggtctgaagtcgattttgataacaaaacatggaccataccaaaagagagaatgaagaaacggaaagctcacatcgtgccgctgtctgatcaactggttgccctgttgcatgaactgcagcggtattccgggcggtatacctgtatgtttccggggcgttcggatccgatgaaaccaatgagcgaagggacagttaacgggctgataaaacgggttggttttgaggggcgggtagtagggcatggcttccggcacacgatgagcactattctgaatgaaaagggtttttcttctgactggatagaattacaactggctcatgtcgacaaaaatattattcgcggtacgtataaccatgccctttatctggacgggcgaagggaaatgcttcagtggtatgctgatgaaattgatcgtcaatgtctgatctaa

SEQ ID NO: 277325 - DNA, 198 bp, Morganella morganii
atggcagaagtaaaagaacgtgacgatgatttactgacgatgaaagaagttgaagtgatcgtaaccctgaaaaaaacggcaatttacgacatgattaaaaggaaggaattccccgcacaacacaaaataggccgacgagcagcccggtgggtgcggggagacattcttgaatggaaacgtcagcaaactgcacgttag

SEQ ID NO: 277326 - DNA, 282 bp, Morganella morganii
gtgaaaaaagatgagctaattaaagccacacggcaaattaaatacgaatcacgcgaggccatgaacagtatggacgatgattatatttcatttcccgcagaactgatttacaaaatatgtgatgaactactcaaataccaacagctcaccccatatgcctgggaatatagaaacgcgagaggcttaagctttactaaagacaaaaagcaaatcgatctcgttaaagattattgtcctgacgcaaacatcattgaattatttaaacttgatacctccaaatag

SEQ ID NO: 277327 - DNA, 1386 bp, Morganella morganii
atgacaaagaacttaacaccccacccctaccaaaatctcattctcagtcacgaaattgatattaagcgctcaaatgtctgggcgggtatgggtatgggaaaaacagtcgcgacactgaccgcgctggaagatctgtttatggccggcagtgaaactaaaccggctctggtgctggcaccgttacgggtcgcccattcaacatggccggatgaagcggtcaaatggaatcacctgcgtaatatagatgttcagccgataattggttccgccaaagagcgcatggcagctatcaggaataccaatgccagcgtgtttaccattaattatgacaacctggtgtggctggttgagatgatgggtgaccactggcctttcggtaccatcattgccgatgaaagtacccggctgaaatcgttccgtctgcggaaaggaggtaaacgggctgccgcactggcaaaggttgcgcataaacacgtcagccgctgggtgaatctgaccggtacgccatcccctaacggactgttagacctgtggggtcaggcatggtttgtcgatcagggccagcggttggggcggacgtacagcgcttttacctcacgctggtttaacagcattcagttcccgggacaacaatggtcaaagctcgaaccgtggccgttcgcacaggagcagatacagtcagccctgcgtgatgtgacaatatccctcgatgccgccgactggttcgatatcaaagaaccgatccataacataatccggctcgaactaccggccaaagccagaaaacagtatcaggaaatggaaaaagaaatgtttcttgagctggaaaacaacggtatcgaagccctgaacgccgcagccaaaaccgtcaaatgcctgcaaatcgccagcggcgctatttacaccgatgatgatcataactgggctgagttacacgataccaaaattcaggcgctggaaagtatcatcaacgaatccggcggtactccggttctggttgcctaccactggaagcatgacctggtgcgcctgctgaaagcctttccgaaaggtaaaaatctggatgcagatccgcagacactacgtgactggaatgccggaaaaataccggtactgttcgcgcatcccgccagcgccgggcacgggcttaacctgcaggacggcggtaacatcctggtattcttttctcactggtgggatctggagcagtaccagcaaatcattgagcgtatcggccccacccggcagattcaggccggatataaccgccctgtttttattcatcacctgatagccgccggcacgatggatgaagtcgtgatggagcggcgaaactcaaaacgtgaaattcaggatttactgttagaagcaatgaagaggaaataa

SEQ ID NO: 277328 - DNA, 321 bp, Morganella morganii
atgaagttaatcagtcaaaatttaacggttgtagattttttcaaaaatggtggagtacttatatatgaggttaaagccaacgaggttgatgaaagtaatccaaatttctataagttacctgaaattcaatcaaagttatccacggggtttgaactctcgccacctgatattatccattacccgaaagaagccgctctaatttcagcatatggtgatgattggactcgattcattacccgagtatatagagcaggggggcgaattatttatagacaaataacccctggcatttatcatgctgaatgtaaactctggtgttaa

SEQ ID NO: 277329 - DNA, 273 bp, Morganella morganii
atgagtaaggttcgcgaggatgtgatcgaaaggcatctggtcagcgaagtgaaaaaggccggcgggatcgcctataaattcgtctcccccggccgacgggcagtacctgacagactggttctcctgcccggcggaaaaattatctttgtcgagtgcaaagcccccggagaaaagccccgccccgatcagttgcgggaacacgcgcgacttttggctttagggcatcaggtagttgttttggatagtaaggatttaagaaacgtattcaattaa

SEQ ID NO: 277330 - DNA, 219 bp, Morganella morganii
atggcattcaaacataatgacagcccgctgtacttccgtgcagcgcgggatgctgtgcgtctcgaacaggccggtaaatactgggaagcgtcaaaagcatgggcgcaggcgcaccggctggcacacaaattaagtaaccagcggtggagtgaacaccgctctgatttctgctttacgcagattcagcgggaaaagaacaaaggtacccgcgatgagtaa

SEQ ID NO: 277331 - DNA, 2058 bp, Morganella morganii
atgaaaaatatcctctggctcgacctcgaaacgttcagtgaaaagccaattaaatacggtacgcattcctatgcggaaactgtagaaattatgctttttgcatgggcgataaacaacagtcccgttaatgtatgggatattacagacaaatcacctatgcctgcggagttaaagcaggcgctgacagacccggatactgtgatttttgcacataacagtcattttgaccggacaatgctgaaccatgccggaataaaaacaaacgtccgccgctggcgtgacaccatggttcaggcactggcacacggtttaccgggagcgctggcggcgttatgtgaagtgctcggggtaccgacagacaaagcgaaggataaagaaggtaaagccctgatccagctgttctgtaaaccccgccctaaaaattcagccctgcgccgggcaacaggtaaaacccatccggaagaatggaagcgttttattgcctacgcgggactcgatattgaggccatgcgcgaagtgcataaacgcttacctgcatggaattacaaagatgaggagctggagcactggcaccgtgatcaggaaattaatgaccgtggcgtttgtatggatgtacgcctggcggctgcggcgattgaagccgttgagcaggaacaaaaacggctcgcacgtctgacacaagatctgacagataacgaggttcaggcggccacacagcgggacgcgttgctgcagcacatatcgtccgctttcggtgttgacctgccagacatgcaaaaaagtacgctcgaacgccggataagtgatccggatatcccgctgcccctgcgcgagttactggctatccgtttacaggccagcaccaccagcaccagtaaatacaaagccctgatgaatggtgtcagtgctgacggacgcctgcgggggacattacagttctgcggagcatcccgtaccggacgctgggccggtcgcctgttccaaccgcagaacctgccccgcccgacactcgatcaggaaacaattgataacggtatcgaggcacttaaagccggatgtgcagacctgatttatgacgacatcatgcaactgaccagttcagcacttcgcggctgtattatggcaccggaaggtaaaaaactggtggtgtctgacctttccaatatcgaaggccggatgctggcatggctggccggtgaagcctggaaaataaaagcgttcagtgagtttgataacggcattggtgcggatctgtataagctggcctatgcccgcgctttcaatatctcgcctgatgatgtcgataagcacatgcgccagattggtaaagtgatggaactggggctgggctacggtggtggcgttgccgctttcctgacatttgccctgacctacgggctgaatctggatgaactcgcggatgccgcactgcctaatatcccgccaaaagttaagcatgaagcgctgaactggtaccagaaatctgttgaaacgaaaaaaacctacggcctcagtgaaaaggtattcatcacctgtgattcactgaaacgtatgtggcgtaatgcacatcctgaaaccgtctcattctggtacgaactggaagataccgtacgccgggcgattgcctcaccgggaaccacgttcccgtgtcgcaggctcaaagtacgccgggataaagcctggctgcgtatcgttctgccatccggccgcgccgtgtgctacccgtccccgcgtgtggacaacgggcagatcagctatatgggtgttaatccctacagccgtaaatggcagcgcctgaaaacctacggcgggaaactggtggaaaacgtcacacaggccgccgccagggatgttctcgccgctaacatgccggttattgaaaaccacggttatgccattgtgctgacggtacacgatgaagttttaacagaggccccagacagcacggatttcaaccacgaacaactctctgcactacttgccactaaccccggatgggcgccagacctcccgctcagtgccgggggctttgaggcgtaccattaccgtaaggactaa

SEQ ID NO: 277332 - DNA, 258 bp, Morganella morganii
atgtggggattcagtatcggaataataacttttgtggtggcgctacttattccggctatttatgtgttgtccagaggtgcatcttggtttcaggcgtggcttaataacaccgaaaaaccaaatgataaaatgattgttaaaattgtacttggcttgataattggatttgttttaggtggaatgcttcagtatttttgggatgtgttttcagcttgcaaggatagtgggtatccgttattgcaatgctttaataagtaa

SEQ ID NO: 277333 - DNA, 1524 bp, Morganella morganii
atgtcaacccagagaatcggtatggatatccaagaatttgtcagcaagtttaaaaatcatcctgttctttttattggtacaggatttagccttcgttatctaactcattcatatagttgggataatctactttcccacatatcatttgaattaaccggaaatccagaattttattatgatataaaagcagaatctgagataaatggtgagtatagatatgatatcttagcaaccaagttagaaagtgaatttaacactatactatccaaggaaagagatggaaaatttaaagatataaatgacattttctatgaaaaaatgaaagatggcattaagacaagtcgttttaaaatctatatttcatccctattaaaaaagcttgaaataaaacccgagatgcaaaatgaaatagactcattaataaaaacaagaaaaaacataggctctataataactactaattatgatcaattaatagaagcactttttgatttcagcccattaataggaaataatatccttttaagcaatccatatggttctgtgtataaaattcacggctgcacaagtgactataacaacataataataaccgaagatgattataataaattcaataacaaatacgaattaattcgcgcccaattactatctctattcattcacaaccctataatatttataggttatagtattagtgatacaaatataaagcaattgctcagaacagtgttctcctacgtggatttaaacacaaatttagctaaaaacataagagataatttcttattagttgaatatagcaaagatgacatgtcaaccgagatagtagagcatgatatcgatatagagggaatgtcaataatccgaattaataaaattaaaacggataattacaatgctgtttataatgccatttcacagttagttctccccgtgtcagcaatggatatcagaaaagtacaaaaagtgtggaacactataaaaagtggtggcgaaatcaaggtaaaaataaccgaaaatcttgactctctgaaaaatgaagaaatggttattgctgtaggttctgaaaaaacaatacaatatgtgtatcaaacaaaatcagagatgatggaaaactactttaaaataatagatgaatccaaccatcaattaatagaattactaaataagcaaaaaatacaaacatctcaattctttcctatcttcgccttctcaagaatatgtcagtcattagaaaacgttatggattataaaaaacaacaaataagaaaattagatgagcattataagagaacacatgaaagtatgaattgtgagaatatgcacactactgttgagagtattttttctgacgaaaacatatctaactctaaaaaattagactgtatttatcatagctattttaatgacaaaatacctcatgaaaatataaaagaatacctaatgaattctgatttaaaaacctcaacagactacaggcgcttactttgtctttatgactttaaatgttattccgactaa

SEQ ID NO: 277334 - DNA, 552 bp, Morganella morganii
atgaaagttaaattaactaatgtccgtctggcttttcctgaactgtttgaagcaacacaggtcaacggccagggcgattttaaattccgtgcaaccttcctgatcgacaaaaaacgcaaagacctgattgatgctatcgagcaggcaatcaaaaaggttgcgactgacaagtggggagccaaagcagaatcagtactgaaatctatccgtggtaactccatgcgctttaacttccgcgacggtgatgaaaaagcagagtatgacggctacgctgaccacatgtacattggtgccagcaacaaagcccgaccgctggttatcgaccgtgaccgctctccgctgacagcacaggacggccgcccgtactccggctgctacgtcaacgcgacgatcactctcttcgcttacgacaaccagggcaaaggcatttccgcatccctcggcggcgttcagttctaccgcgacggtgacgccttcgccggcggcggtgtggccagcgaagacgacttcgatgatcttagtgtcggtgaagaggaagaatcactgatttaa

SEQ ID NO: 277335 - DNA, 1287 bp, Morganella morganii
atgcctgacgttcacgcacgattatcgccttcttcggcgcatcgctggttacgctgcagcggaagtatcgctctggaagccacggtacccgataaggaatcgccttttgcgatagagggtaccgccgcacacgcactggccgaactggtactgagtaatctggcggttccggaaaaagaacacggcaaaagcgcacatttttatctgaactgctatccgctgaataaagcggataccccgcaggtcaacgatgaaatggcagacgctgtgcaaacctatgtcgataccgtctggcaactggcacaggggaaagaactgcttattgagcagcgtgtcgatttttcagaggttatcggtgttgaaaattctttcggtaccgctgacgccattattatcgatggtgatgaacttcaggttcatgacctgaaatacggtaaaggtattgcggtcagcgctgaaaataatgagcaactgcaactgtatgcactgggggcgttagaacagttcagtatgctgtatgactttaaaacggtccgcatcttcattcatcagccgcggctgaacagtgtctcagaatggacagtcagcgttgatgaactccaacagtttggggaacgggcgcgggaagcggctgatgaagtcgttatcactaccagtatcgccaactgtgatggtgtggagtctctgccgccatccagctttaaccccggcgaaaaacaatgccggttctgtaaagcgcgcggcggattgtgtgctgccgaagcgcagtatgcgttagacctggtgaaaggtaattttactgatttaaccgcaccggttgaaccacaactgagtgatgctgcatcccgtattgctgtgctgacacctgaacagctggcagatatttacgccggtatcgatacggtggaaagcttctgcaaagccctgcgcaaccgtgtatcggatgaactcaacgccgggcattctgttccgggctacaaactggtcaccggtaaaccgggtaaccgcgcgtggcgggatgaacaggaagccgaagcaacactgaaaggcttccggctgaaacaagaccagatgtacagcatgaaagtgatcagcccgacacaggctgaaaaacttatcaaaaaagacagcccacgccgctggacaaaattagaagcgctgatcacacggtcagacggcaaacctaccgttgcgccggaaacagatccgcgccctgctctcgtcattaaccctgaaaccgatttcgacgatgtatctgacgatgcactcgccgcagacctcatttaa

SEQ ID NO: 277336 - DNA, 711 bp, Morganella morganii
atgagccttgaattagccattaaagaaaacaccgaagtcatgcgtcagcttattgccgcaatgaccggtgccggtaatacatcacaaaaaacattcgtcgcagataccaaacccgaaccgaaagctgaaaccaaaccggcaaaaaataaagctgaaaaagtggctgagacaccggtaccggcggatatcaacagcctgaaccttgagcagctcgtccatctggcggtcctcttcccggatgttaccgaaccggacagcgggcatatcgccaaggttgacgcaacaattaacgccaccggggataaacgtaaccgtcaggccgatgctctggacagcgcgctggccggcgtgagcgaactcaaaggactgtccaatgccgtcattctcgacctctgtgcggaaatggttgctcattgggacgatattccgggcatcagtgagcgacgggaattcgctgtctctctgctgagcgaaggtaaaacacagtctgatgacgaagccgaagccgaagccgaagccgaagccggacaggatcctaaagtgctttttgcacaggcggaacaattaatcctgcagctggcgaaaggcggttaccgtaacgaagcggtggggattctgaatacattcggcgcgaagaaactcggccaggtgccagaagataaactggcggaagtcgttgcactggctgagaaaacattagcgggggaataa

SEQ ID NO: 277337 - DNA, 135 bp, Morganella morganii
atgaaaaaagtaaaaattttgccatcggatagatttccgatgaataacaacgtccggcgtttacgttaccagcaaaaacgcgaagcgctgaagcgcaacccgaatacccaatttcctgtcactgtatatctctga

SEQ ID NO: 277338 - DNA, 615 bp, Morganella morganii
atgacacgattaacaaacgatattaaaaatgccatcaccaaaaacgccctgaaaaaggccggaattttcgcagaaaaaaaattactcgcgacagaacgtattcagttagcaaatgatgtacggatcgctgcattaggtggtaccgataatgctaagaaagctgaacatttatataaaaccgcatctgcgctggtagccaaacttcaggataccgttaacaaggatacctatatcagttatgccgaaagctatggcatatccgcagcattcggtggtcagaaggggtggttacgttacggagaagatgagaaaggggaaaccatctatcagcttacccctcataaaaataaaaatcttttccccgctgaccatgaattaagtaagcgctttacccagcttaatgaaaaagaagcgctgattaagaaaaaagaggatgagatagaagccaatgtaaaagccgctttaaattccgtatctacgataaaacgacttattgacgtgtggcctgaagcaaaagaacttattcctgatgatattaataaaacctcagccacattaccggctgttcaggttgaggatcttaataacttaattggtctgccgaccgaaaaataa

SEQ ID NO: 277339 - DNA, 624 bp, Morganella morganii
atgtcactggcattcagggttaaggaaagacgattaaaattagggttaacgcagcatgaattagctgagttagtcgggatcagccagcaatcggttgagtccatagaaaacggaagaacgagaaaacccagaagcatacttgaattagccaaagcgctgcaatgccccgcagattggctgttaaacggcaaaaatattattcctatcgcagaggttacctctcgtcgtgtgccactgctcagctacgttcaggcgggtatgtttaaagaggcaaatcctattacggactgcgaaggtgattttgaatatattctggttgatgatgatatcagcgctaatgcttttgccctgcggatcgaaggggatagcatgacacctgagtttaaagaaggagacatcgtcgtcatagatacagaaatttggcctaacccaggtgaatttgtatttgcgaagaatggcggtaatcagggaacatttaaaaagtatcgccccaagggcatcggcaccggtgaatttgagttacttccgttgaacccagactatcctgtattaaatagccaagactatgaaattactatcatcggcgtaatggtggaacaccgtatctatcgccgcaaacgctaa

SEQ ID NO: 277340 - DNA, 213 bp, Morganella morganii
atgacgctaggaaccagagtaaaagaaaaacgaaaagaacttggttatacccaggcaactttagccgaacatgttgggctgacgcagcaggcgattaaccgaattgaaagtgacattatcgcccgcccgcgctttattcttgagctggctcaggtgttgcactgcgacccggaatggttattgaaaggcccttctgataccaaaaaggcttaa

SEQ ID NO: 277341 - DNA, 2241 bp, Morganella morganii
atgcggatctcatattctgtagggcggtcggcgcgggataatcgcccgaaaccggcggaggcctcaacctttgaagattacaaacgtgcgatcagagcattgtctaaaacaataggcattaagcctgatgatactgctgatgttatgcggaagaaaaagtcgcttctgtactatatctggggcgctatggttgaccagaacaacggacgcaacgccgcaaacgccggtcagcgccgcgtgctctggctggatatggacggatgttctgccggcgcctggagcaccttaaccggtgtgctcagcttctatcagtgcttttgctataccacggccagccatgaacatccggccgccggcagcgaacaacgctggcgcatcggtatgctgctgtcacgggatgtcagtgcaaaagagtacgccaagttaggcccgcgcatcgagcgtgagcttatcgactgctacgaactgctggacgatgaaccggttaagtgggaccgttctgtttatgagccgtcgcacatggtgtttgccccgcacgaaggtgctcagttccttgagttcagtggtgctgtggtggatgttgataccatgctggcatcggatattactttcagcagtgatacctcggttctctctgattttgacgacatatcagatgatgaccttacccgtctggtggatctggataatatcagtgagcacacgttcagtgatttacgttctgcactgtggcacccggctgtactgcgtctcgcggaaacgtatccatcctgggccgatatggggaaccgtctggcctggttcaaaaacacggattatgaggaacaggcgcgggcgctgtgggttgaatggtcggccgcagctgcacgcggtgatgcggacgctgccgaaaataaatggccgcagctgaatgctgaccgtaccggctatcaggccattttcaccctggcgcagaaagcagggtgggtgaatcccggtaccgaacggttaaaaacggcggtggcaaccgcagatgatttcgaggatttgcagaccggtaatgttcctccgcctttaccctcgtttaaacgggataagttcgggcagattgaatccactatcgacaacgcggccaaagcggtgatgtgtccggattttgtggatatcgagatccgctttgatattttccgggatgaaattgtgttcgcccccgccggaacggaacagtggcagccttttactgatgctgactattcacgcctgcggatcaccatggaaaagcggggcttcaagccggtagggcgcgagctgatacgtgacgttgtgcagctggctgcagtcgaaaaccagtttgataccgctattcagtggctgaacgggctggaatgggacggtatccatcgtgtggagaaattctatcatacccacttcggtaccgacgataatccgtacacccgtgctgtttcgctgtatatgtggacagcgatggcggggcgcgtgctgaaaccggggattaaagccgatatggtgccgatcctggtcggtgttcagggctgcggcaaatcgtccggcgtggcggcgctgtcacccgatccgtctttctttaccgagatatctttcgcggaaaaagatgatgacctggcgcgcaaaatgcgcggtcgtctggtggcggaaatcggcgagctgcgtggcctcaataccaaagaactcgagtctatcaaggcgttcgttacccgcacgcatgagaactggatccctaagtttaaggagttcgccactcagttccctcgccgctccctgatcatcggtaccacgaacgaggatgagtttctggctgaccgtaccggtaaccggcgctggttgcctgtagaggttcaggcggtacaggttgatgatatctcgcgtgatgttctgcagttgtgggcggaagcccgcgagatgtttaaagccggtggcattcagtttgatgcggctgagcgactggcggctgaggtgcatgagaagtacaccattaaagatgcgtggctggatattatcgagcgctggttagatgagccggatctgatgacaggcgaaaaaccacgaacacgcgattttttacgtgctgccgatgttctgcgcgaagccctgaaccttgacccgaaaaacatttcaagacgcgaacaaatgcgaattagcaatgttttgcaaaattgcgggtacaaatcggtacggcagtatgtggaaggtaagcaacaacgggtttatataccgacgacatga

SEQ ID NO: 277342 - DNA, 432 bp, Morganella morganii
atgagcagagacattcagaaaatacttttgcactggggcggctggtcagccgggaatcactgtgcggatgtgagctggccccgtatcgccgcagggttcagcggccttgtgagcagcaccagcggcagcaggctgtcatgcagcgaccgtgacggccttgttatcgatctctgtgtcgcaaagctgggaaccgtcggcatggagcgtgaacgcagttacattgaggattattacattaagggaatgtccaaacgtgcaattggccgcaagttcagaacacgggagggtgaaatacgcgaaagaatgcaaatagccgaaagttttgttttgggatgtattgaaacccttaatattcaattagatatagacttactgtataaaaaacaaacaaatgaacgtaataagttggtgcgcgcgcaaaatgtgtgttag

SEQ ID NO: 277343 - DNA, 345 bp, Morganella morganii
atgaaatacattacagcggtagtcctcctgctggctggttgtgcctatgatgggcataaaaaccgcaacatgcagcataacgttgcagccaccaccatgaatgaatacgtcgagcagatccgcgattacatgcgcggcgcgctcgtaggttttgaaaatggtaagcaatgcaacatagtgcttcaatatggtagctctggactgctggagtcaacaacggcccaggaaggcgatcctgatttttgttctcatattctcaagtatatgatcgatccccttcaccccgtaccaaatgcgccgatcgaggtgcgcaataaaccaatttatttgcatttcaaattatga

SEQ ID NO: 277344 - DNA, 438 bp, Morganella morganii
atgtttttttccgtcggcgtggaaaccccacatgatgaaaatacagcatatggcatggttatccctgcttttgaagcatacggctacagctgtttttctgccgctgatgaccagaaagatattccctcaatggttcgtgaggctgttttactgaccgttgaagatatggttcacagtggtaagttttcagtcgatcagcttgaggatgccggtcatcttgtctatgcagctaatccggagtattcggactttgacagctggtttgtgattgatattgatctgtctgatttcgaaggtaaacagcagcgtatcaatatcgcactgccggataccctgattaaacgtatcgataatcaggtcaaagaaagcccgatgaaataccgggatcgcagccacttcctcgcggaagcggcacgccatgaattaatatcgggttga

SEQ ID NO: 277345 - DNA, 183 bp, Morganella morganii
atgaaatcagctgacctgataaaggaattaatagccgcaggttgtgagctaaaaaggcataacggagggagtcatcaaatatggtggtctcccgtaaccggaaaaacattcccggttccgcaccctaaaaaagacttaccaatcggcactgttaaatccattagaaaatcggcggggatctaa

SEQ ID NO: 277346 - DNA, 279 bp, Morganella morganii
gtgaaaatctatatcgcggggccaatgtccgggtaccctgactttaaccgcccggctttcaacagcgcagcacacagtatcagttccggcggtaatatccctctgagtccggctatcctgccgggtggtctggatgagccggattacatggctatctgtattgccatgctgcagcgcagtgactcagtcctgatgctacccggctgggagaaaagcgcaggggcagcggcagaacacgcgctggcgaaaaagctcgggctgattattcattacctgtga

SEQ ID NO: 277347 - DNA, 192 bp, Morganella morganii
atgcgcatgtctgaaaaatattccagccctgcggcgtacgcctgggggtttataacatccgccctgggtgttctgtctctcgaccagtgggcggttctcatcgggattatctgcactgtcgggacgttcctggtgaactggtattacaaacgtaaagaatttcaacttagaacaggggggccgcgtgaataa

SEQ ID NO: 277348 - DNA, 477 bp, Morganella morganii
gtgaataaccgattatttaaacaagtcatggccgcctgtactgctggggcgattgcaggtgcgctggtgctgatccccgcatacgagggtgttgagtacaaaccttaccgtgatgtggttggagtgctcaccgtatgttacggccataccggcagtgatattcagcccggcaagctgtatacggacgctgaatgtaaggcgctgctgcatgacgacctgacgaaagtgcggcgtgcagttgacccgatgatcaaagtgccaattgatgataacacccgcgcggccatctattcatttgtctacaacgtagggtccggtgcgttctcgcgttctacgatgctgcgtaaactcaatgccggtgatatcgccggggcgtgtgacgaaatgaaacgctggacatttgccggtggcaagcagtggcaggggctgattaaccggcgcgaaacggagaaagcgatatgccacggaaccctttaa

SEQ ID NO: 277349 - DNA, 159 bp, Morganella morganii
atgccacggaaccctttaactctgatcatcattgctatcattctgctgactactgctctgttggcgggttgttatctgtattcactcccgaatcactgtaatccgctaccgggtaacccactgaacggtgtgattcattatgagtgtgaagcgccatga

SEQ ID NO: 277350 - DNA, 534 bp, Morganella morganii
atgaaaaaggcaatcactgtattactcaacggctgggtgtgggcggtagtattcttcggtctgtggatgttcagcctgttatcggctgaaaaatcagaggggcagcacaaagacaatgtgatcaccgaaaagcaaaaggtgattgataacgcctacaccagcatcgatatctttgaccgcgtggccgcagcgaacgccaaccgcagcatgcgcatcgaggccaaatcacaggagaagcagattgaataccgcaccatcatccggaaagagcctacctgtaatttgtatattcctcagcctgtttctgacgggctgctcagccacgtctacgccatccgtgaatcagcaatgcgttccgctcccggcatcgctgacacaaccggtgccggcaccgctgccacccgccgactgacatactgccaggcggttgagtggatagagccgctgctgatggcgctggataaggcgaacgggcagttaatggatatccggaaagcggatgcagagcgtaacgggaaggcgcaatcgcaataa

SEQ ID NO: 277351 - DNA, 573 bp, Morganella morganii
atgacaactaaactcccgcaaaaacaaagaatgttttgccacgagtacattgtcgatctcaatgctacccaggccgcaatccgggcgggctatgcgccaaaacgcgcgagcgaaatgggttataaactgctgaacaaaccgaatgtctgtgtgctcatcgatgagttaaaacagaaccgcatcaaacagttaggcattgatgctaactatgtgcttatgcggttggttgaaatcgacaaaatggacgcggcagatatttttaacgaggacatgagcctcaaatcaatatccgactggccggaagtctggcgccgctacctcagcgggtttgatcttgccgaaatgtatgaaggccgtggggatgaccgtgaaatggtcgggctgctgaaaaaaatcaaatggccggataaagtccgtaacctcgaattactgggtaagcatgttcacgttcaggctttccgtgagcaggtcagtaatgagcatacaggtaaagacggcgggccgattcagcataatcattcagcctcggagttaaccgatgaacaacttgcagcaatcatcggcagtgagtaa

SEQ ID NO: 277352 - DNA, 1431 bp, Morganella morganii
atgaacaacttgcagcaatcatcggcagtgagtaagcaggatgccgcaagggaattattaagacgacgctctgccagaaaaagcctgcatgaattcatccggtacattaacccggaatacatcaccagtcacttttcggaaacggtctgcgcatcactggataattttctgattgagatgatggttggtaagaggccgattctgattctcggcgcaccgccgcagcatggtaaatccgatattgtgtcgcggtatcttccggcgtatttcttcggtaagtatccggatatgcgtgtcgcagggctttcttacggtaaagatttagcctctgacatgaaccgtgatgtgcagcggatcatgatgagtgaagaatacaaagccttgtttccggaatcgtgcctgaatgctaaacgtgtcgttacggtcgagattgaagcaaaaagaaactcagaaacattcgagattgtcgggcgaaaaggtgcctacatcagccaggggatcggcgggccattaacaggtaaaaaagttgatctcggtattattgatgaccctattaaaaacgcgaaagaagccctcagcccggtaacgaaaaaggcgacatggaactggtacatttccacattcaaaacccgcctgtcgaagaacagcggtgaaatcattatggcgacccgatgggcgaccgatgacctgtcaggcagggtaattgacagcagcgacaaagcgaaagtattagcctttcccgccattaacgagcgcggtgaggcattggtacccgaactgcatccgattgactctctgcttgagaaaaaggcgctgtttggtgattacttctggtctgccatgtatcagcagaaaccgaaaccgggagacgggcagatattccacgaagaattcgcccggtactacctgccgaaagatctgccggatacctttgatgaagtcattcatagctgggatatgacgtttaaggacagcgacggcacggactacgttgttggtcaggtatggggcaagaagggggcaaatgcctatctgctgtatcagatccgcaaacgcatgagttttaccgaaaccctgaaagccgtgaaattactggttgagaaatacccgcaggcgcggcgcaagctggtggaggataaagccaacggaccggcggtcattgatacgctgaaaacgacagtgtcaggattggtgcccatagagccggacggcagcaaaatcgcccgtgctcacgcctgtaccgctgaatgggaagccgggaacgtctggctgccgcacaaagatattgcaccttggatcaccgaaacggtggacgaaataacaacattcccgtttgccgggcacgatgacaccgtggatgccatgacacaggcactgcggtatctgttccagaagaaaggcggcggattcttttcacgcaagaggacataa

SEQ ID NO: 277353 - DNA, 1512 bp, Morganella morganii
atgtggccgttcagaaagcggaaaacagcagaggttgccgcacctaagcggtcagcgttctcaacgcatttatattcagcactggcagccgaaacaggatttcaggggctggccttgccgcaacccaccatgcagggcgtggcgatggacagtatcgacggcactgtaccggcattcaaaggcggtcaggtatacggcgttcctgagtcacaggcagcgtggtacgcctcgcagatgttcatcggcaacaatatgtgtgcggtgatcgccaaacactggctggttgataaagcgtgcagtatgccagcccgcgacgctgtccgtcaggggtatgacctcgattgttccgggagtgacaaagaaacgcagaaaaagctgcgtaaactcgataaaaaataccgcatccggcaccacatgaaagaactggtgcacctcgggcgggtttacggtggcaggctggcactgtttgtcgttgaaacatccaacccgaaggaatggtatgaaaatccctttaatctggatggcgtgacgaaaggcatgtacaaagggattaagcagatagatccgcagtgggtcacgcctgacctgacggaagctaatttacaggactcggccggacttgatttttacgacccgacttactggattatcggcggacgccggtatcacaaatcgcactttgtgaagttcgtgcctttcccggtacccgatgtgctgaaaccgacgtataactttttcggcgtatcagtccctgagcgcgtgtacgagcgagtatatgcctctgagcggaccgcgaatgaagccccgcaactggcgatgacaaagcgcctgacgactattggcatggctgatgttgagggggttgacgcagccaccattcatcagaacatgattgaatttacggagatgcgtgataactacggtgtgcaaacggtcggagccgcagacactattcagcagttcgatacgtcactcgcggatcttgacgcaaccatcatgacgcagtatcagcttgttgccgctgccgcaaacgttcctgcaacaaagctgcttggcacaaccccgaaaggctttaacgcgaccggtgagtacgaggaagccagttaccgggaagaactggaaagcatccagaccaatgacttagaagacctgttgcagcgtcactacgacatgttacagcgcagcgagggtatggggacggacgagctttcaatcacctggttaccgctggacagtcctaccgcacttgaggatgcagacatcaaactcaagcaggcacagaccgattcagcgtatgcagcggtcggtgcggttgacgggctggatatccgtaaaaagctggcggcggataaagaatcggcattttacggtattgacgtgaacgaggacgattatgccccggaaaatacgggtacgaaccaaacgggcacggtgggcggcatcccgtcaggcggttatgaagggcaaaccgctgcaatattcggcagcagcccaaagccgttaccagcgtga

SEQ ID NO: 277354 - DNA, 792 bp, Morganella morganii
atgaagggcaaaccgctgcaatattcggcagcagcccaaagccgttaccagcgtgacatgtcacaactgattaaaggcatgattgcagattacgaaaagacgttcagcagtctgcatgaggattttgacggcgtaaccatggatgccagctttgccagccagaccaaaatctggctgaaccggcttaaacgcaagtgggataagatttttaacagtaaggccgcagagatggcggataagttcacctcgcaggtggacatgaacgcacagcgcagtctggacgattcactgaaacaactctccggcggtattacgataaaaaccccggccatgcccgaagccctgaaagacaaaatgattgccgcaacggcagaaaacatatccctgatcaaatccataccgcagcagtttcattcccgtatcgagggcgcagccttgcgttcggtcagtcagaccggcagcggcagtaaaaccctgctggatgaaatacgggatatcggcggggtgacagagaaacgggctaattttattgctgttgaccagacccgaaaaattaccacggcggcgaactatgagcggatgaagtctgccgggatccgcaaagcgatatggcatcactcggcaggcagtgccgaaccgcgtgaattacatctgcgtctggacggggaagtattcgatctggataacccgccggtgattgatgaaaagaccggtgaacgcggattacccggacagttaccgaactgcaaatgcttctggacaccggttatcgactttggtgaggagacatga

SEQ ID NO: 277355 - DNA, 1281 bp, Morganella morganii
atgacaaagcgaacctatgacaacaacggctggctcgaagtaaaagacaaccccatctcaaaggctggggtttttgattatctgggggctgaaatcggcgcaccggagccggacagaatttacaaagtgttccggccgccggaggaactggccagtgaagaaaccattaaatcattccgcctgaccccgttcattgtcgatcacgaaatgctgggtaaaaacgccacaccggcagagaaaaaaggtattcagggcgttatcggcgaaaacgtgtattacgaccatccgtatttgcgcgggaatatcaaaatcttttctgacgccgctctgagcgatatcagcagcggaaaaattgacctttcaccgggctaccgcagccggtatgacttcggcaaccccggtgtgtacgagggggaggcatacgaagttgttcagcgccacctgcgtggcaatcaccttgcattagtcgatgaagggcgcaccggcgctgacgtggctgtgcaggatcatcttgttgtaaccattgatacaaaggaacttattcgtatgagcgaagaagacaaagacaaaaaacagccgaccggtgacgagaacggatttacaccggagcaggttgagcagattaaacaaatcgtcgtggccgcactggctgccggtacaccggcaacggatgaagacccggagaaaaaggaaacgactgacggcgatcctgatccggaaaagaaaaccggagatgccgaagccgaagcggaaaaagccgttgaagacgcagaggcggaagctgaaaaagcggaatccggtgacccggaagcggtagaagcggcggaagtggctgtcgaaaccgcagaggaagcgattgccgaagcgaaagaagaacttgatcaggcaacaaccgatagtctgacgcgtcgccttaagcgtctcaaacgcagtattgcgtccatggatgaaatgtcctcgatgaagcgcaaaattgcccgtctggaaaaagccagaccgaccatggacaccggcgaactgttaaagcagatcggggaacgtgacgcactggcgcacaagctggcgccgtttatcggggtatttgaccacgcaccaatgacgaaacagcaggtggcggaatacggcgtggaaaaactcggtatccgctgcgataagggcacggaaagtattgccctgaacgcctggatgcaggggcgcacaccggactcacaaaaagcgcatgcgacgatggataccgccgcaggcacggactcaattatgaaaaagtggggtgaaaaataa

SEQ ID NO: 277356 - DNA, 498 bp, Morganella morganii
atggcaatcccgaataccgtggcgaacggcatgatttccggtgttatcggtgaaatcagccacaacggcccgacccgcgtgaccgcagcggtgatcagttctgcggatgaaacaaaaaacctcttcggccgtgcctacacatacaaagatgattccgttgaatccgtgcaggttggcggtgacggtgcgtttgccgggatcatgattaacccgaaagcgtaccgtatcggtgaagaatacgcccgtaacgggacgcagggtgagtttctcaccatgggtgagattaacgccgaaatcaccgccggggtgaaaaaaattaatgccccggtggtgttcagcccggcggacggctcgctgtctgcgaaggcaaaagcggaagccggtgatctggttatcggttttgtcagccgtcacattgagtcagcggaatcgccgcatctgtgcgtgatccgtctgaccgaaatcccgtacacagtggctgcgaaggaaggtgaataa

SEQ ID NO: 277357 - DNA, 1068 bp, Morganella morganii
atgccagtcagtaaagaaaagttttatatgtccggccgcgatatccgcaagcacgggcaactgaatattaagcccgatcagaagtggacatacagcgaactggatcagattggtttcggtggtctggccgcaatggactccgcgttaaccggcccggctatgtccggcgggttcattcagcgtgagatgttacaacacgtactgccggggcttatccgtaccgccacccgcgtccgcgtgctggacgaaatcaccggcgtactgaatgccggtaactggcacgatgaagaaattatcctgaatgtagcaaccccggtcggtaaggcggagttgtacggcgatcacaccaatatcccgctggcatcctacgggcaggatcaggaacgtcgcggtattgtccgttttgagctgggttttcaggtcggaaagctggaggaagcccgtcagtcagcagcaggatttgagactgccgcagagaaacgtaatgccgttgccgaagcgctggagcaggggcgggaacgtatcggttattacggtttcaacagcccggacacccgtgtcttcgggatgctgaatgaaccgggtttaccggcgtatgagacggctgccgcaaaatggaaaggcggcacatttgctgccatcaccggcgatattacggccatgttttcgcgtctggagatgcagtccggcggtattatcaaagatgatacggctatcactctgaccctgccgctgggctaccgctctgcgctgaatgtggcaaatccggttgcccgtggtgaaacggtgtatcagtgggtgaaagaaaactacccgaatctgcgctttgtgttctcaccggaatttgccggtgctaacggcggggcggatgtggcatatatgtttgccgaaaccgtggatgatggctcaacggccaccagtgcggttcttctccaggtggtaccggtgaaataccagttgctgggttcagagagcaaggtcaaaggctacctggaagatgccaccaacgcgaccgccggtatcatcgtcacccgtccgtgggccatcacccgcctgaccgggatttga

SEQ ID NO: 277358 - DNA, 354 bp, Morganella morganii
atgcctctgtatatctattgcaccctgtccaacgaccagaattacgccacaccggacggtccggtatttatcgccggtcaggccaatgttatgaccagacacatgtacaccccgcgcggccgtgtgactgaaatcagtgatgagcagtatgcgcagctgaaaaataaccacgtctttaagctgcacaaagaaaacgggtttatcgcggtggaaaaccgcaaagaggatccggataaagtggcaaccgatatggaagccagcgacaaatccgccccgctgaccgaagaacagatgatcgcggaggggaatgagccgccggtcagcaacaaagacaaaaagaacagtaaaaaataa

SEQ ID NO: 277359 - DNA, 429 bp, Morganella morganii
gtggacccgtccgactttccgttagagtctttccgtgccatctataaggctttttccgcagtgcctgatgatgaaatttttatcattgcactggaagcactgaactacttctccccctgccgtggtgtctgcacaaattcagcgtggatgctggtcgtcgcgcatatgctcgacctgaatggccgtattgctgacggggaatcaccgaccggtgtcgtgaccagtgtcacgatagataaagtcagtgtgtcctacaccgcgccgcctgccggttccgattggtcgcactggttcaagatgagtacctacggccagcagtttctggcactgataaaacggtgcagtgtaccgcgttaccacggcggtggcggagaaaggaccgcatttcgcggagcctttggccgattcacacggggaggtcaccggtga

SEQ ID NO: 277360 - DNA, 459 bp, Morganella morganii
gtgacaaaactggcacagctgaaagccgtgtatgacgaactggcaaagaaacagcttaaggttggtttttttgcacactcacagtacccggacggcacacctgtcgcgtatgtggcggcgattcaggaactcggttatccggccggggggatcccgccgcgtccgtttatgcgcccggccatgacagaacataaaccggaatacagcaacctgattgtccgggctgtgaaagccgcagtgaaaggcaatatcgccatcactgacggactgacgcaagtcggcgcaaaagcagcaggtgatgtgaagatggtaattaaatctgtcaccacaccgccgcttaaggataccacggtagccgcccgtgcccgtcggcacagcaaagggaaagccaccagtaagccgctggttgactccggtctgatgctgcaatccgtcacttttgccgtggaggataaataa

SEQ ID NO: 277361 - DNA, 369 bp, Morganella morganii
atgttcggaaatctgcaccggattgcctcgcggtatgttccgcagcaaaccgtactctggtaccgcttcaaaagtcgtgagactgacgaacggggccatgatcagaacatgtattatgacccggttgaggttcgcgggagctggcaggcggtggatacccgggacattcagtctatggggctggacaccagtcaggtataccgccgtttgtatacatcccacgatatcagcgccattcagcgtggaacttcaccggattatctggtcttcggcggcaaacgctacgatgtgaccggggatgctgactggtatgcacaggacggctggaagtcggttatctgtattgaggcaggcaatcatgacggataa

SEQ ID NO: 277362 - DNA, 516 bp, Morganella morganii
atgacggataacgatgttgagattgctgtccggaaacagcttctggcgcagctggcgcaggcgggtatcaatatcccggtcagagcagggtttcagtcagcaaaacaggggcgggaagataatttcgttatgttctttcctgcaggggaaaatccgcagggctggcagaagcgcagttataacccgcagggcagtgatgccggtcacctggaagcacagcagtatgaaacaacattccaggtacaggcatttatcaccgaattcagcggttacaccgcgaaagatattacggctttcgtccggatgatcgttaattcgttaccgtttgttgaagcactgcggaaacaggggatcggggtgcagcgggcgaccgccatccgtctcccgtattttgttaacgaccgcggcgattacgaacaaaacccgtcttttgattttaatgtgacctatacccgcacactccgtccggaaacggctgctgttaccgcactgtatccggatattcaccgcatataa

SEQ ID NO: 277363 - DNA, 1488 bp, Morganella morganii
atgccaattaaacaaacccgttacgtcgatatcgcgtcagcggtgatcggcgcgtctgccgtgccgatgcgtaagctgacggcgcggttattttccaccaatcctaaaattcccgccgggcatgtgctggagtttgcatccggtcaggttgatgaactgctgggtgctgactctccggaggcacagtttgcccggcagtatttcagctatgtcagtccggccccggtcagtaaaccgaaagaattacagatcgcctcttacgagccggttggccgggcaccgactttgttcggagcaaaagtcggagctctggctgatctgaaaatgattgctgacggcacgttgtcagtgacattcggcaaggtcaccaaaagctacaaagatatcgatttatccgaagccaaatcgtatgccgatatcgcgtcactgattcaggcgaaactgaatgccgaaagtgaaccgcagttttccggggcgtatctgacctttaatgcactcgacagtgcatttgaactcagcggcggcgtgcaggaacgtgcatctgtcagcgtggggtattccgttcttgcggatgcgatggggctgtcagccggacgcgcatccgagggcaatccggcacagactccgctggaggcattcaaagttgcggagcaggtttcggactccttcggcagcgccacatttctgagtgaactgtcgctggatcaggccgtcacactggcacagtacgttgcaggggagaacgtgaaataccagcttcatctgagtgtgacaaaagacaatgccgaagatttcagcgcagcgctgatcggcaccgcatcaaccggtctgaacctgaaaacggaaagcggatattttatccaggcgctgccgatggcggtgatggccgccacagattacgaccgtaccaacgccaccatcaactatatgttccgtcagctcggcgtgacattcccggcgcaggtcatcacagatcaggatgcggaccgtttcgataaactgcgggtgaattactacggcgaaaccgctgtggcaggttcacagatccgcttttatcagcgcggcttcctgtgcggcggcagttctaacccactggacatgagtgttcatgccaatgagcagtggctgaaagcgtatatcgcgcagcagtggttcagcctgttactggcgacacgcggtattccggccaacaaagacggcgaagcccgggctctgatggtcattgccggtgcggtcaccaaagccgtggataacggcactattctggccggtaaaaccttaacggaagtacagaaaatcgcggtgacggatgcgtccggtgatgatctggcctggcacgatgtacaggataaagggtactggtacaacgcacaaattgttgaaagtaccggtgagagcgggttaccggagtacgtgatgaaatacgtgctgatttacggtaagggcgactgggtgcggaaggtcgaaggttcacacaatttagtgtaa

SEQ ID NO: 277364 - DNA, 453 bp, Morganella morganii
atgaatgatgtctcagcaaccggccttgcactggtggtacaggccagcaaaacattcccttccgggatttttatcacgcagtttgcggacgatgcggatccgctggatttaccggcggtggatatcgcgcagaccggtatggatatcaacggcaatctcgtgagctggtcaacgcccacaccgcagaccgtcaccattaacgtgctggcgggcagtgaggaagatcagaacctggcgattcttcttgaggccaacacggcgaaaaaaggccgccgtcatgccggtgacattatcactatggtggcctcttacggtgacggctccaccactaccgcccgtaacggcaaaattaccaacggcagccgggggaactctgcggccagtgccgggcgtcttaaaacaaaacagtacaccttcgtgttccaggattttgactccacgcgtaatcgttaa

SEQ ID NO: 277365 - DNA, 462 bp, Morganella morganii
atgctgattaaaccgaaagaagttcagattaaagatgtggacggtattgaaaaggcatttgtcatcagccgtctgcctgcggtgaccggccgggaaatccttgccaaatatccgctgtccaatgccccgaaaatcggggattacgaagtcagcaaagaggccatgctgaaaatgatggcgtatgtatgcgcagtggctgacgatggtgaagagattccgttaaagacacagacgctgattgataaccatgtgcctgatggtgaatccctgatccgtcttgagctggaaatgctgaagtataacaccagttttttcgggaccggcgggaactccggcttcctgcctttcctcatcagcaaggtcggcagttcactcccgtcagttataaaaatgctgatggcttctttgcagtcatcatcagcgaaggattcgccaccctcaccgaactcaaaaccacagtag

SEQ ID NO: 277366 - DNA, 2136 bp, Morganella morganii
atgtcattgatggatacctttgttcaggtctttgaatttgatacccgtcaggctgacagtacatttgaccgtgtgcagcgttcaacggatgacattatcgacgggatgaggcaggcgcagactgccgcgcagcagggggctgattctctcggcggcgtgttcactgaactctggcagtcattacaggggctgtccggtgagcacgctgttgatttttccacgaacgcggctgatgtggcagagcagaccggggcggtaaaagcgcaggtggatgcggtaaccgattccctgtctgaactggaatctcagcaggcgggatctgatgccggatggcagaatattcaggcctcactgacgggtacggaggccggttatcaggcgctggttcaggcagtggcagcactgagcagtgacaccgccgttctgacggatgaggagagtcgcggtaatgcagtccggcagctggccggtggcatcattaaagcactgcagggggattaccgtgaacttggccggattgcggaagatgtgggtaaaaaaagcgtcgcagctggcagcaatgaggttgtgacacagaaaaaagtacagaacgaactgaataaaacggatacacaataccaaaaggccggggagtccgttgccggatttgccaaaaaagcgctgacagccgtcggtctgtttatgagcgcctctgcccttgtcggtgaatccgttgcccgtgccgctgaaatcgaatccctggataaattcggcaaaaaaatcaatgttgccacggcagatgtggatgcctttgccgggtcagtggctgaactcggtggtacccgggaggcggcgcagtcagatatggaagcgatggcgaaatcattcgggtttgccggtaactccatggaaaaaatcctgcggacggctgacaaagtgcaggggatgaaattcgataaggccaaagccacactcggtgcgctcggtgtgtcggatgataaaaccgttgaactgatgatgaaaggccgcaaagaactcgaacggatgatgagggtgcaaaaggaatattccggcatcaccagagagagcattgagcagtctgtcaaattcaacaaatccatgcagagttttaaacagtcctccggtctgctgaaaaacagctttctggagatggtgatcccgatcctggcaaccggccttgaatgggtcagtaaatttgtcggcttctgcaaagaaaacaaaaccctgatcacgggattttttattgcagtcggtatcgcactggcaacctattacgttccgccgatgctcgcggctgcggcggccacactggcggcaacattgccgattattgccattattgcggtcatagccctgctggcggcagcgtttgcgctggtgtatgacgatatcatgaatttcatcgacggcaacgattcgatgattggccggatcctggataaataccctgcgctgaaaactgtcatccttgctttgtgggatgcttttaaagtcctgtttgattttattaaaacggttgtgaaagttgtggcggatattgtggtggacgcctacaacatcatgaataaagccctgaatgactttatcggctggctgaccggcagtattaaaggggttatggcatggggtaacgatttcggaaaagtgttcagtaccgtttcagataccgttgtcggcatcttcaaatggttgtgggagcagataaaatcctatcttgattggattggcaaaggcctggataaaattaaagagggatgggcgaccttaaaaggctggtttggtgccggtgatgatgtcgaggttgatcagaccgttaaccgcacggtgaatgaacaggggcagattgggtacgacatgccacctgaaaaaacgatcagtgaggaggacgcggcaaaaatggcgcaggccatgaccgcacatctttacggtgtgtcaaatgacccgatgaatcctgtcaccagtcaggcgatcagcaatcagtcgacgaccagtaatgaaacaaacatcagtatcggtgaacttaaggtcgaaacacaggcaacggatgcacagggtatggcggcgggagccaaagatgcactcggatctcagttgcaggactttgggcatcagacaaatacggggctggggaaatga

SEQ ID NO: 277367 - DNA, 531 bp, Morganella morganii
atgattacggaagtgaagatatttgatacggaatccttcactacgctgtttaagtcagtaaatcccgttcaactgaacgttcgggatgagcataaggcgacgcagtttcaggtggaatccggtgaaacccgcagtgaccatgttgtgattaacccggtggaaatcggtatggatctgatactcaccggcgaactgaaagatgcttttgaaaccatgcagcaggcttacgatcagcatcagcttgtcggtattcagaccagggtaaaaacctatcagccgatgctgatagtcaatttttaccacgatgaaatcccggatatggcggacgcggtgaaactctccctgcgctttaccgaatggcggacggttgagccggaatacggtgaactgccgccgcgtaaagtcgcgaagaaagagcagagcagcacggtaaaccgggggaaagtccagacaaaagaggcggacactgccacgaagaaaaaagggtctgttgcaacccgtatcgcagatggtgactggagtctttcatga

SEQ ID NO: 277368 - DNA, 294 bp, Morganella morganii
atgaaaatcataccactgaatgcggctcccaatcagcgtctgcgggttaccctggacggacgggaatgggagctgacgattaaagccgcgcggcgtgtgatgtgctgtgatatccggtgtgatgaccgggtgattgttcaggggatgcgtattattccggggcagccgctgataccgtaccgccatctcactcacggcggtaattttgccctgctgacagagggggatgaacttccgtggtgggaactgtttgaaaaaacacaaacactgatttattgggggagcgatgattga

SEQ ID NO: 277369 - DNA, 816 bp, Morganella morganii
atgattgatttgcgccggatccgctgcggcattgaacttaacgggcgtatgcagtggtatgagggattgcgcatccgggccgggggcaccaaatatgccaatccgctgcagaacgaatgcacggtgaatatcgatggactgaacgcggaaacccgtaccatgctgctgaccgaaaccagtccgttcgccggcaataaatcctcaccccggattgttgttgaggccggtcgtgccggtatcggtattttccggatctacaccggtgatattgtcagtgccgaaatctcatcaccgcccgatgtgacgctgacactgaaggcgaaaaccggcaatgccagcgcccgggatattgtgtcaccggaaggcaggcaactggcaaaaatgagtgagatcgcagctgatattgcccgtgactgtaacgtgaccctgaattttcaggcaacggataaaaatatcggtaactggtatttctgcggtccggcgctgaaacaggttgaacggctgcaggaagccgggaatgtaaaagcgttcattgatgatgatgtgctgtatgtcaaagacagtgataaggcactttccggaagactgcggatcctcagtcagaaaagcggcatggtcggtataccgaaagccacggagaaaggcgttgatgtcacctaccttatcgacggggaatcatccctcggcggcatgctgcgtctggacagtaaatataaccccgccctgaacggggattacattatcgagcagctcaaattcgatattgcgtctcacgacgatcctttcttttatcaggcaacctgcaaacgggcctga

SEQ ID NO: 277370 - DNA, 693 bp, Morganella morganii
atgaacaaaccaaacagtgaccaggcgaatgacggcagtctcgccgggcagtttatggctgcgttccgtaatctgctgatgaatattgatgacatgcttcccgccaccgtagtgagttacgacgatgcgacaaaccgggcggtaataaaaccgctggtgatgatggtcaccacagaagggaagcggatcgggcgtggcgcactgcctaatatcccggtattccggttcggcggcggcgggttctttatccggatgccggtaaagccgggggattttggctggctgaaagcgaacgaccgggatatcagcctgatttttcagcgcggcggcctggaggatgaaccgaatacggccagactgcatacattcagtgatgctatgtttttccctgacacgctcaaaggctgggtgatcgacggcaaaaacgcggacgcactggtggtgcagtcaacagacgggtcggtgtgcttatccctgcatgccgataaagcggtgctggacacaccgttgtttgaggttaatgcaccggaaaccatttacatcgggaatgtgacgattaacggtaaccacgcggtcaacggcaacagtgattcaaacggcggcaccatgaggcataacggcaaagatatcggttcaacgcacaaacacagcggtatccagcggggtaatgaggattcaggggagccggtatga

SEQ ID NO: 277371 - DNA, 345 bp, Morganella morganii
atgaagacctttgatgtgaacgggaataatgatctgttcaccggaaatgacggcaatattgccattgtcagcggtgaaccggcggtaaaaaacgtttgtgcgcagtatgtgaaagcgctgcgcggggaaatgctgcacaaacaggataaggggatcccgtactggaaaaccaccttcgggcgacaggctgatctgccgctgtttgaatccgcgttccgcgagcgtatgcgggaaattccgcaggtgaccgccgtcgtgtcattcagagccacgctgaatgataacgaactgaactatgtggctgtcctgcagacagaatacgggagtattacgttaaatggctga

SEQ ID NO: 277372 - DNA, 1188 bp, Morganella morganii
atggctgactataaatacattacctcatccggtgtgattattccggataccgcagaactgcgggcggcagttgaggatgaattcagagccgtatttggtcaggatctggatgtctccccggaaaccccgcagggggtgctgatcacaatggaaacggaaaaccgtgatgcggtagtccgtaataatgcggaactggcaaaccagattaacccggacattgccggcggtgtttttctggatgccatctgggcgctgatgggcggtcagcgctgggatgccactcagtctatactgacgcaggttgaattcggcggcgtcccgggaactatcattccgaaaggttcactggctgaatcgatggcaggcaagcagttcgctaccacaaaaacgctgattatcggtaaagacgggaaaataaccggcgatatgcgggcggttgaaaccggccctgttgagtgcccggccgggcagctgatgacggtggccagttctgttctcggctgggaaacggtatctaacccgaccggtgcggtattggggcgggttgctgaatctgatttacagtcccgccgccgccggaaactgacgctggcaaaaaatactgtcagtgtcggtgaggcgatcacatcggcattgtatgagctggaaggtgtccgttctctggcataccgggaaaattatactgataccccgatgaacctggacgggatcatactggtgccgcacagcgtatacgtgtgtgttgagggcggagaaagcggggaaattgcccgtgctctgctgcgcaccaaaacgatcggggcggctttcaacggcagtgaggaggttgaggtaccggaaccaatcagcggacagacctataccgtaaaatttgaccgcgctaaagagattgtcctgttctgccgcgtgacagtgaaaaaaacatcactggatgcgcagacggttattccggcggcggttgagtcatgggccagtggggaaaccgagggggacggcgggctggttgtcggtcgcgaagtttccccgtttgaaatatcggccggtattaatgcgtctgagccgcgtctgtttgtcacacgggtggaactgtcaaccaacggcacggactggtcatccgatacttacccggtaaagctgactgagattgccagaatcagccgcagtgcggtgcaggtgatatttgtatga

SEQ ID NO: 277373 - DNA, 663 bp, Morganella morganii
atgacacagactattcagcagttaacatttcactccgatcttctgagggctatcctgtggcagtacgaaggagcggataatctgaaagcgctggcccgttttaaatcggactggtttgaacgggcaaccgtcagtttctggcagaactggtaccgcgatgtgtttaatatcgatacggccggtgatttcgggttgtcggtatggtcccgtatcctcgatgttccgctggggatcgatatcccgccgagtgaaaaagaaaaaatcggtgtcggattcgggaaaaagaaagccaattttcgggcaaacttccggcgtaatgcggattataccctgtcgctgacaccggagcagaaacggctgattatccggatgcggtactttaacctgacccaaagcccgactgtcaccaatatcaatgaatttcttaagcgttttttctggaatgaggacagtaaagtctttgtgctggatccgcttgatatgacgtatatgtactacgtcttcaactttaatccggatgagcgtctgcgcgttctgctggaaaacttcgatctgatgccgcgcccgtctggggtgggtgtcaaataccgtattgtggcgaaaaaagccttcggccacggcgaacaccgtaaaaacttcctggaaagtaacttcggagaataa

SEQ ID NO: 277374 - DNA, 1224 bp, Morganella morganii
atgacaaaaatatttaaaatcccctttgcaacacaaggggatcgtactgttgtgcctgatgaagtacaggcggacggctcactgtcttacactcagggctacggttacgattatgaacgtgatcaggcgacggatccggccgccaaagatatcgaacgcgagaagatgaacagtctcttctatgatattaccggtgcggtcggggaaatacaggctttcggaatgccggtgtgggcggaagagggtaaaccctatgccatccgcagtgtcgtgtatcacaataaaaaagcctggcagtcaaagattgaaaataacaagacacaaccggctgccggtaccgcatggactgaactgaaagcagatatgaccgccggggatgtcggagcctacaccaaaggtgaggctgatcagaaatttcagccgctgggtaactatctgcctgccggttacagctactcaaaagctgaatctgacaccaatttccagccgaaaggaaactatgctccggcgggtaattacgccatgaaaggtgacagttacaccaaagaagagggggatggacgttatcaggcgaaggggaactatgcgccagccggggattacgccgtaaaaggcgaaagttataccaaatcagaatctgataataaatatcaaccgaaaggaagttatcaggcggcgggttacagttattcgaaagctgaatctgacaccaattttcaaccgaaaggcaactacgccccggcgggaaactacgcggtaaaaggcgagagttacaccaaagctgagggggatcagcggtatcaaccaaagggaagctatcaggcggctggttacagctattcaaaagctgaatctgataataaatatcaaccgaaaggaagttatcagacgtcgggttacagttattcaaaagccgaaagtgatgggcgttatgagaaaaaaggagcagcgaaaggctggcgaaaagttggtggtgccggaaatgccagcagctcaatatccatgtcagaagatgtcagaggtaagcaactctatttccagttgacaggatccggcgggattcactggaccacagtatgcatgccaccggttgacaatattggaactcagtttcaccagggcaataccggatatggtattgtatgcacacaaaatgcaggaagaacattgaagtcagtaggtggtcaatatatagagtggtcatctgtttatgtagcagactaa

SEQ ID NO: 277375 - DNA, 801 bp, Morganella morganii
atgatgaatatcatacctaagaaaattcattatgtttgggttggtaacaagcctaaacctcagcttgtacttgattgcatttcaacatgggaaaaacatttccctgattatgaaatcatcgaatggaacaatgagaaatttaaaggtataagcaataaatatgcagaggaagcatttgctaacaaaagatgggcttttgtctctgactatatccgattatatgccttataccatgatggtggtatttatcttgataccgatgtggaagtaaccaataattttgatagatttatgaatcttgatttcttcagttgtcatgaattctataacaacaactgctggcctattacatcagcagtaatgggggctaaaaagaacagtcgaatcatcggcgacctcattgacatttatgatgaaatttcttttaaaacaaagcggggattggatctgacggctaacacgcagaggataacaaaatatctggaatctcggttcaatatacaacctgaatatgataaagattcaactttaaaattaagtaatacagaaataatatttccgtcacattatttttgtatcagtgaagaagataaagtaaacttttctattcatcatttttctggttcatggctaccgtcacactccagaaaagataagattaatatttttaataaaattatcttatctcgatttataaaaatgagtaacttcggtgaaatgccattgcaggatgatgaaagaatagtattcagaatgacattctcaaaaaacaaaaaatatataatattattccgaaaatga

SEQ ID NO: 277376 - DNA, 294 bp, Morganella morganii
atgggtacccgcatgaaaaataatccgaaagaaagtaactgcggtgattttcttccgcaaatcacagatactcgggtagcgaaaaacagcccttatgaaatgctgatggtcgaaatcgaattcacagataccagcattaacagtgatacgcacagcatcgaagaaactaccagaaccccacagcgtacatacctgtcacgagacgttgcagaacgactgcatacacagttgagtgattatctcgaaagaaccgagcacgactatccagaagcggtgaaaaaatatttaatgtaa

SEQ ID NO: 277377 - DNA, 246 bp, Morganella morganii
atgccacgcattgaaattctcttcgataaagagaacaaaccgaacccatcagaaaaggtgcgtaacgcccttcgcgaacagatacttcaaaaaatcggtgacaagtacgggcaactaaatattcgtgtcgcgctcagcacttcacaatccctgatgatcaccggcacaaagaacgctgatgaaactgaggaaattaacgaaattatccaggaaatctggctcgatgatacatgggtacccgcatga

SEQ ID NO: 277378 - DNA, 642 bp, Morganella morganii
atgaattttacccggattgacctgaatacctggaatcgcagggaacattttgccctttatcgtcagcagattaaatgcggattcagcctgaccaccaaactcgatattaccgcttcgcgtaccgcactgacggaaaccggttataagttttatccgctgatgatttacctgatctcccgggctgttaatcagtttccggagttccggatggcaatgaaagacaatgaactgatttactgggatcagtcagacccggtttttactgtctttcataaagaaaccgaaacattctccgtactgtcctgccgttattttccggatctcagcgagtttatggcaggttataatgcggtaacagcagaacatcagcatgataccggattgtttccgcagggaaatttaccggagaatcacctgaatatatcatcattaccctgggtaagttttgacggatttaatctgaatatcaccggaaatgatgattactttgccccggtttttacgatggcaaagtttcagcaggaaggtgaccgcgtactattacctgtttctgtacaggttcatcatgcagtctgtgatggttttcatgcagcaaggtttattaatacacttcagatgatgtgtgacaacatactgaaataa

SEQ ID NO: 277379 - DNA, 225 bp, Morganella morganii
atgcacaatatcgccaacctgactcaagacgaaaaagacaaaattaatgccgatttagccgcagccggtatcgcgtacaaagaaagactcggactgccgtatgatctgtacgaaacagaaaaccagcagcccgagcatttacggccgtacttcaaagagagactggagcaccacagggagatcgggaaaaggtttccgcgcgggttcgagtatgagaagaactaa

SEQ ID NO: 277380 - DNA, 375 bp, Morganella morganii
atgaaaattttcggtattattgtcgttacaatcggatgtattttattacaaggctgcgatactcaggaaacgaaagtcgtaaaatatatgaagtgcaggattgccgttgatgaaatcggagatcaacaagcgaaggttaattttcgcatgaatggggtaacatctgtttttggtgatgaaatacctaaaatgagcggttacgatagtatgcgtttacagcaggaagcaagagatgatttaaaaatggatgttccgaacaaaagactctctgtggaaaatttaatcgatgaatatgaaaaaagctactgtgcagatattcatcagtcgccgcaaaaagaaaaaataaaagaactgaaatatattttaaacctctaa

SEQ ID NO: 277381 - DNA, 2169 bp, Morganella morganii
atgaataaagtcatatctgtatgcccgtattgtggtgccggttgtaaactgaatctttgtgttgaaaacggaaaaataatcaaagcagaaggtgctgatggtgttaccaaccaggggcagctgtgtctgaaagggttatatggctgggattttcttaatgataacaagttactgacagccagaataaatcagccgatgatccgcagagaaaaaggcgcaccgtttgaagttgtcagctggcgggaggcgattaattataccgctcaccggctgaaacagattaaagaaaagtacggtgcaaaatccattatgtgtacgggctcctcacgcggaaccggcaatgaaaccaactttgtgatgcagaaatttgcccgtgcagtattgggtaacaacaatgtggattgctgtgcccgggtgtgtcacggcccgtcagtggccggattacaggtgacattgggtaacggggcaatgagcaattccatcgcggatattgaacactccggttgcctgctggtattcgggtataactgtgcggattctcatcctattgtcgcccgccgggtgataaaagcaaaagagaacggcgcggaaattattgtctgcgacccgagaaaaatagaaacagctaaaattgccacacaataccttcctctgcggaacggtaccaatatggcgctggttaatgcgttcgcctataccttaatcgatgaaaatctgtatgacaaagattatgtcagccggtttacagagggatttgaggagtacaaaaaagccgttcaggattacagccctgaagtggttcaggatattaccggcattccggcctcacaaatccgtcaggcgatgagaacctatgcgcgtgcaaaaaccgcaaccattatgtgggggatgggggtgacacaattcgggcaggcggtggatgtcgtcaaaggcctttccggactggcgttattaaccggcaatctgggaaaacccggtgtgggggttgcaccggtcagagggcagaataatgttcagggtgcctgtgatatgggggtactgcctaatatgttccccggctatcagaatgtgacagatgaaaatgtcagacgtaaatttgcgcaggcatgggggatcccgtatgaatcccttgaccctgaggcgggctaccgtattacggaagtcccgcatctggccattgagggaaaggtaaaagcctattacatcatgggggaggatccgctgcagacagaagcggatttacaactcgtccgcaatgggtttgatgccctggaatttgtggtggtgcaggatatctttatgaccaaaacagcggagcaggccgatgttattctgccgtcaaccagctggggtgagcacggcggtatctttacctgcgcggacaggggctttcagcggtttgagaaagccattgaaccacagggaaatgtaaaacgggactgggaaattatcagtctgctggcgacagagatgggatacccgatgtcttatactgacaacaaagagatttgggatgaactcagagaactgtgtccgctgttttacggtgtcacctatgaaaaactggaagggctggcacatattcagtggccgtgcccgtcagaagatcatccggggacaccatacctctatcagaataacgtctttgataccccgtcaggcaaaggactgctgtttgccgcaccgtggcggaagccggcggaactgccggatgatgaatatccgctgatcctttccactgtccgtgaggtcgggcactattcatgccgttctatgaccggtaactgtaaggcgctggcatctctggctgacgaaccgggatatgtgcagatgcatccggaaaccgcaggaaagctgggaattaaagaccaggatattgtgtgggtggagtcacgcagagggaaagtgatgtcccggtgcagtatcaatgaaacgattaataaaccagcggtttatatgacatatcagtggtggattggtgcctgtaatgaactgacacaggataatctggatccggtatccaaaacaccggaaactaaatactgtgcggcgagagtgatcagaattgataatcagaaagaggccgaagctctagtcaaagaaaaatatgctgtcatgcggaaccggttaatcggtttagttgaaacagcagaaagccagattcaataa

SEQ ID NO: 277382 - DNA, 333 bp, Morganella morganii
atgatgttatatcggtttaaatacaaaacatctgaaatattacaaattattaccacaatatgcctgttcacaagtttaaagcgtaaatgcaaattaacacatattatgagtaattacaggccgaatagtaatttatccgataaaaaagacagaatgtatcgtagtatgaaaaaaactcatatcaatcattatgttgtgatgtgcattgccggagggctacagattattatcggcggttatccggaagactttagatttttcggtggttacgctataaaagcagaggggcggaatgccgtcatttttcattctgagaagggagagaacctatga

SEQ ID NO: 277383 - DNA, 2172 bp, Morganella morganii
atgaacaagaaaaaatgtgcggtcagtgagctgctcagcggcatgccggatctcccgtttgaaacggtttctctcagtgagtgtgatttcacggcggtgtctgtgtgtctggtggcaccggcagataccggcaacggccagctggcgcggatccggcaacagggcttcggccagccggtttttatggtgctcagcggcggtgacgcagaggcgctgccggatggtatcagcggagttatcgatctctgccgcgatgacagccgtacggtcggtgacacacttctgcgtgcggcacaatcctgtgaagagagtctgctgccgccgtttttcgggcggatgaaacattataccgcgcagcagaatatctcctttgcctgtcccggccatcagggcggggagtttttccgccgtcatcccgccgggcagcagtttaccgactatttcggcgatgcattgttccgggctgatctctgcaatgcagataccgcgctgggggatctcctgatccacgaaggggcggcgctggccgcgcaacagcatgccgcgaaagtctttcatgctgataagacctggtttgtgctcaacggcacgtcgtcatccaacaaagtggtgctgaatgctctgctgacaccgggtgatctggtgttattcgatcgtaataaccacaaatccaaccatcacggtgcactgatccaggccggtgccacaccggtttatctggaggcggcgcgtaacccgttcggttttatcggcggcattgacgcacactgttttgatgaggattacctgcgggcactggcggcggaagccgcaccggaaaaagcgggcgacaaacgtccgttccggctggcggtgatccagctggggacgtatgacggcacggtgtataacgcccgtcaggtggtggacagcatcggaccgctgtgtgattacattttgtttgattccgcgtgggtcggctatgagcagtttatcccggtgatgcagatgtgttcaccgatgctgctggaactgaatgaaaacgaccccggcattctggtaacgcaatctgttcacaaacagatggccgggttctctcaggcgtctcagatccacaaaaaagataaacatatcaaaggtcaggcgcgttatgtctctttccggcagatgaataacgcttttatgatgcatgcctccaccagcccgttttatccgctgtttgccgcactggatgtgaacgcgaaaatgcatgagggcgaacccggacggcgtctgtgggcggaatgtgtcagaacggggattgaagcccgtaaactgctgctgcggacgtgtcagcatatccgtccctttatccccgctaccgtggacggccgtccgtgggaagaggcggaaaccggtgttatcgccgcagaccggcgttttttcaattttgtaccgggcgagcgctggcacggttttgagggttatgcggacgatcagtattttgtcgatccctgcaaattattgctgaccacccccggggtggatgtcagcagtggagagtatgaggattttggcgttccggcgacgattctggcgtattatctgcgtgaaaatcagattatcgcggaaaaatgtgacctgaattccatcctgtttttactgactccggcagaaacgccggaaaaaatgcagcggctgatccggcagattgcccggtttgagcagctgctggacagcgatgcggcactggaaatcgtcctgccgtcactgtgccgcacgtatccggcgcgttatgcgggatatacactgcggcagttgtgtcaggaaatgcacaatctgtttgtgaaacataatgttaaacagcgccagaaagagatgttccgccgccgctgttttcctgcagtacggatgtcgccgaaagcggcacatactgaatttgtccgcggcaatacagagcgggtggcggtgtcagagatagccggacgtatcgcggcggaaggggctctgccgtatccgccgggtgttttgtgtgtggtgccgggggaagtctgggaagccccggttcagcgctatttcctcgcgctggaagagactgccgaccgctttccgggcttcgcaccggaattgcagggggcgtatattgagcaggatgacagcggacaccagcgtgtgtatgcctgtgttatccgccatcagcagggagaaggataa

SEQ ID NO: 277384 - DNA, 303 bp, Morganella morganii
gtggtattgctcggattcgatacccctgatctgcctgagtgggcatccgtcacggcggtctgtgagcggctgacggattatgaggtcaccggcgtactgccgctgatgaaagtggtcggtgacggtaatattatctggggcctggataaatccggcactccggttgaggtggcggaaggtgaaattacccggctgccggcggactttaccgcattctatgaggaacaaatccgcggtctggcagagcgtcagtcagagatgatggagcggattgcggagcagaaacgcccggcagctgaataa

SEQ ID NO: 277385 - DNA, 1017 bp, Morganella morganii
atgatgcctgttaacacaccctccgcactgcgggtcgccactgtgcagtttcagcaccgccccggcgacaaagaatacaatcttgcctgtattgataagtttattgagcgcgcccgcacggagcaggtgcagattcttgtgctgccggaaatgtgcatcaccggctactggcatgtgacaaaactgccggatgaggatgtccgcgcactcagcgagccgctggcggacagcccgtcactgcggcatctctgcgcccgcgcccgggaaaccggtatgattatcggggcggggctgattgaagacggcggtgacggccattgctataacacctatgtggcctgtatgccggatggcacttatcatgcgcaccgcaaactgcatgcctttgagcatccggttatccgcagcggtaatcaatacaccgtatttgatacaccgtggggtgtgaaagcggccattcttatctgctgggacaacaatctggtggaaaacccgcgtgcctgcgcgctgatgggtgctgatatcattctggctccgcaccagaccggcggcacctgttcacgcagcccgtacggaatgaaaccggttccgctgacactgtggaaagaacgggataaacatccggaagcgttacgtgcggcttttcagggagagcacgggcgcggctggctgatgcgctggctgccggcaagggcgcatgataacggggtattttatctgttcagtaacggcgtgggacaggatgatgatgaagtccgcaccggtaatgccatggtgattgatccttacgggcggattgtggcggaaagtcaggctgttgaggatgacatggtggtggctgatctcgacctgacactgctgccgctgtccaccgggcggcgctggataaccggccgccgtccggagctgtatcagatcctgacacagcgtcagggttatgaacgggatgcgcggacagtccggtttgcggaagacgctgtggtggtcgctccggcggaaccccggctgaaaggatga

SEQ ID NO: 277386 - DNA, 918 bp, Morganella morganii
atggatctgcgtttactgcgggcatttgtgactctggccggttgcggacattatcatgaggcggcatccgtcctttgcattacccagcccgcactgaccaaacagataaaactgctggagaacaggctcgggctgacactgtttgtgcgcggacgacacggtgctcaactgacggcggagggcgctgaattattaccggcagccacggcgctggtgacacagagccgggagtttatgcatcatgcggcgcgactgagccgtcagttaccggcgcggctgaatgtcgggttcggtatttcggcatttaaagaagcggctgaatttgtcagccggctgcaaagaacactgccggatgtgcaggtgtctctggatgatttcccctctcaggtgatgactgaaaaattactttccggtgaactggatatcgcctttatgcgcctgccgctgccggaaaatacggttcactgcccggaagctgttgcctttaagcaggaaacattatctctcgcggtaccggccggaactgtagtgcagcccggtcaggaattgtcactgatcacccacaatccgctgctgacattgcatgaaaaccggggcgcggggctgtatcaccagataacggcatttctggatgctaatcatgttaccccgcaggcggtgcactacagcagtgatatccggacactgattgccctggtggcggccggtgccggtgtcgctctcctgcccggcgaagccggtgatccggggcatccggatgtcacgttttacccgctgactgactttgcacaggcatcctggaagatgggtatggtctggcggcgtgagttaccgcttctctggcggcagcagtggcgcgagtggctgacagtaaaagatcacccgttcggtttcagtaaacccgggagcccggtgtaa

SEQ ID NO: 277387 - DNA, 1230 bp, Morganella morganii
atggcaaagatcgctaagaaacttactgacactgaaatcaaaaataccaagccagcagaaaaggagatcaacctttttgatggtgacggcctgatgctacgaatcgcccctctctctgtaggcggcaagaaaaaatggtatttcaggtatgcagtgccagtaaccaaaaagcggaccaagatgagcttaggaacctatcctcatctcacacttgccaaggctcgggctttacgtgatgaatacttgtcgttgcttgcaaatggtatcgatccgcagattcacaacaacgataaagccaacgcccttaaggatgccactgagcacacgctacaggcagttgctaagaaatggttagatgagaaggttaagacctctggtatctctcaagaccacgcagaagacatctggcggagccttgaacgaaatatcttccccggtttaggcaaccttcctatcaaagagatccgtcccaagctcttaaaacaacatcttgaccccatagaacaacgaggcgtattggaaaccctgcgccgcatcatttcacgtctaaatgaaattttccgttgggctgcgacagaagaacttattgagtttaatcctgctgacaatctcggccagagattcagcaaacccaagaagcaaaatatgccagctttaccaccagatgatttacctcggttcttgattgctctatctagcgcttctatacggctcgaaacacgtcttctaattgagtggcaactgcttacgtgggttcgtccgggagaagctgtccgtgctcgttggagtgatatagaccaagatcatcgattctggaacatccccggtgagtttatgaagatgaagcgtcctcacaagattccgctgagtaaagaggctatgcgtatacttgagttaatcagaccaatcagtggtcatagagagtgggttttcccaagcattaaggccccgcttaaccacatgcatgagcaaacagctaatgctgcaatcatccgtatgggattcggtggtgaactggtagcccacggaatgcgttctatagcaagaacggctgctgaagaaagtggtaaatttagaacagaggtgcttgaatcagccttagctcatactaaaaacaatgaaatcatagccgcttacaatcgtgctgagtatctactagaacgagaggttctaatgcagtggtggggagattatgttcagacaaaaaagcacaaaattctcgcagcttaa

SEQ ID NO: 277388 - DNA, 1143 bp, Morganella morganii
atgagtgcatcaataaaaaaaacagaatttcttgaagaacaaatttatttaaaaagaaaggaagttaggtatgacatgcgcgacttaaccgttgagtatatctccggaaaatattcagatggactaaagtataatgaaattgacaatgaaaatatagatggatcatctctaaaaagaaataccttatatgttcctgattatcaaagagagtttacatgggatgagaagagacaatcaaaacttatagaatccattattctcggacttccaataccttttatttttgtcgccgaaaacaaagacggcgcatgggaaatagttgatggttcacaaagaataagaaccatccattcttttgtcagtaatgagctaagactcagtggattacaatccattgatcttgctaatggatttttattcaatgaattagatgcaagcaggcaaggtaaactcttagatacggcactaagatttatcatcttgtcggaggagactactgatgaagtcaaaaaggatatgtttgaaagaataaacagaggaagtgatcttctcaaatctatggagaaaagaaaaggaatatatccgggtctatttaccgatttaatatatgattacccacaggaaacccctgaattcaaaaaacaactgctcgttgacaaatggttagaaaagagacaagagcacaatgaactgttgctacgtttttacgctctatctgaaaatagtaattataagaaaggagtttctggaagtttttctgattatttagatagattccttgaaaacaaaaacaatgagctgtctaaactatctccagaacagcaacaaaaagccatcaaaaaatatcgtaatgatatggatgaagttttgtcctttgttaatgaattcttcccatttggatttaggcacacatctaatcctcaaaccaaacgttcaattttcgaagctatctctgtcggaactttattagctattagaatgggtgtcaatagagataaaatagataaagataagatcaagaaagccataaattctaaagaattcaaagagaatactcatatagcaaatcagttacacaaaaaggataaacttgtaggacgaattgagtttattcgtgatttacttttggggatgtcaaagtga

SEQ ID NO: 277389 - DNA, 711 bp, Morganella morganii
gtgaacactataactttagaagtcaatggcaattttgaacaaatacagaaaatcattgatttaattaaagctatagaaaatggagatatctcgtatcagggtattacaactacatcgccagtgattaaagcaagtgtaatgcttgctttatataatattatagaagcaacgactactaagcttttaaaaaaaattcataaagagataattcagtcacaaacaccttataaaaagctaagtactaatataaaaaaccttgtgatactttactatcactatcataaaaataagagtaataacattcatgagtctctaaatgttatccacgataccattaacatgataattaacaaagataatttcaatctaagctatgatgaaatgtcagaagtttatcagttatatagtggtaatctcgatgccagagaaataagaaaaatatttacaaaatatgatatagtaatatcggagggcattggacaaaaccttaaaacaataaaagacgtcagaaatatattggcgcatggagagcaagcatttgaagattatggtcgaatgatagtattagcatctctggaatcacatttcactaatacaaaagactttttaacggaggttataaaatcagtatcaaaatatttagagcaaaagaattatagagaacaaccaacacaaccaccacaacaaagaagaagaagaggaagaaaataa

SEQ ID NO: 277390 - DNA, 1467 bp, Morganella morganii
atgaagggatacgtagctaagtcaggtaagtcatttaaaaacagagttaactatatattaaaagatgatcatgatttcatttgtagcaatatgtcgacagataaaaataatgttagtgatttaactgatgagtttaaagctgtaagcagttttagacctgatataaataaaccaacttttcatgcgtttttatctcttcctaagggtgatcatttaacagatgaacaatggcaagagatagcaaaagactatttgaaagaaatgaatattgatatagaaaaacatcaatatatttgtgtgcgtcataaagatacggataaataccatatccatattgtagcaaatagggttggcttagatggttctgtatggcacggtcaacaatcagcatttaacacaatagcagcttgtggatatttagagataaagcacgtcttaactattactaaaggtttacaaggccaaaaatcagacgaatcagcaccaaccaagaacgagatcgagcaagccttgaggacaggtgagaaaccagcccgtttagtgcttcaagcctctttaaaagcagctatgacaggaaaaccagaccttgagacgttcgtggaacgtctgcaggccgtaggcattgaacctcagttcaatgttgccagcactggcaacgtggcgggttgttctttcagtgtgggagatgtggcatttaaaggctcacagttgggtaaaaaatttagttggaacactataaaaaacaaggtgaaatatgacaaaaatagagatgatgaactcgttagaagattcgcagcaagaaaaacagatgacgaaaataatattagacgatcacttattgaatcagatttcaatgacagtagagccgttgacggaatcgatgatgatattatcggaatcagtcagcacagcattaaatcagacacaacggacaattacaagagtgaacaattcattagaagcaacaactacagcattaaactcagcgaaaaatataatagaccaacaagcattaaagttagaagaacaacacaaaaagctgcacaaatactcaacagagttaaaaaacaatacaataaagaaccaatcaagccttataatcaaggtagcttcaatagtaggagttctaaacttagcagtggttctattagtaggatacttgatcatgcagaaacagcaaacgcagccactaataaatttagactcaagagcggtagccgtttcaatagtagagcaactaagatcgaagagataagaaaatacttgggtataaaaacacctgtaattcatcgaaggaataaagagaaagctataaaagaagacataaagaaaaaaccacactatatagttggttcagagcaaaaatttaaatctaagttaaaagaatatataaaaaaagaaactctaaaaacaaccaatctgcaacctgagagtgttaagaattcaagcttaataaattttaaatga

SEQ ID NO: 277391 - DNA, 390 bp, Morganella morganii
atgttagatacagatagaaaaagaggtcgtataaatttaacctcggaggaaagaagggatatatctatacagttcagagtaaacaaagcagagtttgaatatttaaagtcattagtttcagcttctggccttgaaagaggccattacatccgaagggaaatattaaaatctgaacctattgtaagaagaaagatgccagaagttaatcaaaaaacttatatacaactttcatcattgggaaacaatataaatcaagcaacaaaaaaactaaatagcaatgagtattttgataaaggcgaagttgataagcttaattttaatataaaacaagttagcagaaggatattagaaataaacaaggatataaattatgaagggatacgtagctaa

SEQ ID NO: 277392 - DNA, 249 bp, Morganella morganii
atgaatgatgatgacttagagaaacaaataggtttaaaaatgaagtttgagttattagcaagatttttttattacatagaacaagataaagatatatctttcattgagattaataatgatgaaaaaaggctatgctatttcgtggctcacagatgtatacaagaaaataaaactgatgatcttttaaaagcgttgattaatgaaaatgatgaagactatataaaagcaattaaggattatatatgttag

SEQ ID NO: 277393 - DNA, 174 bp, Morganella morganii
atgattatagcaatagcaatgatgcttctttgtgtaatgcttggcggcttcatgatccgtagttgtatgggtaaaaaagacgcttcaagcgaagcaaagcaatcaatatcagatgttagaaaaatgatagataaaaaagcactgattaaatataagaggagtaatagaatatga

SEQ ID NO: 277394 - DNA, 303 bp, Morganella morganii
atgtctcacgattttagtattgaaagaaaaaaagatgggaaagtagctttcttctttggttatgctgatgctgttttttataagagttttcattgtgaacaatataataatcatctatcaggtagcaataaaggtaaaataataagtaaaaaaggagcagtaaacgcattgaataaaataataaatagcgaagaaataaagaactatacagatcctgaacgtatcgatgacattaaaaatttttataataatgttgttttaaaatcaaaagaggaagataagttttatattcattttagttga

SEQ ID NO: 277395 - DNA, 249 bp, Morganella morganii
atgggtgatggttcgacacttcgagccatcaccttggaatacgtattttacattcttcgtctaaaagaaatcctgtcagagaaagccaacttgctaataataaaaccaacaatcgcaatgataaataaaattatattagctgccagtattcctgaactcataccgatcaaaactgataatattaaggcgctgaatattattaaaaatacgcaccaacccggaggagcaccgtataatacagttgcttga

SEQ ID NO: 277396 - DNA, 288 bp, Morganella morganii
atgcgcaaatttatgttagctgcaggtcttgccgtcctactgtcgggttgtggcgatgatggcatctatggcaactacgttaatcaacaatacggtgtcaggcttgatgttcagaaggatgtgatcaagttcagaaatggcgtttttactgttaaaagctgggatgaaagccaaaagcctgtctatatcgctagaactcaaaacaaagatctaggctcttggacttttaaaatcgaaaaagtcaaagatggcgttgtttaccaaggtgcggtttttaagaaggattag

SEQ ID NO: 277397 - DNA, 276 bp, Morganella morganii
atgaaaaaagaaaataaatgtaatagtcagaactcagcagaacttacagcattgctagaatactctcgctttaccaagaaagtgcttgcgaagcctgctaatgaagtattcgatctatttactgacaaatattatatggaaaccgtttacgatgatattattgataaaacgaagaagagtattgatcaaagtcagcatatatacatagattttgaagcggttagaataaatataatgtgcatgcatacagaggccattatgatttgttatatgtga

SEQ ID NO: 277398 - DNA, 357 bp, Morganella morganii
atgcgcacagcccgatttactgaacatcagattatcgcctttctaaaatccgtcgaagccggtatatccgaagccagctactacaacaggaaagccaaatacggcgggatggaagcgtctgatattaaaaaattaaaagatcttaaagaggaaaaccggcgtttaaaacagatgtttactgatctgcgtcttgagtcccgggctctgaaggatgttatcgaaaaaaaagctttaaaaacagcggtaaagcgggagctagtcagttaccttatcgaacaatattcgatgagcatccgtcacgcctgccggccgttatcgctgagcagattttcacgaaccggatacccggcgggatga

SEQ ID NO: 277399 - DNA, 1752 bp, Morganella morganii
atgccatatagaaatttaacttctgaacaactagatgctgtaaaatttggtggtaatctattacttacagcttgtcctgggtcaggaaaaacaaaaacattggtttccaaactttgttttatccttgaaaataaggaattgcttggtataggtaagaaaaaaattgtagcattgacatacactaatgttgcagcagatactattctagaaagaattatttcatatggtataaatagcgattcattatggattggaacaatacatagtttttgtttaaattggattataaagcctaacattgatagaattccaagactctgcaaaggttttaatgtaattgatgagtatgaaaaagaatttatattaaatgatcttagagaacattataacttatctccttacgataaaatagatacgcttttagactttagtttcactcagatatattctcgaaatacagctgaatattcagtagtaaaagcctatcactcctatttgtatgagaaccgattaatcgattttgatttgattttgaatataacttgcaatttattattgaagaatgatgtgctatgtgaaagactatctctaattatgcgatatatcttagtcgatgaatatcaagatacatctcgtattcaatatgaaatactaagattgatagtatgtaaaagaaattccttagttacctttattggtgataaagaacaagcaatatatactggattgggagcggttgttaaaaacagaaaagagttgttcgattacttcaaccttgaagaactggaagaaatgaggttaaccggttgttttcgtagtagtcaatcgatcatagatttttatagcaagtataaagatgatgcctattatatcaactcattgtcagaacttaagacatttccttctgtgatactcaaggaaaatagtgttgatatcacccagttatctatttatgtttctggaataataagaactcacttggaacaaggtatttctcctgatgaaattgctgttctatgcccaagttggtttgatgtaataaaattatccaatgaaattggatcactaaatcctgatctagatatcgatggtgtcatggtttctcccatacctaaaaacaatgaaaacttgtggcttaatcttgtaaagattgctttagttaaaaagaatccatctaattatcttgttaggcagaagcttttgcgagatttactcaaagagttaaattatttagagtcatatacaaaattcttatctccaaagaaaatcataaaagaaataaataaaatagaatttgaaatggattataattgtgaaatagatatttggatacatactcttataattaaattctgtaattcaatagggttagatattaataatcaaagctatgtttataaagaaatgatctgcttgatagatgctactaaaaaaagaatagataaatatagtatgagttatagggcaaatgatcttcattctttttttaattttaaaaacggagttaaaattacgacttgtcattcaacaaaaggagatgagtacgatgtcattatttgcacagggttattaaatggtaaaataccaaattggaatgacattatagattgtagcccggcacatcaggattatatggctcgcaggctcttatatgtcatagggtctcgtgcaaaaaaacatttatatttgatatctgaaagcggtcataagacacaaaaaggttatccatatcaggtcactccacagctttaa

SEQ ID NO: 277400 - DNA, 2160 bp, Morganella morganii
atgtgtaataaaactatgctaaggggtcaatcgattactatgtatatcaataaattagctattagaaattataaaaactttcgaagctcaaatttctactttgttaaagactcagtgaatacaattatcggtgagaatgcttcaggtaaaacaaatctgtttaatgctatgcgattgattcttgatgactcacttccaatgaactcaagagttctattagatgaagatttttatcgtggcttaaatgatcccttcgggcactggattattatcacaatatattttgatgatttaagtgaatctgaagaagaacaagttattgcaaactatacaataaataatggtaacgaagaagcattaaaagaaggcaattatacatttatatatcgcccaagatttcatataaggcaaaagctatacgagttaactgtagataataaagatttagaatcaagattagaggattttagagagttgaaatcaacttgtataatatcaaaagagacttacgaggcagtcgcgtttgttagaacaaaagttgattttaataatgacgaagtttataagcaagtagttggggattttgaaaattatattttttcaaatcctaatgaagatgatgccacagtcattggcgtaaaaaaaccaccatacttcgccttaggtagtgaagttgcttgtacttatgtcaaagcccttcgcaacgtggtagctgatttaaagtattataaaactaatccactgtataaattgctcactttaaaaagcaagcaaattgatgatagaaaggatatttctgagaatgttaagaacattaacgaacaaatttcagcaattcctgaaattgctcggctaagtaataaaatatcagcatctttacttaatacggttggctcaacatattcgccaaaaatattggtttcatcacaactgcccgaagattttactgagttaatccaatcacttggattagtagtcgaggattctttagattatgacggttcaggaagaattgatgatttaagtcttggtggtgcaaatttaatatatttggctttaaagttatatgagtatgaagaaattagagatgctgaagaacatataactcatttcctgttgattgaagaaccagaggctcatatacataatcatattcagaaaactttatttgacaattttaattttcaaaatactcaagtcttcgtttcaactcattcaacacaaataagctctgtttctaaaatctcgtcgatgaatattttggctcggcaacgaggatatacagacatctatcagccttccaacggactacagccaaaagaaatttcgtcaatagaaagatatcttgatgcaatccgtagtgatgtgttgtttgctaaaagtgtaattctcgtagagggtgatgctgaattaataataatcccagagcttataaaggttactttaggtattagcttagatgaattaggtattagcttaataaaattggatggaactgtatttaagcatatttcaaatctttttcatagtaatagattaaaacgctattgcgcaattttaactgataaagatttggcatatgtgaaagaaccagatgaactatttgatgctgatttcattgagtctttgaaaaacgcggagactgatggtttacgcagagaacgagagttggcagagtatgtagaaggcaatgaatttgtctccattttttatgcagagaatacgtttgaaacagagcttgttcggtataatgaaaattccgatcttttcaatagtgtcattaggactacatataaaagatcaggtgatattgagcgagttgttgcaagtattaagtccgatgatttaagggtaagatttaaaactgctctttttttcgccaataaaataggtaaagggtggttagctactgaaatggtagagtatctccataatgagaatcgtgttccagactatatattaaaagcgattcattttgcacttaaagatagagaactgaatgctgttcttaataaaatgcttgcctataacatgtctttaatgggaactcgctgggagggcgtatgcaacaagattaattctgaacctaattttgataaaaaaatggaagagtatagaaaacatttcgataatagcttttctagattttgggagttgtaa

SEQ ID NO: 277401 - DNA, 243 bp, Morganella morganii
atgctggtacagacagtaaaggattaccgtttttcaggcagacaaaaaatgtttcaggggatcagtgccgggagctccgcctctccccgggggttggtttttcagttaactgacctgatgactcagctttccgtaaatgtgctggatatcggttttggtaccggaatgtctggcacggactggcacaggatatcccgcaggaattatttgccaaatatgatgttatttgtctgccggatgtga

SEQ ID NO: 277402 - DNA, 375 bp, Morganella morganii
gtgattgagcatctggacagagataccgccattgagctggtcagatatatcctgaccaacatgaatgataatgcccgcttttttatcagtacgccattgtggttttatcctcaggacacaatacaggaaggtgatcttgaaaagcaccttatcggtgtgccggtatcctcaatgatggcaatgctgccgcaaatgtattcagtgaataatccccttatcggcgggtttatttacggcaaagccagtcttgattatgcagatatgttcagcccggtcacgaatccggcattttctcaggagcagggacgggctatcgcccgcgcgatcaattttgactgcacgccgggtaaagtcacccgtctgcagtatgaataa

SEQ ID NO: 277403 - DNA, 7410 bp, Morganella morganii
atggatcaaataacccgaattcttgaaaaactgaatcagcaacgcagcggtgaaacaaccgtgacactggcagattttatgccgatgtcccttgcagagatccgcagccaaaacacaggccggttatcgcgtgaagaagcacagttactacaccgtgcagcgcaaaaagaaaagcaaaacaacattctctataccgcccggatgctgacccgcgctaacccgctgctgaaaaaagaaatgaatactgcccgttattacggcgccaccccatatggctatgatgatattattccgccgcgtgcagagaaatttgtcgcacccggcgccgtctcttccatgttttcccctgccggttatctgactgagctgtaccgtgaagcacggggactgcatccaaaagacagtgaccgtaatctggataagcgccgtccggacctggcaaaactggtgctctctcaggacaatctggataacgaaatctctgctctgtcactggctaatgagcaactggaaacggcgctgatggcgcaaaccggtaagacagacaaaaacaaatattatgaaaccctggcgacctcccgccgcagtggtgtaaccccgtataacgcgccgtttgagggaatacataatgccctggcacagcggaattttgtcctgccggataatattctcagcaaccctgcgaagtttgccatactggcggcatacgacgccggtatctcaccaaagttatataacatactgacagaagacacagagtcattaaccggctccgatctggaaaagtctctcaaaagaaacttcccgaaggttaagattaaagacctgatgactctggatgcgctggccaattattatgagcttccggcagatgacattcaggcccttgttgctgccgaaataacaggccggttaccaacaccggatgtgtataacggtgataataaactggtaataccggtaataagcactgacggaaacatcacattcagtgaactggccaaaacacagagtgatgaaaaacaggcagactatattgatttaattccgcagggtggtaatcagtttttagttaattttagtgtaaaggaaaccataaaagacgcgccgcattttagtataggctatggtaaatcgtttgataacctggcagataaaaatggttttgttcctctggccggggagcactacagtatccccgtcacactggatgctaaaattttagaaaaaaaaactaaaatcggcatcaccagaaaaaaaccagaacctgccagcgacgaaaatcattacacctcagccaccttcaccatccatcccaatgcagaaccgggtatatggctcctcagactcaacaaaacactgcgtctggcaaaagtcagcggtatgaccccgcacgaaacacaacatgcattaatccacgtaagaaatgattcaagcgaatacgaattacgccgtttcaccgaaacggtgctttaccgtaaacgttatagtattgatactgaaacagcattaatgctgtgtaacgccggtatcagcagaatcagctatgacgggcagctcagccattttgaccgcctgtttaataatccgccgctgaatggtgtaacttacactttaggtggtgatgatattccgatggaaccggatgccggagacccgcgtcgtgaagtcctgaaacgcgctttccgggtagataataccggcttgtggcaactgcttgttatcacaaatcgtgaaaacaaatccaaaactatcgaaaacaagacagaaaaacttcgtggtctgttatttgttcgtctgctggcggatgtgcacaacctgacagtagcacaactggatgccctgctgcagatttccccttacaattcaatgaacgtttacgctttagatggcaaaacacgccagaaaatgctctattttctgtcccggatcacccaatggctgaatacacaaaatatcacggttgaacaactgatgctgctgctggataaaatatctccggcggcgccgaccaaagagatgcaggtcctgctggatctcctacgcaatggtggtattgacaaaaccaatacaaaaacgctgtataccaccatggcaccggtgattactgcggctatgcaactggacatcacggaatcaggggaagctctgctgcgctggctggataacaatcatcccgcagggatactcaccaccagtgaggcctggaagcttattatcaaaaaagggcagacggccggcgacaaggaaaaattggcggcatggtgtcaggcactggcacagcgtgtattggtcattcgcacctttacactcagtaatgccgaacttcagacattgtcacagggtgcaccggccggaaccattactgaactgtataacatcagtgatttccataacctgattaaccgctgcggtgaacaggccggtacggtactggatgcactgcaaagcgggacactgacagttaaaattctggcacaagcactgaatctgtcagaagaggtgattactcaggcactgacactggccggacaaaaaccggaactgaccacatgggcacagctggccgtattgccgccacggctggatttggcagataccctgcatatcaccccgaaagatatcaccactctgctgacagtgtctgaaaatgcgaaaccttcttatacagacctctccgcactggccggattgttacaggccggtctgagcgaacaacagaccaaacaactgcaaaatcagtctgagccgcgccgcaatgaagccctcagcggggagtaccgctctctggttatgaacaacccggtggcagaccgtgatgatatctggcgtaatctgctggtggacggaaaagtcagcgctgaaatcaccaccaccctgctggcagatgccatcgccggtattcagctctatattaaccgcactattgccggtgatgagccgggtgctgacagtgacgctcttgagcgtcagttctttaaagactgggatgcctgtaataaacgctacagtacctgggcgggtgtgtctcagttagtctattaccctgaaaacttcgttgatccgaccctccgtaccggtcagaccgggatgatgaacaccatgctggagcagctttcacaaagtgagctcaacaaagataccctggaaaacggcttccgccagtacctgaccgcctttgagcaggtcgctgacctgaaagtggtcagcggttatcatgatacggttaatattaatcagggtaacacctggtttatcggtaccagccagactgagccgaaaaaatattactggcgcaaagccgatcacagtaaatgtcagaatggccgttttgccgccaatgcctggagtgactggaaagaaattacctgtgcggtgaatccttatggggatatggtgcgtccggtgattttccattcacgtctttatttgttatggattgaaaaacaagtacagaaagataacaccggtaaagatacggcatcttttaccctgaagctgacacatgtcaaatatgatggcagctgggcttcgccgttcagttatgatattactgaaaaaaacatatccgggtggaaaaaaacgggtctgtactgtgccgccagccaggaagataattcactgctcattgcctggtatcaaatagaaaaggaaacacagcccaatagcttcgggctacatattcagccggacatgagctgtaaaaaagaaccgaatatagcaggaatattagccacggttacccatcaattagatacagaaactaccgtcagggtaaacaccctcctgaatcgtatatcctctttcgaatttaccctggaaaaacaagaggggaataaagaaattgatctggtcatctcccatggcgactatactgtcaaaactgaaaacagtatatctgcactgatattgaaccctactgcttatattaacatcaccccctataaattatttagcgatattcctgatttttatcgcgagaaatatattactcatcttaactctcattccggtacggtttatgctccggaatcaaaaaaaatggagcctgccaataatgctatatccgataaggttaatgcttgtgctgtatatacttataataacaagccaccgaaaaaacacatttctctttccattggtaaaaattatccgctaattactcctcttgagctggtagggcgtaaacttgagagtttctttataaagcacaaagaaacatcagcgttgtattatacatatggagatgctaccgacgataggttaacgttggaggaagataaatatactatcagcactggtgaaaaaaaactgggcacgcttagcttgggcaaaatgatagcacaagtcaaaacaatcagttcagatgatatctccatggagattgaactaaatagtacgaaatttgaaacaataacaggtagtgacgtcggactccggccaccattatacccgacagtctcaagagaaacactggcattcccgtttgggaaactgtctataaccattcccgctggtgcagatattaataacctggattgtactataaaagtcaggttcaagaatacagatgttcttgcagctactaccacttataaactggttataaaaaaaactgatccagttcaaaaagtcatctccctgtacaccacgccggacggcgctcaatatatggaatgggatggttaccgtacccggttaaacacactgttcacccgccagttaattgagcgtgccaataacggaattgacgcaatattatcccctgaaacccagtatctgcctgaaccgaaaccgggacagggcacctatgtcacactgacactgaaaccgtatgacaaaaatacccacggcactaaccgggcatttacgatttattacagcaatgatgccacaggctccggcaaatttcctgtttacagtggctcactcagtgttaccgataatacagaagtaaaattatttattccgctgattaaacccggaaaaaatgcggtgagtcagtctgctggtgcgcagcaggatactttatatctcaatgctacataccagaaagaagcaacaaaacaaatcctgctgttccgtaccgataataatcctgaaggctggacattggatacaagcgttaacaacggtaccttcgccggcctggcagaaaacggggtatccggtttattacaatccggtgaaccgatggatttcagcggtgccaatgccctttatttctgggaattgttttattacactccgatgatggtagcaacgcgtctgttgcaggagcaaaactttaccgaagctaaccgctggttaagctatatctggcagcctgctgcaagcggtgccggtgactggcgcgtgcgtccgctgaaagaagacacgtcctggaacgccgacccgctggattcggttgatcccgatgcggtcgcccagaatgatccgatgcattacaaagtcagcaccttgatgaaacttctggatctgctgattgcccgtggtgacaaagcttaccgcatgcaggaacgcgatacccttaatgaagccaaaatgtggtatatgcaggcgctggggctgctcggggataaacctgtcagcattttcagcaatggttgggaaaatccgtcactaagtaatgcagcagataaaactcaggcaaaacagtttcatgacgaaatcagccgtatccgcagcggcggtctgctgcctgacgtccgcactgctaataccctgaccggattgttccggccacagcaaaacgaaaaactgctcggctactggcagatgctggaaatgcgcctgtttaacttgcgtaataatctctccattgatggtcagccgttatcactgccaatttttgccgcaccggcagacccggccgcactgctcagtgccgcagccgcagcctccggtggcagcaaacctttaccgtctgctgacatcccggcaatgcgcttcccgcaggcactggacagtgcacgttcactgaccgggcagctgatgcagttcggttccaccctcctggggctgattgagcgccgggatgcggaggcgatgagtgaactgctgcaaaaccaggccggtgagctgatgctctcttccctgcgtatgcaggaacaggctctcaccgaactggatgccgagaagaaaacactggaacagagccgtgccggtgcacagtcccgctttgacagctaccgcgccctgtatgatgaaaatgtcagtgcggaagaaaaacggaccatggatctgtacctctcttccgcaatactgagcacctccattggcgtgctggatatggccgccgccgctgccgatatggctccgaacatcttcggcgtggccgtggggggcagccgctggggcggtatcccgaaagcaattggtgcaggtatgagcctggcagcctccgccaccaaaattactgcggataatatcagccagtctgaagcatggcgccgccgccgtcaggaatgggaaatccagaaaaataatgccgaatctgaaatcagacagattgatgcccaactggaagccctggctgtccgccgtaccgccacagagatgcagcgcgaacacatggaaatccagcaggtgcagactcaggcacaactggaattcctgcagcgcaaattcagtaataaagcgctctacagctggctgcgcggccgtctggcatccatctattaccgcttctatgacctgacagcggcacgctgcatgatggcggaaaaagcttacgcatggcagaccaatgatacggctacccgctacatcaaatcaggcgcatggcagagcaataacgccgggctgatggccggggaatctttgctgctgaacctggcagagatggaacaggcatggctgaaacgggatagtcgctcactggaggtcacccgtactgtttctctggcggcagtgtaccgtactgacaatgtgactctggcagaaggaattgctgacctcctgaaaggtaatggcagcgggaatataccggcatcaaccgggctttcaataaccgccgataaccaattgcatgccgcgttcaatctgaaagcactgaacattaaagatgactaccctgaggctctgggcacaacacgccgtatcaaacagatcagcgtgacattaccggcactcgtagagccctatcaggatatgcgggccatattccgctatggcggtaactcgttgccggccggctgcaaagccattgcgctatcccacggtatcaatgatgacggcctgttccggcttgatttcaatgacggccgctggctgccgtttgaaggtatcccggtggatgatgataacagcctgaccctgagcttcccggacgcaaccggtgagaagcagaaaccactgctactcagcctgaccgacatcatcattcatatccgttacaccatttgttaa

SEQ ID NO: 277404 - DNA, 327 bp, Morganella morganii
atggatgagctggtgaagaaaaaatataatatagcgttcacggtattattgctgattgtgctatctgctgtttatatatggttatcggtagtgtacttttcagactatataaataaaaaagatattatcaaggttcatattggtcagttttttatactttctgtaccattgttactgtactttgcatcaggcagtatcatgatttttttaaataaagaaaaatttcttaaaaagcataaatttttcaaagtgttattttatatattcctttctttggctattttttcattttattttattaataatcggtccgatgtacatggataa

SEQ ID NO: 277405 - DNA, 258 bp, Morganella morganii
atgaaaaacatcaatacattgaaatcaatcacaaaccagggaaccggtaaatttgtattgctcagcatgttaactgcgggtatttatccgataatgtgggcctgggaaaatactgatgcctttaattcagagctgaaaataaaatcatttgaaagttcagtgttcatttatctggcgattgcaatgggggtgtctttatacctggatgtattcagctttatgagtgatgcctataattacgggtatatcgctgaataa

SEQ ID NO: 277406 - DNA, 264 bp, Morganella morganii
ttgggtactatcatcacaatcgggatgactgttttctggattgtctgggcatttaagatgaagagcgctttagaatattatgcagcaaaagaattcggcatttctctgcgtcttaacggattctggacatttttatttcaatacttctatatcaactactgcatgaatgcgctggaagaagattttgccaaggaaaaaatgctggcagatgtccggagtaactactcaaataacagtatggatgatgatgaaaataaaaattaa

SEQ ID NO: 277407 - DNA, 543 bp, Morganella morganii
atgtggccaggagtggccgccggttctgtgcccggagatgtcataatcatattccgcccgctgctgccggacctgctggaagccaccggtatcacacaatgcacgccgtgctacccgccgataacggataatcacgcttactggaatctgctgtcacactacagtgccaacagttttatgctgtcgtcagtagattcggtaaaacagctgatcagtgactatgtgctgtatcaggatacagaccggcagcgctgcaaacagataaaccaattgctgagcggtattcacgcggttgattcagtactggatgaccgccttgtccggggaaaaccttaccgctgtctggatctgacaatgacactggatccgcataaatatgacaataccggcgatgcctttatgtttgtcatgcacttatatcatttcttcccgttctgcctgtcagaaaatatgatgctgaaaatgaatgtgcaatttaccgataatgatacggtctggcatttggcgccttatttactgaacgggtataaatcactgatttaa

SEQ ID NO: 277408 - DNA, 213 bp, Morganella morganii
atgaaagaattatctgttcgtgagtgtgacgctgtcagcggcagcggaatcgctgattttctccggccgggaagcggtgatgtttctccgtcggtaacaccggaaaaaaccggtggtcagttgattatcggcgggggaatcggtttgggcttcgggggattcccgtttatcgtcggtgttttcattggcgggatcattaaaattccccgctga

SEQ ID NO: 277409 - DNA, 2421 bp, Morganella morganii
atgttagcatttgcaaacaataatgataatgcgaatagatatcatttgctttcaaataaagttaacccaatgaaaaataaagataaattacttattgcagctattacaggcagttcattttgtagtttttatacacatgcagctcaatataaccccgataaccatattaaggttgcggttaaatcggatgcacacgcagagacagatgatcctctgtcgtctcaaacgataacagagcaggaaataaaggattcaccatcatctaatagtaacctgagtgattatttgaaagccgtccctggtgcccgtgtggagagtaaatcagaaacaggatttaccaatggtgaaattaaaccgctctctgtttccattaacggtgcgccttcagaacagacggcgtatatgatagacggggtgaatattaataacgatattgacccggcttcctccttatttgatggcaccatgggcgtcaatccgaataagagttcagagcaggcttatttctttgatgcgaaactactttcgggaataacggtttacagtaataacgttccggcaaacctgggcggatttaccggcggggcagttgtggcggaaacccggcagtacagcggggaaaatcacgcatcagtcagttaccgtaccacccggtcctcctgggcatcattaaaagcggatgaggctgtaaaagacgcgctggataaaaaagtccccaacggaatgaatgcagaatttcagcccgtttataaaaaggaattctttaatctgacggcggaatacggattaacggagaataccggtatggtattcggcttcagccgccgtgattctgatatccgccagacccggatgctgaattcgaaaggagagacggataaccgtaatcacacccgccgttccgataatatgctggtcaattttaactggacaccggataccggccggacactggaagccgggttccgcatgtcagattataaagagggtaagttttacgccaataatattgataataacgtcaatgatacccatcaggcttacggtacgacgatccggtatattcagtctgtgccgggcggtaaactgacatcaacggcagcatatgacaagttttccgataaacgccgttccaacagtaccgaagccagtgtggtgactgacctggataccggtcttgattttgaagaaggcggttatggtaacagtcagctgacgcaggaaaatatcaatttaattctggattataatgctgaccccgtattcttcggaaatacagagcacgttttcaatacaggggcagattaccgtcatacggcatatgcgtttaagcgggatgaagatgttcactcaacggtatcattaattgacagtaccggccgggatgttcttttaagtgaactgaccgcgtcaaaaggaaccgtaaatacctctcatcagaattatgcactttatgctcaggacacgattaaaaccggtgatttcacattccgtcccggcttacgtctggaacgggataattatttaagtaacacaaatatcgctccccgttttacggcttactggcaggcattaccggatacccggtttaagttcggacttaatcgttattacggacgttcatttgccacgatgaagttatccgggaaaatactggaactgaatcaggatcgtacccgggattaccgttcactgacacatttaagtacgccgcattccgatgaattgaacttcggggttaatcaggactggaataactggcgtatttccgcagattatacatacagaaagtataagcagcggattgtggttaagcgcagtactcaggatgataagaaagttgattcattcaccaacggcgatgattttaatgctcagatttatacgctgcaaataaccaataaaacaccgtggactcttggtgcgacagagtggaataccacattaggtgctgactggctgaataccggcagagccgatcttgagaaaacattagatccggatgaggcggttattcttgatggacgtctgatgtcccgtgctcagatggaaaaagaagtcaataataatgaagaggagtggatggtccgtctgggtgttgatatgaagatcccggataataatattacttggtcgaataaattttatattaaagcaccggtccattcttatgcagaaaccaacagtacggatgatattactgtttataaaacgcagaacttcggaacacatactcaatgggataccagcctgagctggcagccggctatttacggttcacatcagctttatttccgtgccgaagtactcaatgtgctgaaccaggtcaggaaaatggaaaataaaggctacagttcaaatgagtacggaatttatactccgggacgtgaattctggcttgacgtcggttatgaattttaa

SEQ ID NO: 277410 - DNA, 1686 bp, Morganella morganii
atgacaaaacacagtatgaatagtaaatctgaattaaataaaaataaaattatcaaacaggtctggagcctggcctgtccgtattggaaaagccgggaatggaaaatagcctggccgctgattatttctgttattgcacttaattatattgttgttgaaattgcagtgaaatacagcgactggaaccgtgatttttttaatcttatgcagaataaggactgggataatttctggccgatgctgagtcagtttgttctgatcatggtggtttattcttctgtcgatcttattgaagaatatttgcgccggacattacgtatccgctggcggggctggctgacagagcggtttcttacgcagtggctgagccataagcgtatttaccggcatcagcttttatacaaagagagtgataatccggatcagcgtattgctcaggatataaaagaattttgcgatcagacattgcagctgggactgggattactgcggactatcaccagtctggtgtcttttaccgttattttatggaatctttccggaatactgacatttgaactgggcggaatgacatgggtaataccgggatatatggtatgggtggcaatattgtattccgttatcggtacatggctcacccataaaattaccagaaaactgatcccgctgacatttcagcaggaaaaatgtgaagccgattttcgttttcatctgatgcgggtaaaagaatacgcggaatcgatcagttttctgcgcggtgaaaaggcggaattatcctcatcaaaacggttattcgggaaaatatggcagaactggcaatatctgaccggaatgaaaatgaaatatcaggcctttaacagcggatataatgaggtcgcccgcattttcccgtatctggtggcatcgccgcggctgatgagcggcagcctgcaactcggggatatgatgcagaccgcaaccggattttaccgggtacaggaagcattcagctggtttgtcgattcttatgagtcagtggcaaactggcgggcagtcaccgggcgtctggtgacattcagttcgcagctggattctattaccggcaccggcacaatccgtcagtctgattctcccgaatggtctgagttatcagtatttttaccggataaccgcccggttcaggaaaatatgtccggtgcctttccggacagcagctcaataacaggcccgtcgggatgcgggaaaagtacattcctgcgcacactcgccggattatggccgcattataaaggttcattatccatgcctccggataataactgcatgtttattccccagaaaccgtatttaccggaagccacattgcgggaaattttaatatatccccatattcacggggaatatgacgatgcattgctggccggtgcattaacggatgtgggactcagtcattttattcctgaactggataccgtgaaaaactggcagcacacattatccggcggagaacttcagaaaataatgctggcgcggtgtctgatacaaaaaccggcctggctgtttctcgatgaggccttatccgcactcgatgaggaaaattataaaacactgagccggttactcagggaaaaactggctcacagtcatattatcgaaatatctcacagggaagacgtgagaaatgataagcccgggttgattttatga

SEQ ID NO: 277411 - DNA, 2799 bp, Morganella morganii
atgaaaagaatactactgataaccggcatgttatttattttgtccgcctgttccggtcagcagacacaggttaatgacctgctgaaaatgaaaacactccggtatgacccggcaatagaaaccggcacgctgaataacggatttcgttattttctggcggaaaacagcacaccggagaaaaaagtgtatatccggctggttgttaatgccggatcaatgaatgaggatgatgaccagagaggcgttgcacatattgtcgaacatatggcatttaacggaacaacgcatttccccggtaataagctgatccgtgacctggaaaaagcgggattaaaattcggtattgatattaatgcattcacggattttgaaaatacggtctacacattaaatctgccggacaatgacccggtaaaaattaaccttgcgctggatattgttgctgactgggcagggcgggtaaccataaatcaggcggacctggatgcagaaaggggcgttgttctggaagagtggcgcgccagactgggagctatgctgcggctgggggataaaaagagcgccattgagatggcggggtcgcgctatgcattacgtgaccctatcggggatgcggaaacaatacagaatgtcagccgtaaacgggtggctgatttttattatcgctggtacagaccggataatatgtctctggtagtcgccggggatattaataaacaacacatcctgtctctgctgaaaacaaaattaacgatgcttccggtcagaacagatccgcctgagatgattgattattctgtaccgttgccggaacactggcgtacggcttttgttcatgaagatgaaatccggacaccggcggtggaaatcagttttttcagtccttatcaggaggattattcactggcccgttataaggatgatctggttaatcagattatgacccggctgataaatatccggttacaacacctggaaaaagagaatgatgagtttatcagtaccgcgaattattactcttcagcgaccggacgggaaaccatacaatctgtattttccctgcaattatcagatgaaaaatatgatgaagccacactgagtatttttaattttctagctactgttgagcagcagggttttacacaggctgaactggatgaagagcttgagcggttaacccgccttaatgaaaaacagaaagataaaaccatttacagtattgatcttgcggcggatatgatgacggcggcagccagtcatcagctgcttgcagggcagaatgataaatttcttctcaatcgctattatctgaaaaatatcaccttagccgatgtgaacagcgcatttcatactatgacagccgtgaaatcccggttggtgatgataacgcatccggagaaaatacagccgcaggccatggatgcggcagcactggaaaaaaactggattgaaagtcaccggctaccacagaaaaaatgggacccggccgcagaacaaataacagaactaccggatattaatgtcacggacggtagtgtgaaacttatcagaacggctgaagaatataatatcagggaatatcagctgagtaacggcagccggttaatctatcagtacaataatgataatccgggaaaagtgttctttaaggcgctgacacccggcggattacggtcagtaccggatgacgattatcatgcgctgcggattgccgtcagcctgacggatgaaaccggttttggccgttatccgctatccgcattacaggctgtttttaataagagtccggtggtaatgtcaacattactggatgagcatcagcagggtttttccggctgggcagagacggataatcttgaaaaaattctgacgctttttcatctgaaattaaatgaaagccgggtaacggaaaaagtatggcgtaaatataaatcggaaatggataaacagctggctgagaataataaagacagtcagcatctctttatgcagaaaatatcatcactgcgttatccgggtaaacataccatatatgatgccacacagcaggatcttgacgtactgagtgcggaaaaactgacgcaattgtatgaacgttatatcagtaataaaaccgattttacgtattttattaccggtgatattcagccccgcgatgcggaaaaaattgcaggaaaatatctggcatctgttggtgtaaaaaaggatggcagagaacccgttgcgattgaagccggaacaccggaaacaccattaattgtcaggggattgcaggagccgcgggctgaagtggagatctatcttgtccgcaaaaatggctggcggccggataatgcctattatctggagatcggcggtgaggtgattcaggaaaaactgcgggaaaaattacgtgaggaagtatcaggtgtttacagtgtcaccgcatggttctggcacaacccgtctgaaatacaggatgagggacggatcatgttcacctgtgcaccggaacgggtggatgaactgattgccctgagtgaacgcgtactgacggaatttgagcacaacgggattgatcggcaggtattcagaaataaaatcgttcagagccgcaatattcttgagcgaacccataattcggtgaccggcatactggaagatattgaacgcagttatatgctgaccggcggcccgttattaatcggcgcttcactgcgggcaaatgaaaaggcatctccggaagagactgaaatggttttacagggctttttacgtcatgccggaaaattccatgcggtattactgcctgcggagtaa

SEQ ID NO: 277412 - DNA, 714 bp, Morganella morganii
atgaatcgctgcaaactggccggtttattcttttctctgtgtcttcacggcggactgcttatttttttattctgtatcagccagactgattatgcggaaaacggcaatataaggacggataaccgcagtgccatgttattgctgcctgcgccggaaaaggcggaggaacactctccggatataccggaacagagcgagaaaagcctgttaccggtgataagcccggcagcggataaaaaatcagaatggcaggcggaaaaaaacagaaaaaaacgtgagaataaactgcggcagaaaattaaaaagccggttactgcaccgtggcatgataaagatgtgcataaaccggcagaggttccggataccggtttacagtcatctctgtcggccggaaatcataacctgacaacagccgataccgttgccgggcagcggagtgacgacgagctgtggttataccgggaaaaaatgcgcagagagatcctgcggtatatttattatcctgccagaatcagaaaggtcagcgcagccgttgatattaatgtcagtatttccggaaccggtacactttctgaccccgtggtgatcagaagttcggggaaccggatactggataaaattgcgctcagtgcggtcagtaaatatcagccggtaggaattccgccgccggggttggacaaaagcattgtcctgacggtggattttattaagtaa

SEQ ID NO: 277413 - DNA, 3090 bp, Morganella morganii
gtgtacaacatggctaagtcaacaagacgtcagtggttaaaagcaggtttggcgatcggcggactggcagcgttcggttacagttaccgcgatgtggcgaaacgcgccgtcgacgggctgatgaacggtacttccggtaaagtgactctgcaccgcattaacggtaactcgctgagcccggaagggaatgccctgaaaggctggcaggcggaaaacgcacaggcggtatcgatgacccagtgcttcggctgctggacgcagtgcgggatccgtgcccgtgttgaccgcgaaaccaatcaggtgatccgcattgccggtaacccgtatcatccgctctctcacgaccaccacatcgcctataacacgccactggcggaagccctgaaaaacatgggcggcgaaagcggcctggaaggacgttccaccgcctgtgcccgtggtgcgacactgatggaagggctgcacagcccgctgcgtatcctcgaaccgatgaagcgcgttggtaaacgcggcgaaggtaaatggcagcgcatcagctttgaacagctgataaaagaagtgacggaaggcggtgatctgttcggcgaaggtcatgtggacgggctgcgtgctatccgtgacctcgatacgctgattgacccggcacagcctgcactcggcccggtggcaaaccagttactggtgaccaacgccggggatgacgggcgcgatacctttatccgccgttttgcccagaatgccttcggcagcaaaaacttcggcgcacacggcgcttattgcggactggcctatcgcgccggctccggtgcgctgatgaacgacctggacaaaaacgcccacgtcaaaccggactgggattatgtgaagtttgccctgttcctcggcacctctccggcgcagtctggtaacccgttcaaacgccaggggcgtcagctggctaatgcacggatacgtgacaactttaactatgcggtggtttcaccggcactgccgctgaccaccacgcttgccaatgaccacggacactggatcccaatcacaccgggcaccgattccgcgctggtcatgggtatgatccgctggatgattgagaataaccgctataacgcggagtatctcgccgttccgggggaagcctccatgaagcgtgtcggtgagagcagctggacaaacgcgactcatcttgtcatcaccgatgatgcgcatccgctggccggtcagcatctgacagccgaagccctgagcggacaaacatccgaagagccggtgtatatggtactgacagagcagggtgagctggttccggcggacaattgtgaccgtgcggtacttgaagtcagccagccggtcacgctggcagacggcaccacggtgaatctgaagagcagtttcctgctgctgaaagaatccgcacaacgttttaccccagcagaatacagcgcccgctgtggtgtgccggaagaaacgattgccgcactggcgaaaacactaacctcatacggccgtcaggcggcggtcatttcgcacggcgggatgatgtccggtaacggattctataacgcctgggcggtgatcatgctgaatgcgctgatcggtaacatgaacctgaaaggcggtgtgtctgtcggcggcggcaagtttaacggtgccaatgacgggccgtgctacaaaatggacagcttcccgggcaaagtgaagccgaaaggcatgaacctggcgcgcagcaagtcggtctatgaaaaatccgatgaatacaaaaacaaggtttccgccggtcagaacccgtatccggccaaagcaccgtggtatccgctggcagccggtcagctgaccgagcagctcggctctgcactggaagggtatccgcacaaactgaaggcctggatcaccaatatgaccaacccgctgtacggcattgcggggatccgtcaggtgatggaagagaagctgaaagacccggcgcatctgccgctgattatcggtatcgatgcctttatgaatgaaaccaccgcgctggcggattacattgtgccggatacccacaactttgaaagctggggattcagtgcgccgtggtccggtgtacagaccaaagccaccaccgcccgctggccggttgttgcgccgcgtgtggcaaaaacggcggatggtcagccggtagcgatggaatccttctgtattgcggtggcgaaagccctgaacctgccgggattcggtgataatgctatcgcggacaatgacggtaacacttatccgctgaatacggcggaggattactatctgcgtgtggcggccaataccgcctttatgggcgagaaaccggggccggaagccaaagaggcggatatccgcctgtccggggtggatcgcatcatgcctgccatgcagcaggtgctgaaagcagaggaaatcagccgtgttgcttatctcttcagccgcggcggccgttttgcgccgtatgaaaaaggctgggacggggagaaaaccgggccgcagtggaaacagccgctgcagatctggaacgcggaagtggcgcagaaccgccatgccatcaccggcgagcgtttcagcgggtgtccggcctattatccgccgcgcctgtctgacggcagtgatattgaccgtgtctatccggcggaaagctggccgctgaaactgatgtcctttaaatcccatgtgatgagcagttcaaccaccatgattgagcgtctgcaccatgtgaaaccgtcaaacctggtggcgatcaacccggcggacggcgagaagttcggcgtgcagcacggggatctggtgcgtatcaccacgccgggcggcagtgtcgaagcgcagatcagcctgctgaccggtgtgatgccgggtgtggtggcgattgaacacggttacggacatcacgaaatgggcgcacgtcagcactatcttgacggcgaagcgctggcgatggataaacgcatcgcgtccggcattaatatcaacgacctcggcttcgctgacccgacccgcaaggtggctaacacctggctggactgggtaaccggagcgtctgtgcggcagggattgccggcgaaagtggaacggatttccgcagcctga

SEQ ID NO: 277414 - DNA, 4236 bp, Morganella morganii
atgcaacaatcagacaatatcagtcctcaggcgccgtctctgccgaaaggcggcggtgcactgaccggactttccggacaggcgggggccgccgggccggacggcgcggcgtcgctgtctctgccgctgcccgtcagtgccggacgcggctatgccccttctctctcactcagctacagcagtcagggcggtaacagtgcctttggtatcggctgggatgtgaatcttcctgcggtcagccgccgcacccgtaaaggtgttcctgcttataccgctgacgatgaatttctggatcctgccggtgaagtcctggtggctgtccccggcgcggcggataaacgtcagaccctgctgggtgtaaaactggccgtttcttatcagataactacataccgcgcccggacggagcgtgatttcagccgcctggaatactggcagccgcaaggcagtaccaccgaaccggatttctggctctggtatgccgcagacggtcaggtgcatctgctcggttatgaatctgccgcccgtatcagtaacggcagccacacggcccgctggttactgaacgcctcagtctccgccaccggtgagcagatttattaccgttaccgtgcggaagatgacatcaattgcagcgaccgggaaaaagccgcccatccgggcagccacagccagcgctatctcagtgaagtccattacggcaatatcaccgccggacgcacattcccttgtttcaacggcaacgatgccaccaaagccggctggctgtttgtgctggtgtttgactatggcgaacgcacccttaaaccggcagaaaaaccgctgtttaaagccggttccggctggttgtgccgtcaggatccgttctccggttatgcttacgggtttgatctgcgtacccgccgtttatgccgccaggtgctgatgttccaccgcctggagacgctcgctgaaaaagcagaaggtacggatgtaccggcactggtttcccgcctgctgtttgagtatcaggaaacccacgttgtcaccacactgactgccgcccggcagatggcgtttgaggatgacggcaaaatgctgtctctgccgccgctgaccttcggctggcagacctttgattttccggagtctgtgcagtggtctcagccggagatgggtaaactcaatccgcagcagccgtggcagtatctggatctgcacggtgaaggtatttccgggatcctgtatcaggacagcggcgcatggtattaccgcgccccggtccgtgataccgggagcgatgatgtcaatgcggtaatatgggataaaccgcagcggctcgataatattcccgccctgaaaaacggtgcgatgctgactgatcttgacggtgatggccgtctgcagtgggttgtcacacagcccggcgtacacgggcaataccgtcagcagacagataacccggaacagtggctgcattttacaccgctcagtgccctgccgctggaatacggccatcccgccgcacaaatgaccgatatcgacggtatcggtgccaccgacctggtgctcatcggtccgcgcagtgtgcgcatctggccgggcagcaaagacggctggctatccgccaaagatattccgcaatcagaaaaaattgtcctgccgtcaccggacggcgatgccgccacactggttgctttcagtgatgtgctcggctccggacaacaacatctggtacagatcagtgcgggcggagtgctttgctggccgaatctgggtcacggccgctttggtcagccgctggcactggacggtttcagcaaaaaacagacggaattcaatgccgcatatgtttatctcgccgatattgacggcagcggtaccgccgatattctgtatgcccgcagtgattatattgaaatctaccgtaaccgcagcggtaacggttttgacaaaccagtcactgtgaagctgcctgccggcgtccgttacaataagacctgccgtttacagatagcggatgtacagggactgggggtcgccagcctgctgctgacggttcctcataccgtacctcgtcattatctgctgcatctgaccaccgaaaaaccgtggctgctgaatcagattaataatcagacggggatgtcgcagacgatacactaccgcagttccgcacagttccgcctggatgataaagcccgcgagccggtctcatatctgcccttcccgctgcatacgttgtggaaaacagaaaccaccgatgaaattaccggcaataaactggtaagtgaggcccgttatcaccacggtgtgtgggatgcccgtgagcgggagttccgcggcttcggctgtgtggaagtactggattcagataccgccgcccatggcaccagcgatgtgctgacgatgccggtactgacccgtaactggtatgccaccggctataccccggtcgatacacaactgaaaaatgagtactggcggggcgataaaagtgcctttaccgggtttgttacccgtctgacaaccggcagcggtgataaagaatccgtctgttctgatgccctggcgcaaaaacaggcattctggctcagccgtgcccagaaagggatgcagttgcgtagtgaggtatacggcaaagacggcagtcagcaacaggatttaccgtacagtgtcagtgaacagcgtctgagtgtccgtctgatcacaccggatgcagatatgccggtagtccggccgtctgtatcagaaagccgtgaatatcactatgaacgcatggccgctgatccgcagtgttcgcagtccgttgtgctcagcgcggatgagtacggttatccgctgcgtgaagcgacagttcactatccgcgccgtccgaaaccggcgaaaaacccgctgccggacaccctgccggcatcactgtttgattccggttatgatgatcagcaatttcaactcattgtatcgttatcacggcatgcacggcaccacctgaccaatctgaaacatgaacagtggctgaccgggcttgcgggcagtgaccgcagtgacgtttttatgctgacagccgcacagcaacctgacacaggctttacagcagaatctctcgggaaacttatcgctgacagcagatctgcacggatttttgccggacagcaactgacacactggctgaacaagaacaataacgtggatctggtgcctgcctggccaccgcggcggcaatatatcttaatcgcagaattggatgaccagatcatttctgaactgaaaacagatttcagcatcacggaacagttgaagaaaagcgactaccggcatactgactatctgtttgcggatgacacagaaaaaaataaaaaaatatgggctgtctgctccgatatggcagcttatggtgatcacactcagttttggctgccaatccgtatccgcgataactctatggtcggaatgcgccatctgacccgcgataaacatcactgtgttatcactaaacacaccgatgcctccggacttatcactcaggcaaaatatgactggcgttttctgtctgtctgcgaaataaccgataccaatgacaatatcagccaggtacagactgatgcgctgggacgggtgatcagcagccgtttttacggcacggaaaatggtcagaaaaccggctacagccagaaaccgctgacactgccggattcagtgcaggacgccacggagatgaaaaaacaactgccggttgcgcagtgttttgtctatgccgcagacagctggatgcacagcggtacagataaactgccgccgcatgtgctgaccctgacaactgatcgctatgatgacgaaccggcggataaaagcacacagcaaatccgtcagcaggtcaccttcagtgacggtttcgggcggattttacagcagtcagcccgttttgaggacggtgacgcattccaccgcaataaaaacggttcactggcagccggaagccggaaaagtgagaaagaaacagcacgctgggcagtgtcgggccgcactgagtatgataacaaaggacatgccgtccggacgtatcagccatactttgtcaatgactggaggtatgtcagtgatgacagtgcgcggcaggatctgtacgccgacacgcactgttatgacccgctcggccgtgagcatcaggtgatcaccgcaaaaggttatcagcggcgcacactgtacacaccgtggtttgtggtcagtgaggatgaaaacgatacagcggagtaa

SEQ ID NO: 277415 - DNA, 7500 bp, Morganella morganii
atggataaaataacccgaattctcgaaaagctgaatcagcaacgcagtggtgaaacagtgacactggcagattttatgccgatgtcccttgccgaagtccgcagcctggcgggcagccgtttgtcccgcgaagaagcacaactgcttcaccgtgcggcaatcaaagaacagcagaacaacattctgtacaccgcccgtgcgctgacccgcgctaacccgctgctgaaaaaagagatgggcgctgcccgcacttacggcgcgacgccgtacggctataacgacattatcatgccgcgtgccgatgagtttgccgcacccggtgcggtctcttccatgttctccccggccggctatctgactgagttgtaccgcgaagcccgtggcctgcatcagaaaaacagtgttaataatctggacaaacgccgtccggatctggcgaagctggtgttatctcaggaaaatctggataaagagatttccaccctgtcactggctaatgagcaactggaaacggcgctgatggcgcaagccggtcagacagacaaaaacaaatattatgaaagcctggcaacctcccgccgcagtggtgtaaccccgtataacgcgccgtttgaggggatccgtaacgccctggcacaacagaattttgttctgccggaccatgtgctgagtaaaggtgcacaatccgctgcgcagatggcgttatacgccggtatctcaccggaactgtatgctattctgacagaaaaaaccgatggattaagtgaagcagcaaccgaagcgctgctgaagaaaaacttcccgggcgtcaatactgacagccttatgaagcctgatgcactggccaattattatgagttaccaagggatgaggttcaggcattactggagataactattccgtacagttcatcactgatgaatacacacaatctgtacggacaaaataaaacacagataataaaagccggggacacagacggtgatgtcttttatacattaactcacacccgactgaaaaatgaatcttccacctgggtaaatttcgaatatattgaccttattccgctggataataatcaattttgtattaatttcagtattagtcatatgcatgatgagactgcttccggtctgcatatcggtgttgcgacaccatactcaagttatccgagagatatttattcatctgctaccacgaaccctgagaaagggaaacactacagtatacagggaacaatccctgccgccaaagtaacaccagaaatcaccatctcggtttacaccagcctgcgcgatatctggtatggacacagcacatttgctgtcaccaaaacaaccaccgttcctttaccactactactcaccctcaacaaaaccctgcgcctggccaaagccaccggtatgaccccgctggaaacacaacgggcattaacccgtctgaaactgaaagacaccgattcagacgcaaccgtactgcaccgcttctgtgaattcctgctctaccgtaaacgttacaatatcagcagcgatgatgctttaattctgagcggtgccactatcagcactgtcagctatgacgggcagctcagtcagtttgatcggatgtttaataatccgccgcttaatggtgtaacgcacactttaggtggtgatcctattccgatgcggccggacgagcaagacccgcgccgtgaagtgctgaaacgggcttaccgggtggataataccgatttgtggcaactatttgatattagcgacagaaaagataggaataaagacgccgataacaacatagatgagttaagtaatatctgtaaggtacgtctgctggcggatatgcataatctgaccgtcgcacagctggatatcctgctgcgtatttccccttacagtgaaacccgtatttacgggatcactgataaaaatcgccgtgaactgatcaccttcctgtatcagaccacccaatggctgaatacacagaatatcactgttgaacaactggttatgttgctgacaacggatgcccctgcaaccccgaccaaagagatgaataccctgctggatgcccttcgtaacggtggtattgacagtacagatgagaacacattccgtacaacgatggccccacttattgccgcagctatgcaactggaaagcccggaacagggggaagccttgctgcgctggatggataataaccttcctgacaatgtactgcccatcggcaacacctgggtgatgattaccaccgagaaaccatctgctatccagcagaaacatttggcggcatggtgtcaggcactggcacagcgtgtgctggccattcgtatttttgtactcagtaatcctgagcttcaggtattgtcacagggtgcagcggcaggaactattgccgcactgcgtgaaatcactgaattccataatctgattaaccgctgtggtaaacaggccggtactgttcttgatacactgcaaagtaaaacactgaccagggctgtacttgccaaatcactgcaactttcagaacatgtgattattcaggcactggcacaggccggacaagcaccggaactgaccacatggcagcagctggccacactgccgtcacggctggatttggcagacaatctgcatatcaccccgaaagagatcacccatctgctgacggtatctgaaaatgcgtcaccatcttataccgatctctccatactggcaggcctgttacaggctggtctgactgaacagcagacaaaacaactgcaaaaccagtctgaaccgcgcctcagtgaagccctcagcggagagtaccgctctctggttatgggtaaaccgctggcaaaccgtgatgatatctggcgtacactgctgattgacggcaaagtcagtgctgaaatcaccaccacacggctggcggatgcgattgccggtattcagctctatatcaaccgcactgttgccggtgatgaaccgggcgcaggcagtgctgtgcttgagcgtcagttctttaaagactgggatatctataataaacgctacagcacctgggccggtgtgtctcagttagtttattacccggaaaacttcattgacccgactatccgtaccggtcagaccgggatgatgaacactatgctggagcaactgtcacaaagtgaactcaacagtgataccctggaagatggcttccgccagtatctgactgcttttgaacaggtcgctaacctgaaagtgatcagtggctatcatgatgcggttgagattgatgaaggtaatacctggtttatcggtaccagccagactgagccgaaaaaatattactggcgcaaagccgatcacagtaaatgccaaaacggccgttttgccgccaatgcctggagtgactggaaagaaatcacctgtgcagtgaatccgtatcaggatatggtgcgcccggtgatttaccgctcacgtctgtatctgttatggattgaagagcagaagcgtaaagatgacgaaggtaaaaagaatatttcgtcttttaccctgaaactgacgcatattaaatatgacggcagctgggcttcaccgttcagttatgatgtgaccgatgaattcaaacccgactggaaggaacccggtctgtactgcaccaataatcgggaagataacaccctgacgattgcctgctatgaaaaacagcctgaaaatgaaagcatgcaaagtgttaaagtcccggttaactccttcgggctgcgtcttaagcagaatatggtccttgcaagcccaccggatacacggagtatcttaactaccgttgttagtcaattagatactaagtcagttaccagggtgaatatgctgttaaccggccgctattcttcaaactttgcacatgtatcatcagataacgcgtacggactccgtcctaagatttcatccggggagttaatcctttccaaaaaggatgaaaaatttaatcttgtcataaaacctgaagtacacattaatgttaatactgctgagttttttgattttatcgatagccggtatcacggatgctgcataaaagaggttcattcaggctgtgatatttatatgcctgagaatattcaatacaccccaaaaggcgaatttatgccggatggaaaatgtactctgatattcattgtaggcccagatcaaaattcgtatcctttactgattcttcctgcccaagtagaatacaatgattctattgtaggcccaatatacttattggcaggtgatacgacgccaggtaacctaaaaggattttgggaagtatattctgaacacgacaattcttcagatcatgattacaaatattacatcacaggcgaactatcatcgaaagacgactgtacgtttgttgaaggtcaaaaaaaatacacactgattgattgtgttggtacgcctgtcgcagaaattaatattgataagcagataaaaaaaataacatcagcctccgctgatagtattacacttacatttttcagtgataacaatatcatcaaaacaatcagtggcagcgatatcggcatcactgttccggaatttcctgaatcagataacggaactatgagttttcggttcggagaattaatagtcgatgtaactgattatttaaaaaacaagagctcactagatttaactgttacagccaactttaaacttacgacaggccagtccgcaagctgcaagtatagcctgcagctgaaaaccccggaagtcagtgcccgtgctatttccctgtacaccgataaaaacggcgcccaatatatggaatgggatgcttaccgcacccggctgaataccctgtttgcccgtcagttaattgaaaaggccaaccgcgggattgatgccgtgctgtcaccggaaacccagaacctgcgtgaaccaaaaccgggaccgggtacttatgtcaccctgacactgaaaccgtatgacccggctattcatggcagtaaccggaagtttacgatttatgcatatcatgttcttcagactcatgatcaattccctgtatacacaggaactctaaataccggtaacactactacaattacactattttgccctcgtattcacaatgcagccggaaacaaagataatttctatttacggccagaatatcaaagcggtaaatataaatacggaattaacctggccagaacgaacgtcaatgatcctaatgattggtacttaaacaaagattattatggcggcaccttccccggccttgaatcggtatccggtctgtcacaacccgatgaaccaatggacttcagcggcgccaatgccctctatttctgggagctgttctattacaccccgatgatggtggccatgcgcctgttacaggagcagaactttaccgaagccaaccgctggttaagctatatctggcgccctgccgccagcggtaccggtgactggcgcgtccgtccgctgaaagaggatacctcctggaacgccgatccgctggattcggttgacccggatgcggtcgctcagaatgacccgatgcactataaagtcagcacgctgatgaaactactcgatctgctgattgcccgtggtgacagcgcttaccgcatgttggagcgtgataccctcaatgaagcgaaaatgtggtatatgcaggcactggggctgctgggcgataaaccactgacagccatcagtagtgcctggagtaacccggcactgagtaatgcggcagataaaactcaggcaaaacagttccatgacgaaatcagccgtatccgcagcggtggtctcctgccggaggtccgtactgccaataccctgaccgggctgttcctgccacagcagaacgaaaaactgctcggctactggcagaccctggaaatgcgcctgtttaatctgcgtaataatctctccattgatggccagccgttatcgctgccggtctttgccgcgccggctgacccggcagcactgctcagtgccgccgccgcagcctccggtggcagcaaagccttaccgtctgccgccatcccggcaatgcgcttcccgcaggcgctggacagtgcccgttcgctgaccggacagctgatgcagttcggttcctcgctcctggggctgattgagcgccgggatgcggaagcgatgagtgaactgctgcaaaaccaggccggtgagctgatgctctcctccctgcggatgcaggagcaggcactcaccgagctggatgccgagaagaaaaccctggaacagagccgtgccggtgcgcagtcccgctttgacagctaccgcgccctgtatgatgaaaatgtcagtgccgaagaaaaacggaccatggatctgtacctctcatccgcaatactgagtacatccattgaagggctgaatatggctgctgccgccgccgatatggcaccgaacgtcttcggtatggccgtcgggggcagccgctggggcggtatcccgaaagcgattggttccggtatcgcactggcagcctccgccactaaaatcaacgctgataacatcagccagtctgaggcatggcgccgccgccgtcaggaatgggaaatccagaaaaataatgccgaatctgaagtgaaacagattgatgcccagctggaagccctggccgtccgccgcaccgccacagagatgcagcgcgaacacctggaaatccagcaggcgcagactcaggcacaactggagttcctgcagcgcaaattcagcaataaagcactctacagctggctgcacggccgtctggcatccatctattaccgcttctacgacctgaccgccacccgctgcatgatggccgaagccgcgtttgcatggcagaccggtgaaaccacgcgctatatcaaaccgggcgcatggcagagcagtaatgccggactgatggccggggagtccctgctgctgaatctgacagagatggagcaggcatggctgaaatggaaccaccgtacgctgaaagtcacccgtactgtttcactcgccaaagtgtataaggagtatgacacaccggttaatctggcagagaaaattgctgagctgctgaaaggcagcggttccggtaatacaccggcagcaaccgggctctcaatgaccgcagataaagagttatatgccgcgtttaacctgaaggcactgaagattgcggaaaactaccctgcccgtctgggtaaaacacgccgaatcaaacagatcagcgtgaccttaccggcgctgacagggccgtatcaggatgtgcgtgccgtgctcagttacggcggcgatgtcagactgccggacggctgtaaagccattgccgtctcccacggtatgaatgacgacggtcagttccggctggatttcaatgacggccactggctgccgtttgaagggatcccggtggataatgacagcagcctgttcctgagcttcccggaagcaacaaaggatgagcagaaagccctgctgctcagtctgagcgatatcatcatccatatccgttacaccatccgttaa

SEQ ID NO: 277416 - DNA, 1152 bp, Morganella morganii
atggcacaagttattaataccaatgttctgtcactggttacccagaataatttaaatcgttctcagggcgtgttaggaactgccattgaacgtctttcttccggcgcccgtattaacagtgcaaaggatgatgctgcaggtcaggcgattgccaaccgctttaccgccaatgtgaaaggtctgacccaggcatcccgtaatgcaagtgacggtatttcactggcgcaggtaacggaaggtgctatcaatgaaatcaacgataacatccagcgtattcgtgagctgggtgtgcaggccaaaaacagcactaactcggcaagcgatatcaactctataaaagaagaagttgaccagcgcctggcagagattgaccgtatttcagaacaaacgcagttcaacggcatcaaagttttatccggcgataaaaaaatgagtttccaggttggtaccaatgatggtgaaacaatcgatattgatctgaagaaagttgaccgtgaggcgctgggtctgaaaggtatggatttctccacactgagtgccgtgtatcgtcaggaaggtgcaacgaaaactgcagatgaatttgacgatggtgcctcaacgccaaataaagcagcatcatttgaattctcaggtgtgacctggtctgccgcaccgacagagctgaaagaagccaaagatgaaaacggcgttgcaataaaagatacctacctggtcaccggtaaaatagatgacggtaaagggggaacgaaagatgttacttatgaagcaaaagtaaccggtgtggaaaaagatgctaccggtacagattatcatgctaacgtcagtgttgataccagccgtgaaatcaaggtactggcagcaggtacgaaacctccggcagatgaaatcctgaagacgctggatgatgccctggccaaagtggatactcagcgcagccagctgggtgcattccagaaccgtatgcagtccaccatcaataacctgaacaactctgttaacaacctgagtgccgcacgcagtcgtattcaggatgccgattttgccgttgaagtttctaatatgagtcgtggccagattctgcagcaggcgggaacatcagtgctggcgcaggcaaaccaggtaccacagtcagtactgagcttactgcgttaa

SEQ ID NO: 277417 - DNA, 1494 bp, Morganella morganii
atgacaatgacgctgaccacaccgctgattgtgacatttattgtctatatcgccgggatgctgttcatcggctatatggcctaccgctccaccaataacttcgacgactatattctcggcggccgccggatgggcagttttgtgactgcattatccgccggtgcatccgacatgagcggctggctgctgatgggattaccgggtgtggttttcttctccggtatttccgaatcctggattgccatcggtctgtgtatcggtgcctggcttaactggcggattgttgccggtcgtctgcgccttcagacggaagtcaaccatgcgctgacgctgccggattactttacgcagcgttttgaggataaaagccgtgttctgcggattgtctctgcagccgtgatcctgattttcttcaccatttactgtgcttccggcatcgtggccggtggtctgctgtttgaaagcaccttcggtatcagttatgaaaaagccatgtggctcggggcaggggcaactattgcctataccttcctcggcgggttcctggcggtaagctggacagataccgtgcaggcgacactgatgattttcgccctgatcctgacaccggttatggtgattgtgtctgtcggcgggtttgatactgcactggcaattatcgaagcaaaaagcccggcgtatgtggatatgttccgcgggctggatattgtcgcgattatctccctgctgggctggggattgggctatttcgggcagccgcatatactggcgcgctttatggcggcggattctcatcacaccatccgcagtgcacgccgtatcagtatgacctggatgatcctctgccttgcgggaaccatttgtgtcggtttcttcggtattgccttcttccagcagaacccggaactggcgggctcggtgactgaaaaccgcgagcggattttcatgagcctgacttctatcttatttaatccgtggattgccggtattctgctctctgccatcctggcagcggtcatgagtaccctgagctgtcagctgctggtcagtgccagtgccctgacggaagatatctacaaaccgtttttccgtaagaatgcctcacagaaagagatggtgctggtcgggcgcattatggtgctggtgattgcggcgatcgctatttacattgcgatggataaaaataacaaagtgctggggctggtcagtaacgcatgggccgggttcggcgcagcattcgggccggttatcctgttctctgttatctggaagcggatgacccgtaacggcgcactggcggggatgtttaccggcgcggtgacggttcttatctggatagaatataagtggtttaatttatatgaaattatcccgggctttattctggccggtattgctattgtggtggtcagcctggcaggccgtgagccggacaaatcagttcagggacgtttcgctgaggcggaagaccgttacctcggacggactgagtaa

SEQ ID NO: 277418 - DNA, 1398 bp, Morganella morganii
atggacgaaaaaacgcctgccacgccgccacgcggcgaactcaaacgcagtttaaccaaccggcatattcagctgatttccatcagcggagcaatcggcaccgggttatttatgggctccggtaaaacgatttcactggcaggcccttcggtattatttgtctatatgatcatcgggtttgtcttattctttgtcatgcgggcaatgggcgagatcctgctgtcaaacctgaattataaatcgttcagtgattttgccggtgacctgattggcccgtgggccggtttttttgtcggctggacatactggttctgctgggtaataaccggtattgccgatgtggtagccattaccggctatatcatgcactgggcacctgattttccgcgctgggtcagctcgctgctctgtattttactgttactgtccctgaacctggcaacggttaaattattcggcgagatggaattctggttttccatgataaaaattgtcgcaattgtcgcgctgattattatcggcggcattcttatcggcacacattttgtttcaccggaagggcatgaggcggcgttatccaatatctggtccgacggaggcatgttcccgaaagggataatcggattctttgccgggttccagatagccatttttgcctttgtcggtatcgaactggtgggtactgccgcagcggaaacccgtgacccggtgaaatccctgccgcgtgccattaatgctattccgttccggattattgcattttatgtgctggcgctgattattattatgtctgtcacgccgtggcgctccattccggcagataaaagcccgtttgtggaactgtttgttatgatcggcgttccggcggcagcgagcctggtgaactttgtggtgctgacagccgccgcatcctccgcaaacagcggtgtgttttccaccagccggatgctgttcgggttagccaaacaaggcagcgcaccaaaacaattctgccgtctgtcaaaacaggcagtaccggccaccggactgattttcacctgcatctgtttgtctgtcggggtgattctgctctactttatccctgatgtgatgcatgtgtttactctggtaacaacagtatccgctatcctgtttatgtttatctggagcatgatcctgtacagctacattatgttccgccgccgtcgtccggagctgcatgccgcatcagtctataaagtaccgttcggcagttggatcccgtgggtgtgtctgtccttctttgtctttgtaattgtattgctgacactggagagcgatacccgtcaggcactgcttgccacgccgttatggtttatcctgctggcagtcggttaccggaatgtcagaaagcaccgccttgcggaaacacaaaagtag

SEQ ID NO: 277419 - DNA, 990 bp, Morganella morganii
atgagcagcaacgctttagtctcggtcatcattccggcatacaatgctgaaaaattcatcggccgcgctctggacagtgtgataaaacagacctggccgtcggtcgaaatagtcattattgatgatggttcgtcagataataccgccgccgtctgccgggagtatatgagcagccacgatcacatccggtatatccggaaacagaacggcggcgtttcatccgcacgtaatgaaggtattaaagcggcctccggatgctatatctgctttctggacagcgatgacacttatgaaccggactttatccggacactggtgagtaaagtcacacaggatgaccgggatttcgcctactgtttattcagaaaaatacattccgacggccatattacacagtcagtatgctatgacaacacagataccgttattaccgactttctgaactttgattattttgatatctgctgtttaatgctgaaaaaagagtttctggataagaataatttattttttgattcatccatggttgtgggtgaagatgttttatttatccttgaatgtctgaacaaaggcgccttttcctatattaaagagtatttatacaattatatttatcacagtgaatcactgatgaataaaaaatggaagaaggcggattacatcagtgacctggatgcctggaaaaaaattctttcttacatcgctgagacgtataataaaccggataaatcatccgttttcagtaaagtccgcgctaaagtattaagcctgcagattcagtttatgtggaacatgctggctaccggtctttaccaggatttaaagtcttatatcaaagacttcagctaccataaatctgattttacattaatcagaaaaccgggaaaaaacaaattccgtctgaatattgtattatccggtaatattttcgtgtggcgtatagcacgtaaatttctgacaaagaaaaaaaacatcatccctgccggttag

SEQ ID NO: 277420 - DNA, 1545 bp, Morganella morganii
atgctgaaaaaatataaatacccgctgttatttgtcgctgccatgctgttgagttatctcaccaatacattcttgtatcagcgtgattcaaccggcccgcatttagccaccctgtttttggttttatgcaccattattcttctgaactgtaaacactggctgcctgccgttgcaggatttattattacactgattttttcactggaagtcggttatttcaccgaattccacgaacgaatttctgccggtattctcgattcagcactggaaacaaataattctgaagcaacactgatgctggggcactatttatattccatcatattgcctgccctgtgcataagcgtattaatttttatctgcttccggagaaaaagactccgccttccccgctggtttacattatcaccggtgttcattttcggctttctgatgatttccctgctccgtgaagtcatcccggaataccgtaatttatccattaatttcagcgaagacccttatgaactggggacgtatctccgcgagaaatttcctgttgtcgccggaaatattatgtatgtttcctccgttgctctcagccatgacaagtatacggagaattatcctgaccggaaaccaaaccgggtgctggcgtctgccggaaaaccacagaataaactcatcatctttatcatcggagaatcatcatctccgtccagatatcatatctacgggtattccaaagaaacaacaccggaaatggaacgcatttttcagggtgacaaggcctgcgtgacagacaaagtgcattcatcctccccgataacacgggattccatttcattgtcactttcattttacacaccggaaagcgaagaaaatttattccgtcagaaatcggttattgaaatagcacaggatcagggatacaaaacttactggctgggcgctcagtctctggtcggcgttaacggttcaaaatatggctatcttgcccggcggaataatactgttattgtggaagaaaacaatgacatgaaactgcctgagttattaaagcaggcgctggccgagccagatgaatacaaatttattattctgcatttatggggcaaccacatgccttatacaaattatacagaaacagaaaagcagcagctgaatgacgccagtgactatgatctgaccattcgtcacaccgataatgtgattggccgtctttatgatgaagttgaatcagtaaccgatgactatattttcatctacacctccgatcacggagaaattgtcggtaaaggccacggtttttccaaaggcgcggatcaattcctgattccgtttttatataaatcagggaatccgtcttatggctgtgaatttattgaaaaataccgcaatcaggatggctggatcagcggattaatgaacaaatatattttatctgaactgcttggttattcattagaccagtcgattgcggaaccggataaacagcatgatcggatcctttcaactgacggttatgcgattccgttttcatcttatttcaacaagaataagtaa

SEQ ID NO: 277421 - DNA, 1335 bp, Morganella morganii
atggatagtcaaacaccggaaaccatccgggaaacaggtgtactgggacgtttattccgtttacaggcacacggtaccacggcacgaaccgaagttatcgccggtataaccacctttcttaccatggtgtatatcatttttgttaacccgcaaatcctcggcgctgccgggatggatacacaggctgtcttcgtcaccacctgtctgattgcagcatttggctgtattctgatgggctgtctggcaaatctgccggtcgcactggcaccggcaatggggctgaacgccttttttgctttcggtgtggtcagcgccatgggttactcctggcaaatagggatgggggctatcttctggggtgcactcggcatgctgctgctgacggtcttccgcatccgctactggatgatagccaatatcccgctgagtctgcgggtggggatcaccagtggtatcgggctgtttatcgctatgatggggctgaaaaatatcggcctggttgtggcgaatccggccacgctggtttccatgggagatctgaccgcccactccgtctggctcggcgcactgggcttttttattatcacgattctggcctcccgccgtattcacgcagcggtgctgatctccattgtggttaccacactgattggctggtggctgggggatgtcacctataacggtattttctccatgccgccggatgttaccagcgtgctgggtaaagtggatgtggccggtgcctttaatatcgggctgtcagggattattttctcgtttatgctggttaacctgtttgactcatcgggtacccttatcggggtaaccgataaagccggactggcagataaagacggtaaattcccgaatatgcagaaagccttgtatgtggacagtgtcagctccgtgatcggcgggtttatcggcacatcatctgtcaccgcgtatattgaaagtacctcaggggtttctgtcggcggccggaccgggcttaccgccgtggtggtcgggatcctgttcctgctggtgatttttctctccccgctggccggaatggtgccagcctatgcggttgccggtgcgctgatttatgtcggggtgctgatgacgtcgagcctggcacgggtaaactggaatgacctgactgacgcagtaccggcctttatcaccgcgattatgatgccgttcagtttctccatcacagacggtattgcgcttggttttatctcttactctgtgatgaagctgggtaccgggcgctggaaagagctgaatccgtgtgtgattctggttgccctgctgtttgtgctgaagtttgtgtttgtcgaccactga

SEQ ID NO: 277422 - DNA, 2715 bp, Morganella morganii
atgtacagacagtcacattccaagccttatgcgatacccggcttttatgcatcatttgtttcgttattagtcttatctctctttttatacggatataactattacgatgcctggctgggaagcaaaaaaggcgcactctacagtttcagcacacggatagaacatcaggttgaaacgtaccgctatcagtccgctgagctgttccggctcgccaataccacggacaccgagaagcggcctgagctcgttccgccgcataaaatcctgaatgatatttactggattgacagccgtgtgccggttgtggatgccatcctgttcggccagaccaatgatgagacctacgccatcgcacggcgtttttcggattatctgaccattctgtggggcggtgagaatcagtttaattctgtgtattacctcaacggactggataacagtctgctgctggtgacatcccattctgccctgcgtccggagctgcgctaccgcgaaagcccgctgacattgggtgccgatgaaaaacgggcggaaatgctggcggactccacggcgctggatgagcgggaaaccctctcctcttttaccaagatgccgtcagaatcaacctattactatacctaccgcgcaatgtttaataacccgggtcagctgaccagcgtggtggcgtttgatttaccagtcaataacctggtgccggataatctggatttgtccaatctgtcactgatcccggccgaaacccacaccctcagcaatcgtccgaatgcagtgcagatcagtattaacggcctgtcactgaaactcagttaccgtctgcgtgaaatgccgtatcaggtggtttatcagctctcactgctgtctctggccgaagagatgctggcagccaatatctggctgttaatttctgtcttcctgttcagcatgctctccgtcggcggccttgtttatatccgcaagcgattcatttccccgctcaatacactggtccgccaggccagaaacagtgaagcgataaccaatgaaattgtggcgcaactgcctatcgggctggcgatttatgattttgccgccaataaacggctggtcagtaataccatcgccagccagctgctgaccctcagcgacctgaacaaaacccgcgacatggcccgcgagcatcagggccggatccagaccactattgataacgtggtttatgaagtcagtatgaatccggtccgtaatatgaatgatacttatcttattctgttccgggatgtggatcaggaggcgctgactgcgcgccgtctgcaattgtctgatcgtgagtataagaaaagcatcaaagcccgtcagtctgtgctgtcaaatatccgttcagagctggtggtgccggtcaaacagctcggtaatgacctgcatacgctggcaccgtacgtgactgatcctgtcggtggcctgctgatggataaagtggtgacggaatccggttatctgtgtgagtggatcgaaaatattattctgctggctgatctggaaagtgatgactggaaaccgaccaatgatgaattcctgttgtcacaaaccgtcgaggatatcgttaaacaattctcacgtcggataaatgacaaaggcattccgctttatttccataacagtattaataagcagctgaattacattggtgacggtcctattatcagtaagatatttttattattactgaattacgccgtcagtaatttaaaatacggaaaattggttattcgccttaagaatatatttaaaaatgaacataataatatcagattggaaataatcgccagcggctccggtctgccgcaatctgatctcgttaatctgcacgatccgtttatgtttcaggtcgcggagacggaaggtcgtccgaactcggggctggcattctatttgtgtgatttattatgtaaaaaactcagcggagagctgaaaatagacagtaaaccggacatcggtacacactacactgttgagttgccgctgcctgccaccgagatgatcggtgagccgtcagaggtgctggaagatacgctgtttaagatcaatatcattaatccgagtattcgggaaataattaacgcaattataattgaaaacggcggaattttatttgataaaaatcgcgcattattgcaagatgaatatgacatcctggtaactgactttgataagaaagcgagaaagccaatactctttttacgaaatgacattattgaacacagaatgattacgccttccctggtggagtgtaattataatttcaatgatgaaattctgaatgctattacgctgcttatcgaacaaagcttaacttcggatgagtttgatgatagattcttactcgggaatccgggtattaatacagcagcgctttccgtcggggaagttgttgcgttatataaaaatcagctggcacaaagtacgtataaagatttgtttgccaccacagtccctcctgatataagtaagatgtacacggaagcagaattaagtgaattgcagccactggcgctgacagtacatcgggtcaaaggggtctttgctgtgctcgactttgattatctgaaatcacgctgtgaagatatagaacgctgtatcgctgacaaaaacaaaatgaaggtggatgaaggtatccgggaaattgatgccattgtcactgaattgctgcagcaaggtaaccaagagtatgaataa

SEQ ID NO: 277423 - DNA, 396 bp, Morganella morganii
atggcaattaacgtaattacagtcagcggcaatctcggaaaggattgtgagcaacgatggactccggcagggaaagccgttgcatcgtttagcctaccggtgaaacagggatatggcgagcacgaaaagacatcgtgggttatctgtaaaatgttcggcgcgaaagctgagaaattgccagaacacctgaaaaaaggaatgaaggtgacggttactggcgagttcatcatggaggaatggacaggtcaggatggcaataaacgatcagcgccggtgattatcgtgaaccagttggatttcagcaacaatcaggcaggaagccagaagccgcagacgcagcaagctccagcacggaatgagccaccgatggattttgactatgatgttccgttttag

SEQ ID NO: 277424 - DNA, 363 bp, Morganella morganii
atgatggaatatccacgacgcatagggaaacccgcaggctccggtggaacgtatgaggacaattatcaacgcgccctgaaatcagcaattgagcaaatggatttgcaacggcgggggaaaccgaccggagagccttcactgtcagagcaacgtgttgccgagacactttacaacatctgccgtatcaccgcccttcactatcccccactacccgcaaacatcaaagcagcacggaatgctgctgagacacaggcgtggagagaatggaggactgaacatggaaaagctaccggtgtcggtggtgttgattattacggcggtgggcgtgcggaatcacgccccggccagagattgggggattaa

SEQ ID NO: 277425 - DNA, 165 bp, Morganella morganii
atgaacacatacacaatacaggatgctcaggtagaacggcaacggattgccgaacagcgcaggaaacgagagcagaaagaaaaggatgattactggtttcgtgaaagtgtcggattgccaaacggacgggtaccggcagaatttttaagcggagaattcacatga

SEQ ID NO: 277426 - DNA, 177 bp, Morganella morganii
atgtcgctgatgactgcaaaacaaaaacacaccaaggaacaggttattgagttgttcaatcaggctgacatggatgaaaagcagattgagcagattgtgtcggagtggcgttggcgcagggagaacgccaaaacaagccgcattctccatcagtgcagaatgaggctaccggcatga

SEQ ID NO: 277427 - DNA, 159 bp, Morganella morganii
atgaatttaacccctgaacaacttgagacgatcattgagaaagctgtagaaaaagctataaccaagtcattcatcaggtatctgaaattaactatcgggattcctgttgttgtctttatcttccttgcggtaatcggatatttcctttatccgaggtaa

SEQ ID NO: 277428 - DNA, 264 bp, Morganella morganii
atgagtgagctaatgaaaaaagtaatttttcgattcataaaagctcccaaagtaataaaaaatttcgatgatgaagaacgcgcattactgatatattttcttaatggaaaatacaaaaaaaggaaaatcagaatttataaaaaagcagcaaagcgtttgattgataaagatgttttggaagttgttgaatccagcgtccgccccggagttaatctaattaagatatcagactgttactattctattctgaagcagaaaatataa

SEQ ID NO: 277429 - DNA, 210 bp, Morganella morganii
atgaataatgaagtgattgcaaagcgtctggacgcgcagcatattttgctaaaatcaatttttgacgcgctgactaccgagcaaaaatccgaaattgagaaaaatattaaaagtttgagtcaggcagcaaggtacccgcacattctggagtcatttgatgagccagaagatgcagagaaagcagcactggacttgctctaccttaagtaa

SEQ ID NO: 277430 - DNA, 891 bp, Morganella morganii
gtgaataaagatgagtacatctatgttctgagtgaacgtagccaaataatatccatgcttgaatccatggatgaagctgatgtcataagcagaatgagcttggaataccgactttcaaaaatagatgaagagttagaacgtgctaatgtcaacgtaaactctacagcgaaggctgtgattacatttaaaggtgaccctgtcataggtactgttggtatctcatctaaatttggttcaaaaatattaaatgcatttaattcagcgataacaacaatatctacagctttacagccgtttttagccagtcaaaaaatagaacctatgattatcactggcactgctaagggctcatttggcttcgttttagaagagccgtcgcgaggagatatcttagactttgatgaaaaatctataacttccttttcacttgagaaagcatacaaagtactaaactcagcaattggtaatgatgatgaattattagcaactgaactcgaagatcttgatgagctgtctataaaaaaactaagagaatttattgatattctggtaaaagaaaaaactattttcacattgaaaaataatgatttttctttagttgtaagaagtcctcaacaactcgagaccattagttataagctaagtgtcgacaacataagagaagaaattaaaacattctccgtcatatttaccggagttttaccaaataaaagacgatgtgagtttaaatttgcaaatgatgaccaagatgtagaagtagcaacaattagccagaacattgaacaccctggagtcattaataccttagttaacaatgtagttcaggctaagtttctgtgcacgacagtaggaacaggaaaaacaaaatattctctaaaagaattaccataa

SEQ ID NO: 277431 - DNA, 585 bp, Morganella morganii
atgagcaatgaaatacctgattggaatgacgtcggcatactgccgccaataagcgtatcttcaccaacgagctctaaccgatctccgtataagacgaatactatagaattagtgtctcgctatgcttttaataaacaaagaattagcatactaggtggatttcttgagtttcgctctcgattatatgagattggaatggtttctggatttcaatgggtcgacggtagttttactgaaaacattgaacttacggaatcaaggccaccaaatgatattgatgtggttacattttttcatacacctgaaggccaaacccagcaatcattgatgtgcaaggatatgagtctatttttgccagagcaaggttcttggaggaaaagcgtcttcatggttgactcatactggcaatcattgtcatctgaacccgaaaagctggtagaaagaactgtatattggtacagtatgtgggcgcacaaaagagatctttcatggaaggggtttcttcaggtacctttatccgaaagtgatgaccttcaagcgaaggccaagttaaatgcaataatatcaggaggctacagtgaataa

SEQ ID NO: 277432 - DNA, 342 bp, Morganella morganii
atggcattcaatgacactgaagtcgtacaaattaaacaatgtatgaactatttcatggaaaagcgtcgtccaccaaagcatatccgggatgaacatgatcttcagtatcgtattgaagacgatagcgtaatcattttcgaggttagacaactgtcctggagcaccggacgtgcggaagaaatgctggccaaaataacaaacaacagaaacagcaactcgtggtccctgttctggtctactgagaataacgaatggcgacactacgacggccgaatgataggcagtttttctgacgcaataaaaattattgatgaagatgcagatcatcgattcttcggctag

SEQ ID NO: 277433 - DNA, 648 bp, Morganella morganii
atgaaaataggaacaaaaattagagctctcagaaaacagaagggattaacaatcctgcaattagccactgctattgatagcgacgtggggaatatctctcgccttgaaaggaatatccaaggctactccgagagcacattaacaaaaattgcggctgctcttggtgtcacggtagccgatctattctccgataccactacacagcaacaagatgataatgttgagtttgttggattcgtccccaatggcatggttaaagtagttggggaagcattcctggggattgatggcgcagtggatatgatagaggcccttgagggatgggttcaaatttacagcgatgataaggacgcttatgccctcaaagttaagggtgacagtatgtggcccaggattcaatcaggtgagtatgtggttgttgagcccaacacagtagtcagatccggcgatgaggtctttgtgcgcactgttgaaggtaagaacatggtaaaaatactgaataaaaccagagatggtagttaccaattcaccagcgtcaacaatactcacccgccaatcacagttgatccacgtgaagtggaaaaaatgcattatgtggcagcgattgtaaagccgactaagtttatcgataagtgcgagcaatcataa

SEQ ID NO: 277434 - DNA, 210 bp, Morganella morganii
atgcaaataacgcctttaaggaaaattcgtttggaaaagcaattaacaattgcagaggtagcagacgcaattaactacgatgtcgggaacctcagtcgtttggagcgcggcgctcaggcggcatcacttgagattgctgaaaaattggtgaaattttacgaacaaaaaatcactgaaatgcagattttgtatccgcagaggtatatgtag

SEQ ID NO: 277435 - DNA, 327 bp, Morganella morganii
atggaaaatgcaaatccacgcaaatcgttcaaccggtttgtgtcaaatcatctgatgacaaccgctcatcaggcaatcagaaacaccacacagacggtagttgcaaaactactcggtgttcacgattcaacaatcctgcgcagaacagaaaagttaccggagatatgcgagacattagccgcagccggtatcacggattttgttttgcctggcgagagaaaaatcagtgaggaggagtatcggtttctgtggaaacagattggtgaactctctcagatgagaataaaagaaaacgccccgactgttggagcagcagaggcgcattaa

SEQ ID NO: 277436 - DNA, 792 bp, Morganella morganii
atgaatacagcggaagtgtatgaattccctgttaagcaggagcaaccacgagtggcagacctggacgatggttacactaaactcgccaacgaactgctggagtctctttcatgctgcaatctgacagccagacagttccgggtaatgttggcactgatcagaaaaacatacgggttcgggaagaaaaatgaccggatagcagattctcagctgtcagaaattaccggcctgtcccgtcagaacgttaacaaggcaaagaacgaattaatttcaatgaattacatcgtgaaagatggcaataagattggggttaacaaggaggtttcggcgtggaaaaatcaacttagagacactgtctctaatctggagacaaaaaaagtctctaagttagagacaaatgatgtctctggtttggagacacacaaaagaaatactttaaagaaaaaagaaaatatatatacccctatatcccctaaacctgaaaaatcggccaagccagaaccctttgatgcaaatgcacacccgctgcctgactggttgagccgagatacctgggtgaactgggttacctaccggaaagacctgaaaaaaccgatcaggacaaaacagacactaaacgggctgatatccaggctgactaaattttacgaggctgggtatacacctgagagcgtaatcgacgaatcgatatcaaacggctggactggcttgtttatgccgaaatcaccaccaacacggcaacgcattgtccagcctaagcgtgttcagcaatttataccggaggacttctga

SEQ ID NO: 277437 - DNA, 729 bp, Morganella morganii
atggcaacagcagcacagactctggcgaggtttaaccgcatgaagccggagcacatcaagccaaaattcacgaatgctgctgagctgatggagtggcagcgtgagcagggcgctatcgatgcgaaacggattgctgacgaaaaccgtgtggctcgactgcataaaatcatggggcgttccggtatcagaccgttacaccaagaatgcacgtttgagaactatctggcgacaacgccggagcagcagcgggcactcagtaaatcacagcagtacgcatctgagtttggtaaatcatttggcggatttattttcagcggtaatcccggcaccggtaaaaaccatctggcagcggccatcggcaaccagataatccggaacgggaaaagcattctgattgccactctgccagacctgatgatgcgtgtccgtgagacataccagaaaggggcaaaaactactgagtcggagctgatcagcgacctgtgcgaagtggatttactggtgctggatgatgttggtgtgcagcgcaataacctgaacgaagaacttattatttttcaggtggtagatcgccggtcatcgaacaagaagccggtaggtgtgctgaccaatctcaattttgacgaactggcaaaagcattgggtgatcgggttattgaccgcctgagaatgggttcgccgaccgttatcaatttcacatgggaaagcttccgcaggcaggttaaatag

SEQ ID NO: 277438 - DNA, 444 bp, Morganella morganii
atgcaaaaacagacattccttctcaggaatatacagatactcagaaatctcaaggcagagctcgacaatctcccgcttaacgaagaattccccctcgaagtaaaaatatccgatccgaagcgaacccttccccaaaatgacatgtttcatgcgctgtgcggcaacgtagcagagcagggcattgtatgggctggtaatacgtggggattgcaggactggaaatgtattttcgtatccggacatgcaaaggcgacaggccgtgacgggacgcttattccgggacttgagggagagattgtaccactggcaagagaaagtaccgcaaacatgagtaagaagcgcatgacaagcttaatcgaatattcgcaggcgtgggctataggtgaaggtataaaaccccgcgccgcgcgatacaggtttaatcattacggacatcaggaatag

SEQ ID NO: 277439 - DNA, 198 bp, Morganella morganii
atgaaagaacagcacatacaccgacttctcaccaatgacgaagccgataatctctgcatttactacaggcgtaaggggtataacccggtgaaatcactgaatatcaatcctcagtatttcgacgtcaccgtgtatctgccggtagtcagatatctgaaaccaacaccacgggcaatgattaacaggatgtggcgatga

SEQ ID NO: 277440 - DNA, 405 bp, Morganella morganii
atgaatgacgaacaattcaaagtatgcgttgacataatcagggcatgtcgcgatctggattcgttcaccaatcacgaggccggactgcgcacaggaaactcgacagagttcattaagtggtttaccaacaaaatgctgtatatcggatgtttgcgaaaggttggtataacgaggcataaccgccatgtgagtccgttatttgctatatcgccggatgctgtcaccaggctgtatcgctacgtttgtgattcccgtggtgagttaatgccgggtggtgagcagagtgagagaaagcgaatcgaattttgcggaaaggtggtcagcaaagcatacattgagccgggtttcggacagtcgattataaccaggatggacgcaatgctgcgggaagtgcgctgtttataa

SEQ ID NO: 277441 - DNA, 630 bp, Morganella morganii
atggtgaagtggccaaggcgaaaatgcctgatatgccgcgactggtttcacccgaagtttagtaacgaatggtggtgctgtccggagcatggtgctgagttggcaataaagcgacgaagcagggaaagggaaaaggctgaagccaaattaagaaaggagcagcagcaaaaagaacgtgaagcaaaagataaattaaaaatccgcaagttagcagtaaaacctacctcatatttccggcagcaagcacaaacagcgtttaaccaattcatcagactcggagaccgcgatgaaccatgcatcagctgtggtgaacctaatccgcctgatttacatggtgggcagtgggactgcggtcattttctgtctgtcgggtcacatcctgagctgcggtttgaggagcgaaatgcctacaagcaatgtaaatcatgcaatgcgggggccggtaaattctcacacaaaaataacactgtaacgcagaaatacgagttacggctgattgaaaaatttggacaggagttagttgactggttacgcggtccgcatgagataccgcactggaagcgggaagactatatccgtatacgcgatgagtaccgtgcgaaagtgagggtgttaaagcgtgagacctga

SEQ ID NO: 277442 - DNA, 123 bp, Morganella morganii
atgagagaggaacattggagcaacactactcttcagggcaactatacgggaagcgtcatttctgttttatcggaagatattaaatctcatagcctgcaaaataacgaggtaatgtatgcgtga

SEQ ID NO: 277443 - DNA, 438 bp, Morganella morganii
atgcgtgatattcgccaggtgttagaacggtggggggcttgggttgttgataatcaggaatcagtatattggtcaccaatagctgccgggtttaaagggctgatccctgaaaaagttaagagtcggcaatcatgcagtgatgatgatgctctggtgatatccggcattatggcaaaactgaatatccgtaacagtgatatgcatgatctgctttttgactactatgttttcggtaaaacgtttatccggttggcgaagaaatacgggtgctcagacactcacatagggaaaaaactccagaaggcagaagggctggtggaaggaatgctcataatgggagatgtaaaactggaaatggacgctacatcacatcgtggaggtatgcggacatttatgaacaaattacatgatttaaaaattaatactttacgatcgtaa

SEQ ID NO: 277444 - DNA, 213 bp, Morganella morganii
atgtctaatacaatgactggttcagtaaaatggtttaacgaatctaaaggttttggcttcatcactccggctgacggcagcaaagatgtgtttgttcacttctctgcgatccagagcgacagcttcaagacattatttgaaggtcagaatgttactttcaatattgaagacggggcaaaaggtccgtctgcatcaaatgtggtgggtctctaa

SEQ ID NO: 277445 - DNA, 930 bp, Morganella morganii
atgtactctctgaataaattttctatcaggcttcttcacccaaggtacatattaacctggattggtatcctattacttttctgtttggttcagatgccttatccatggcttgtgtttttaggcgataagttaggtcgtttttctggtttgttcctgaaaaggcgggtatccataattaaaaaaaatttagaattatgttttcctgacagaaataaaatccagatagagagtatggtcgcaagtaatctgtcatctttagggattgcattatttgaaaccggtattgcctggttctggaatgacaaaagaattaatgaaatatttagagtaaagggttgtgataatttcaatgatgtatatgacaaaaataatggtgttttaattattggtattcattccatgtcactggaacttgggggccgagttatggggctgtgttttcctgtaaatgctatgtatcgtccccacaacaataaagcaatggagtatatacaaacaagatgccgaagccgttccggaagcgggatgatcgaccgtaagaatctgaagtttatggtatcggaactaaaacgcgggcaggctatttggtttgctccggatcaggactttggaactaaaggtactatcttcgcccctttttttttggtagctaatgcttctacatcaaaaggagtggcagctatagccaaattatcgaaatcgccgatacttactgcaacgatgataagaaataatgaaagtggtaagaggccttatgaattaataattggtaaagaaattgctgattttccgtgtggagatgacctggcagatgctgagaaactaaatcagattattgaggcagaaatcatgcatgctccggaccaatacttgtgggcacacagaaggtttaagaccagacctccgggagaaaattctctgtacaaataa

SEQ ID NO: 277446 - DNA, 705 bp, Morganella morganii
atgaaaaaaatattgttgtgcctttttttgattcacacggatactgcatactcagcgaattgtgagctcgatactcaggattcggcattatgcgaggcggcaaatggtggtgacgctggtgcccaggttacaatcggatcttattactactacggtaatggtgctcccatagattataaaacggcggctgactggtatacaaaagctgcggtacagggtaatgagtacgcacaatattctctgggggagatgtattttcagggggagggagtgcaacaggattaccggcaggctattgagtggtttcataaatcaggtgagcagggaaatgctggtgctcagtttcgtcttggtgctatctatgaagacggtgatggagttaatccggactttttaaaagcggcagagtggtataagaaagcagctgaacagggaaatgcattttctcaataccagcttgcgaaaatgtattattacgggaagggaatagaacagaattaccgcgttgcagcggagtggtataagaaagcggccgatcaaaaatatgcatttgcactggcaaagttggcagagatgcatctctctggtgaaggcgttgaaaaaagccaaccaaaggccgagtcattgtatgatgaagcatgttttggtgggtttcagtcggcatgtgacagccttgcgaagctgaataaaaaaaaccagcactaa

SEQ ID NO: 277447 - DNA, 441 bp, Morganella morganii
atgtataagaatattctggtaccgattgacacttctaataaagcactggttaaccatgtcatccctcacatcgaatctctttcaaagtttgatgacccgcacatacattttttagtcgttataccaagctacaaaatgtttatcggcctttcatacggcatagaaaaagaaatcattacagaagataatcaacgattgaagttagcagaagctgaccttaaaaatgaagtttcaaaatttaatcttccggaagatcgggttcattatcatgcaattcttgacactccgatagatgggattttgactaccgcagaaaaaatacacgttgatttaataatcatcagctcaagatcaccaaatatttcaaccaaatatctacttgggtctactgcatcagctgtagtccgctatgcagaaacatccgtcctggttgtccgctaa

SEQ ID NO: 277448 - DNA, 459 bp, Morganella morganii
atgcagaacattagttctttttcattatttccggcattatctgatagtttgctgtcaaatcgctttgaccagatggaccgtttattcagtcaacttacgggcaacaggccaataacctcagaacatccatataacctgaagcaattaaatgatgcgcactatcaactgacggttagtgttcccggatacagggaagatgatcttgaggtatcattgaaaggtggcaaacttagtattcagggtaaacaacctgcagaagtagttaatgaatcagagaaatgggtacaccaagggatattaaaaagccagttttcattagaatttaaccttggtaagaatgtcaaaattcggaatgcagaattatcctgcggattgctgacattggatatagagtatgaaattccggaagaagaaaaaccacagttgatagctattgaaaataaagatataaaggcttag

SEQ ID NO: 277449 - DNA, 210 bp, Morganella morganii
atggattattttttgacgttaccgggcagcgatacttgttctgttctgcataaaaaggcatgtccgaaattacaacaggcaaaaagtacagtgtatgttggatactactggggagagcacgctgcggttcagcaggctatcgttgtggcaagaggggcagtggttttatgtccgttatgcataaaccagcatgatgaagagactcagtga

SEQ ID NO: 277450 - DNA, 192 bp, Morganella morganii
atgcgcatgcctgacaaatattccagccctacagcatacgcctggggacttataacctctgcctttggcgttttatctctggaccagtgggctattgttgccgggatcatctgtactgtcgggacgttcctggttaactggtattacaaacggaaggaattccagctgaaagccggagaacatcatgaataa

SEQ ID NO: 277451 - DNA, 477 bp, Morganella morganii
atgaataaccgattatttaaaaaagtcatggccgcttgtgccgtcggggcgattgccggtgcgctggtgctgatccccgcgtatgagggtgttgagtacaaaccttaccgtgatgtggctggggtgctcaccgtatgttatggccatacaggtagtgatattcagcccggcaagctgtatacggatgctgaatgtaaggcgctgctgcataacgacctgacgaaagtccggcgcgcggttgacccgatgatcaaagtgccgattgatgacaatacccgggtggccatctattcatttgtctacaacgtcggccccggcgcgttctcgcgctccactatgctgcgcaaactcaatgccggtgatatcgccggggcgtgtgacgaaatgaaacgctggacatttgctggtggtaagcagtggcagggtttgattaaccggcgcgaaacggagaaagcggtatgccacggaaccctttag

SEQ ID NO: 277452 - DNA, 159 bp, Morganella morganii
atgccacggaaccctttagtgctgatcatcattgctatcatcctgctgacggcctgcctgttggcgggttgttatctgtattcactcgatactcactgtaagccactgccgggtaacccgctggacggtgtgatccattatgagtgtgaagcgccatga

SEQ ID NO: 277453 - DNA, 378 bp, Morganella morganii
atgaactggaaagaagcggtaattgctgcgctgtttattactgctgcctggtgggtatatgacacctaccgggataaccagcagctgaaggtgaataacacaacgttgtccggacagctgtcagcacagcagacgataaataccatcacgctttcagccgttgccatcagacaccgcgtggcattcgacaacatcaaagccaaacaggaagaggacatagagcatgtcaacgttaaaactgttatcaaaactgttttcaaagacagcgaatgcgctgttgctcctgttcccgctgatgctgttagtgagttgcggaaatacgcggacggaatacgttcccgcgccggtggtgccgataccgccacaattgaccgctga

SEQ ID NO: 277454 - DNA, 516 bp, Morganella morganii
atgcagataaagtcagtttttatgtttttgggcatgtttctgcttaatggatgcagtgtcaaggtacccaaagatataaccccggttaaaccttttgatttatctcattacttaggtgactggtatgaaattgccaggatagataatcgttttgaaaaaggcttaagcaaagttacagctaactattctcttcgtgatgatggtggtgtcaaggttatcaacaggggttgggatgcgagtaacaataaatggaaagagagtaccggaaaggcctattttgttaactcagctgatactggggcgttaaaggtatctttcttcggacctttctatggaggttacaatattattaagcttgatgatgactatcagtactcactggttgttggccccgataaagattacctgtgggtgttgtcacgaacaccagctatgccgccagagctgttaaatgagtatctcagctttgctggtgaacatggttttgacagagaaagaatacttatatttcaataa

SEQ ID NO: 277455 - DNA, 198 bp, Morganella morganii
atgactgaaaaatacgaagtcacagcaaccaagaaggacggtacgacatatcacggactgacaacaatgaaagagccccgcattactaacggactgattggtatttctggtctggatggctcatggacatataccgcaccggatgaaatcagcgacatcagatacattccggtggttgaggaaaagagcaagaaataa

SEQ ID NO: 277456 - DNA, 528 bp, Morganella morganii
atggcactcacagataaacaggaaatgttttgtcgtgagtacctcgtagatttgaacgccacacaggcggctattcgtgcggggtacagtgataaaactgcgcgaagtgtcgggaatgaaaacctgacaaaacctgacatcgaaaaacggattcaggaattaatgagcagccgcagtgagcaacttaaggttgatgctgaatatgtgctgaagcgcctggttgaaatagaccagatggatgttctcgacattatgaccgatgacatgagcataaggccggtctccgactggcctgcatcatggcggcgctacctgagcggcttcgaccttgctgatatgtttgaaggacgtggtgaaaatcgggaaatgatcggcatcctgaagaaaataaaatggcctgacaaggtcaagaaccttgaattgctcggtaagcacatatctgtccaggcattccgggaccagattaaaagcgagcatgatgttgtcggcactctctctgacctgatggacgaactatcgggcaaataa

SEQ ID NO: 277457 - DNA, 1485 bp, Morganella morganii
atgaagccagagcatttagcgttactgcgtaataagcaatggcgtctgaataatctgtactggatcaccgataaagaaggtcatccggttcgcttcaaaatgacgcctgagcaaacagaatatttcgaaggcatccacaaccgcaatatcattctgaaagcccgtcagcttggattcacgactgaggtctgcattatccagcttgacgcggccatatttgaatcagctaagtgcgcactgatagcgcacaccctgccggatgcaaaacgcctgttccgggagaaaatcaaatacgcctacgagcgcctgccggacgaaatcaaagcagccaatcccgcgagtaatgactccgccggtgaactggtgttcagcaaaggcggctcggtgactgtgtccgtgtcgtttcgtggcggtacgctgcgctacctgcacgtatcggagttcgggaagatatgcgccaagcagccagagaaagcccgtgagattgtcacaggggcgtttgaggcggtatcaacggaatgcttcacgacgattgagagcacggcagagggtcgggccggttatttcttcgattattgccaactggctgaaaaagcactgatgcagggcaaaacattatctccactggactggaagtttttctttttctcttggtggaagaatccgcagtacgcaatcgaccctgttgagcagttaccgcaacgcctgactgactattttgatgagctatcaggcaaatatggaatcacgctcaacgaccggcagaaagcctggtactacgccaaagaaaaaacactcggcgacgatatgaagagggaatacccgtcgataccgtcagaggcatttcagcagtctgtggatggtgcgtattacgccaagcaattccgctggctgtacgagaataaacgcattggcgaaatccctgataactcacacctgccggtgcatacttactgggatatcggtgtgggtgactcaacgtcaatctggtttgtgcgtgaagtcggtgaagaatttcacatcatcgatcactactcaaacagtggcgaaggtctgcggcactacatgaaagtactgaaagacaaaggctatgaatatgccagccacaacgggccgcatgatatcgacaaccgcgagttcggttcagacgcgaaatcacgccgggaactggcgcaggaagggtacgaaattgacgggcaaacctactccatccgctttgaggtggtgccgaagctatccgttgatgagggtattgaggcagtgcgcgaaatcctgccgctctgtgtattcgatgagaacaagtgtggcgaaggcattacccaccttgaggcgtaccggaaagaatgggatgacaaacgcgggtgctggaaagataaaccacttcacgactacacatcacacgatgctgacggattccgttattttgcggtcagtcgccgcaacgtcaaacgtctgacaaagtctctgacattcaactggaactga

SEQ ID NO: 277458 - DNA, 1380 bp, Morganella morganii
atgaatacaaacgtggattacaaacatcctgcatacaccgaatttttaccggaatggaatatgatcggggactgcgttgacggtgagcgcgtagtgaaaagccgcggtgaaaagtacctgccgcaccccgcagataaaaagcgggatgacgatgatggtgagcgatacaaaaaatatcttctccgtgcttcgtttctgaatgcaaccggacgaacattaagcggattactcggtattgcattcagtaagccggtaaaaatcagtatatcgggtggaacaaagagtcttgaagctgatattgatggtcaggggcaaccattgactcagatgatccgcgatgcattgtctcaggtattgcagcgtggccgtgccggactgctcagtgatttcagtggggcaggtatccagactgaggcagacaaaggcagaccatacgtccggttgtttacggcgaaggagattatcaactggcgggtcaccggcgggaaaacatcactagttgttgtgaaatatcaggaaccggttgagtctgatgattttgaactgcaaatgcaggaccgctggattgagttacgtctgatcgacgggttggcacactcaaggcggtggcagaaggacagtgaaatcagctctggcgagtggataaaattcactgatgcgcagggaaagccgctttctgagttgccatggtcgtggattgggtcaaaaaacaatgaccatactcctgatgcgccaccactggctgacatagcttatatgaatataaagcattaccagattgaggcagatattgcagagtcagcacacactatcggtcagccgatggttgcgctgtcaggcctgacagatgactgggtgaaaaaccacatgtcaggcgggttcacagtcggttcccgcaaaggagtgttgttgcctcagggtggcgatatgaagtttgcacagccggaagaacgcaccatgcagattattgtggcagagcgccgggaaaagcagatggcaatgctgggagcaaagctggttgagcgaggctcatcggcgagaacagcaacacaggcactggatgaagcacagacggataactctgttttatcgttgagcgccggtaatgttgagcaggcttttaatcgtgcgctggctttctgtattcagtttgccggagctggagaagcttctgttgaactcaataagacatacgagattgcgcagtttgattcggcagcaattactgcacttctggcatctgtgcagtccggcaatatgcggattgtagattttatccggtatatgcagggggcgaaccttgttccgcaggatgagaaaccggaggatgtagctgaagagctggggttgatcagaggtacaaatatgctgggagtataa

SEQ ID NO: 277459 - DNA, 1062 bp, Morganella morganii
atgcggccgggtctcatttttgataatgcactgatgattcagattatgctggaaaggctcaaatcatcaactgctgacacacgtgaactggtgtcagatattcgcgctgctgtagcatctgcattatccggatattccggtagtgtttcctcagtcagcagagcgaaatcaattgcgctggcgctgagaaaaacgctgaagccagttctttccggttattctgacaggttacttgatgacattatcaacgccgctgttgtgatggcagacgctgaatatcacgggtttaactcactggtaaaaaacgttaatccggctgatgctgacaaggtgcgcagagatgtgcaaaacataccgctctctctgacgggatggaacagctccctgtttctcgccaaattcattgagtcgtgggccgatacagccatgcagcagatagagaatcaggtggtgatatcgttgtcgtcaggcgggggggtggctgacctgcaatcggctattaacggaacctcagcggaaccgctgataatcgcagcggcagtggttggcagggtggtcaggggatttcagactgttgccagaacgacattacaacatgctcacagtgtggcggcgacggatttctataaagagaattctgatctgattaagtatgaggaattcagtgcaatactggataacaaaacatcggcagtgtgccgttctctgtccggccgctgttatccgcttggtaaaggaccgaggcctccgcttcaccctaactgccgtagtcgcttgctcccggtgcttgatgaaaaatatgcagacttgtttgtcacagagccggtcggtaattctgaatggggcgaagaaacttattatgagtggctttaccgccagccagcgaacaggcaggacattgtgcttggtaagaccagtgcgcagttattccgtgagggcgggttatcaccggaacgattcgcaaaattacaactcgataaatacttcagaccaataacactgaaggaacttcagaaaatcatacccgatgccttcagaaaggccgatatcgaactcaaatga

SEQ ID NO: 277460 - DNA, 687 bp, Morganella morganii
atgtttaagtggaaattaaccaaagaagaatttgacgtgctgactgaagagcataaggccatgtacaaagaagccggtgacggataccaaatccagattgacggcatgcctgacatcccggatgtgtccggtcttcagaagaaagtcgatgaactgttatctgagaagaaatcagaacaggaaaagcgccgtcaggctgaagaagccgcaaagaaagctgcagaagaacaggcccgtaaaaacggtgatatcgaatcactggaaaagagctgggctgaaaaactcagcacccgcgaaaaagagttactgacacagttacaggaaaaagatgccagcctgcaaaaacttttggttgataacgtcgcgcagtcgctggcgacaaaacttgcgggtgacagtgccgcgctgattgtgccgcatatcaaatcacgccttgccgttgaagatggtaaaacccgcgtggtggacgcaactgggcaactatcagctctgactatcgatgagctggaaaaagaattcagaaataatcagttatttgcgccggtcattatcggcagtaaggcaaccggaaccaggggtgacggaggcaaagacaaatcacctgccggaggcagtgataaacccaaaagtgtgaatccattggtggatcgcgcacgtgaaatcattgcaaaaaatacagaggcataa

SEQ ID NO: 277461 - DNA, 981 bp, Morganella morganii
atgacattgcatatttttcagcatcaggtatctctggcagcgacagagctggtggctcaggcagtacagcagtttaatgaagcatccggcggtgcgctggttttcggtgatggtgaccatattggtgattacattgagcagacatcatggcagttacttggtggtctggcacagcgtcgtaatgcatacggatcaggtaatcttacaccgcaggagttagggcaaattctcgaccggatgattaaggtcgatggtcgtatcgggccggtatctgtcactccgacgatgatgaagcgcctgggtaaagacgtatcagaagcggcagcggtggtgtctgctcaggcagcagaagcgatgctgcaggattatctgaacactgcaggtgcggcactgaaagcggcaatctccggcaacgcagcggcagttactgacctgacagcaacaggaagcgcaccatcactgcgcgggctaaacaaaggcacccgcccgtttggtgatgcgtattcccgtattatcgcctggctgatggacggtgcaacgttcaatgactttatggacgaaacactaaccaactccagtaacctgttccagattggtaacgtggccatcaagcaggacggattcgggcgtcgttttgtaatttctgatattccgtctctgtctgaaggtaataagcagcattcactcggtctggttaccggtgcagcggctgtacagacctcaccgctgatcatgaaagcgcaggacgttctcggacaggaaaacattaaggctctgatgcagggggaatatgatttcaccatcggtttgcgtggttatcagtgggcgaaggacagtatcaagtcaccgactaacgaacaggtagccgcaactgataactggaaacaaattgctgcaagcatcaaagacactgccggggttatggtgacattcggtaaagatgctgatgcaggcggtaaggctgctaaatctgcgaagtaa

SEQ ID NO: 277462 - DNA, 378 bp, Morganella morganii
atggcagtacaaatcagtccggagcagataggcgagcaactggaaatgatggggtttgaggctcctgattttgcggttgccgccgcattatctgtagtggacagcattgacggatgccttgataaggcagggtatacggatgcggtgatgacgcttatcaaggtgtattccgtcatcctcatcctgtctgcggctgatgtccgtaaaattgcatcagaacatgcaccgtccggtgcttcagtttcgtaccagtattttgctgacggcagaaaatcgttgctgaaattgttatccgcactggataccgccggatgcacagataacctgcctattgaccggccggtcagcattattcagtttgacgtgaaccgggggtga

SEQ ID NO: 277463 - DNA, 216 bp, Morganella morganii
atgagtgacggaacaaaaacggtaggcactgaaattgtcatcaaaaatgtcatctggacggaatacagcgaagccacacaagatgattacatcgctatcggcaagcatgacggacaagatccgttcgcggccggagccagcagaatcaaagctgttgaccgtgaccgcgatattaaaggcggcaaagatgactacactctaacaacggcggtgtga

SEQ ID NO: 277464 - DNA, 192 bp, Morganella morganii
atgggagcaagagtaatcggtattaaccgtgctgttgctgaccttaatgcgctggtcggtaatatcacgtcaaaaaaagtcagcagggccatgcatcgtgcgctggatatcggcggcagacaggctgcggtatacacaccgattgatacaaagacactgatcaactctcagttccgtggtgtggaggtgtag

SEQ ID NO: 277465 - DNA, 819 bp, Morganella morganii
atgacctggcttttacttgcattatctctgctgttattacaatttcaccggacactgtcactggcaacacttctggctgccaccatcagcgccctgtttaccggtgtgatggactggcatgccctgctcaccctgtggcttgctatcctgctggctgttgcacggccttataccgcaccacgttcatggcagcgtgtactgctgacactactggtcatcaccgtcgtgacggggctggcttttcatctgctgccgggattccacaacctgcgctggatgcccccggaggctgccgggccgcacagtccgccctattctttctggtttaatgccgataaagcactgcttccgtttgtgctgatcatcatcattccgcagctgtttgtcaccgcgccgctgcgccgggtcacccgtctgcactggctgttactggctttctccgtacctgcactattgttactggcaaccgctcttggcggactggggtttgaaccgcatctgccgcgctggctgccggcgtttatgctggcgaatctgttttttgtctccctcgcagaggaagcgctgttccggggggctattcagcaggtgctttcccggtatctgccgccctatgccgcgctgtttattgcagccgctgtcttcggcctggcacatattgccggagggccgctgctggttgtctttgccggtctggcaggggttatctacgggctggcctggatgtggagcggacggctgtgggtggcgacagggtttcacttcgcactgaacctctgccatctgctgttttttacctggccgtttaaggtggcgtaa

SEQ ID NO: 277466 - DNA, 504 bp, Morganella morganii
atgagcaccgcgaaattagtgaaaaccacagcttctcacttagtgtacacccgtaacgatgtcactgatgatattaagcaggaaaccattgatgaactgaatcatcaggttctgcagtttatcgacctgtcgctgatgaccaaacaggcgcactggaatctgcgcggccgtaatttcattgctgtacatgaaatgctggacggcttccgcgacagcctgaacagccacctggatacttttgccgaacgcgctgttcagctcggcggtgtggcactcggtacttcacaggcgatcagtaaagcctctgctttaccggcttatccgaccgatatccacactgtgcaggatcacctgaaagcactggccgaccgttatgcgattgttgccaacgatatccgccgtgccgtcagccgcgttgaggatgaaaataccgcagatatgtttactgccgcctcccgcgacctcgaccagtatctgtggttcattgaagccaatatcgaataa

SEQ ID NO: 277467 - DNA, 189 bp, Morganella morganii
atgaaagaattaaatcaggaacaattattgttcgtttcaggtgcagggtttatctctgccggaatgatgttcgccggtattgcatttgatatcagtgctgtaatgatctcaaatatcagccggaacaatgaagaaattgtttttgctgatcataaggatatttcccgtcttcgttatgatgttatataa

SEQ ID NO: 277468 - DNA, 1638 bp, Morganella morganii
atgtctgttgtgacactgatccttgtttttttgctggctgtgattgccagtgtgtttatctcccgtctgctgggggacaaaattccgctgccttttattcagattgccattggcgcggggttatcactcttcggttttgatgtggcgtttgagccgcatctgttcctgttcctttttatcccgcctctgctgtttcttgacggctggcgtattccgaaggaagcgctgttcagtgatatcaaaccgattttctcgctggccatcggtctggtgtttttcaccgttgtcggcatggggctgtttatccactggctgatcccggcggtttctcttgcggttgcttttgcactggcggcgattttgtcaccgacagacccggtgtctgtggcggcaatgaccgtcaatgcgccgcttccgtcccgtatggcccatattctggaaggggaatccctctttaatgatgccagcggcctggtgtgcttcagttttgcggtaggtgcggcactgaccgggacgttttctctgccgtcggctgccgggaagtttatggtggtggcgctgggtgggattatggttggcctgctgattgccatgtttatcgggaaagtgaaccagttcctggtgcagcgcaccggggaagacccggcgattcagattatgatcagcctgctgatcccgtttgtctcttatctggcggcagagcacctgggtgtgtccggcattctggccgcagtggcagccggtatcgccatgcactatgagcgtattgtcggccgtatgcagtctgccacccgcatgcagagcaaggcggtctgggacaccgtgcaggtcgcgctgaacggaatgatctttattctgctgggtgaacagttaccgggtatgtggcgctcagtgccgcaggtggcggcagatgccggagcttccgcaccgtgggtactgctgctgtacgtggtgattatcacctttggcctggcggtgctgcgttttgcctgggtatggattgccatgacactgacggttttccgccagcgccgcaaaggtaagcagtctgatatgccgcatctgcgcctgatggcgattatggcaactgccggtgtgcgcggggcgattaccctcgccggtatcctgacactgccgatgctgatgaatgacggttcaccgtttccgcaccgggatctggctatctttctcgctatgggggtgattctgttttcactggtgattgcggcggttgcactgccggtgctgaccagagggctgaatacggacttaccgcatgataatgaagagctgaatgcccgtttcaccctgaatgaagccgcaatgagcaatctgcgtgtgcagatggcggagccgctggaagatattgatgaaatgacactgcgcacagaagtggggactcatttgctggagatctacggccgtcatcttgacagtaacagtgatgaccagactgccggatttgactggcataatgtgatccgcatggaacggcggatgtcactgacagcgcttcaggcggagcgggatgccctcaaacagctgcgtaagagtaagaatatcagtgagcacacttacacccggctggtgcaggaactggatctgaaagaagaggcgctgaaactggcgctgcactga

SEQ ID NO: 277469 - DNA, 456 bp, Morganella morganii
atgattcgtttatgtccggtcagtaaagataactgggaagcgtgtgtggatctggaagtgcgggaggatcaggaggattttgtggcctccaatgtgtattccctggcacagcttcagtttgtgaataatttcagtgccgatgtgatttatgacgatgaaaccatgatcggttttgccatgtacggtattgatgacgatgatggcatgttctggatctggcgctttatgctggatgcacagtttcagggcaaagggctgggtaaagccgcatttgctgctttactggaaaaaatcaccgcgatgaataacgcccgggagcagccgctgccctggctgcggttgagttatgagccggaaaatgaattcgcaaaacacttttatcagcgtttcggctttaaggtggtgcagatgatggatttcggggaggaaatggcgcaaatgccgctatcatcataa

SEQ ID NO: 277470 - DNA, 1320 bp, Morganella morganii
atggatacaacacaaccgcaggttgtggtcagcaagactgacaccagcaatgattatcgcaaatggcgtaagtccgataccgtctggatgctcggactgtacggtaccgctatcggtgcaggcgtactgtttctgccgattaacgccggtatcggcgggctgatcccgcttatcatcatggccgtgctggccttcccgatgacctttttcgcacaccgcggtatgtgccgcttcgtgctgtccggtaaaaatccgggcgaagatattactgaagtggtggaagagcatttcggcgccaaagccggcggccttatcaccctgctctatttctttgctatctatccgatcctgctggtctacagtgtggcaatcaccaacaccgtggaaagctttatcgttaaccagatgcatatgacggcgccgccgcgcattattctgtcactggtactgattatcggaattatgtgtattatccgcttcggtgaagccgcgattgtcaaagccatgagcgtgctggtattcccgtttgtggcggttctgatggtgctggcgctgtatctgatcccgcactggagcactgatgtattcaaaaccctcactttcgacagcaatacggccagtgtcaccggtcatggtctgctgataacgctgtggctggcgattccggtaatggtgttctcctttaaccattccccgattatctctgcctttgctgtcgccaagcgtgaagagtacggcgaaaatgcggagaaaaaatgctcccgcattctggcgtacgctcacattatgatggtactgactgtgatgttctttgtgttcagctgcgtgctgagcctctccccgcagaacctgcaggaagcaaaagatcagaacatctctattctgtcttacctggcaaaccacttccagaacccgatgattgcctatatcgcaccattcatcgcgtttattgctatcaccaaatcattcctgggtcactacttgggtgcccgtgaaggctttaacggtctggttaacaaagcattacgcgccaagggcaaaagcattgcaccgtctaaactgaataaactgactgcactgtttatgctggtaaccacctggattgttgccacattagacccgagcattctgggtatgattgaaaccctgggcggcccgatcatcgctatgctgctgtttatcatgccgatgtatgccatccgcaaagtacctgcgatgcgcaaatatgccggtcacctgagtaatctgtttgtggttgtgatgggtctcattgcaatttcagcggtgttctacaatctgtatcagctgttttttggttaa

SEQ ID NO: 277471 - DNA, 1188 bp, Morganella morganii
atgaagctcacagtaaaacagatagactccagcaaagccagggagaaggattataaactctcagatggcggtggtctgtatttgcttgtaaaaagcaacggaagcaagtactggcggctaaaatatcgctttgatggtaaagaaaagttgttttccattggtgtttatccggtggtcacacttgctgacgcccggcgaaaaagagacgatgcaaagaagcttctgtctgatggagttgatccgggcgaaaaaaagaaagaacggcgactatcagccaaagctgaaagcgttaatacattcaaaaatatcgcccttgagtggtacgagggaagaaaggatcggtggtctgtcggatatcgagaggacatgatggatgcctttgaaaaggatgtgtttccatatataggtgaccgcccgattgcagatatcaagccgttggaattattagaagtgctttccattatggaaaaacggggcgccacagaaaaactaaagaaagttcgtcagaggtgtggcgaggtgtggaaatacgccatcattaccggcagggcagaatataacccggctccggatttagccggggcgtttattccgcacaagcgtgaacactatgctcatttaatggttagtgaattacctgactttctaaaatccatcgataaatatatgggcagccaaattgtcagaaccgccttgagggttttaattttgacaggcgcccgtcccggtgaattacgtaaagctgaatggtctgaaattaattttgacaaggcggtatgggaaatacctgccgaaaaaatgaaaatgcggcgacctcatattgtgccactgtcgaaacaagttattgagttactgaaacaaatacatccgattagtggaagctatcaatatatattccccagcagaacagattataaaaagcatatctctgatatggcgctgaataccatgatccgccgtatggggtatggaggtagggctaccggccacggattccggcatacaatgagcacgattctgcatgaacagggttataacactgcatggattgagacacagcttgctcatgttgataaaaacagcattaggggcacgtataaccatgccctttatcttgatggtagaagagaaatgcttcagtggtacgcggattatatgaatgacttagaatccggaaatcagaaataa

SEQ ID NO: 277472 - DNA, 204 bp, Morganella morganii
atgacatacagattattgcgcttgcatgaagttctggataagacagggttcagcaggtcatggacatataaactaatcgcccagggggaatttccaaagccaattaaaacgggaagccgatcaattgcgtttattgaaaccgagatcaatgaatggattgagaagcgggtaaaccaatcccgcccatcaaatgaaaccgtttag

SEQ ID NO: 277473 - DNA, 318 bp, Morganella morganii
atgcaaacaactgatctgcacctggtgcaaattatcacggccaccggtcatgacccgtctgatattacagatgctgtctgggctgccggttaccggaaaacagactttaccactgagcaggttatcaaaatggcggttaatcagaccgccgataccgtgctgaacggcttccctgttgagacactacctaaaacgctggatgacctcagtcagtaccatctgaatggcattatctttgaagcaaaatgggaaggtacgcctgcagcagtggcaaatgcaatattgatgaacgggtataaagtgggagggcaatcatga

SEQ ID NO: 277474 - DNA, 777 bp, Morganella morganii
atgaatactaaaccaaaaattttagaagctctcgaagaaatcggtccctgtgatgtcaccacgctggccatgcacatggagcaaagcgaatcgtgcgttaacgcattgatggttaatcagttacgtaaggggatggtcaaattgactgatggggtataccacctgacacacaaatcagcaccagcgcaaactacacagaaaccgtccgccaaaccagctgtgtcacgcacgaaagtggaggttttacgcgaaatactgaaagacacaggaaaatgttttaccgccacagaactgtctgagcggtcaggtatgcccgtcaaaaatatcagcggactgcttgcaaatgatgtcagcaaaggtgtcattaatcaaaccaaaactgatggacgctccgtttatcagtgggccgcagctaaagaggataattctcccctttcagccactgcacctaatgtcgataattcccgacttttaaccgccgcagtatgccccggtaaaatgacagaaagccgcccttttattgctaccacagagccggaattaaatggtgagaaaaatcaccttttacacacgcccacagcctccgtttcaaacggaacactgagtgtgccaaacagcaaatgcctgtgtgatgagctggtgaaaattgacgacgagttaatcagcttaaacacacgggttaaggaattaacagaagccaggcaattaaaaagtgaaatgctggatctggtcacgaaactggaagcattaatcgggagggagcatgcaaacaactga

SEQ ID NO: 277475 - DNA, 252 bp, Morganella morganii
atgagccatcaggaagatgagtacgaagtcgatgcatatgacgacccgctgataaaggcgatccaccatgtggatgacggacgggattatgcacagcggattattcacgatatgcgtcagcggtattacatcagagcggggatatacctcccccgcccaccggctccgcaggtcgttgcgccgaagttaattccggtaaaaacaggtaaaaaaaggaagaagaaagtcaggaaggtaagccatgaatactaa

SEQ ID NO: 277476 - DNA, 222 bp, Morganella morganii
atgaaaatcgaatttatctcaaacagcaacatagccaaggtggttatccgttccttcatcaccgaacaccggaaactgaaccgcctggttgacgcagccctgctacgtaccccggttcagcaatcaactaccggcctgttgttccgcgtgacgactatctacggcaagcagaaccatgtccgccgggcacataagattatctgccgggaggtgtcacgatga

SEQ ID NO: 277477 - DNA, 609 bp, Morganella morganii
atgaaaaccaaattaccattcatagatgccggattgctgcgtgcagctcttaccctgattgccgcaaaagacgattcgcgaccggtaaccaaagccgttcacattaacggcgaatttatcgagtcaaccaacggacacgccctggttcgaatgaagcacaatgcgcatttttaccacgatatcgttgtgcaatttaaccatcctgtccctgatgaagctgagtttgcagaaatcaaagtgctcgatgatggcctttgcgttgctgtgtattaccgcgaggaaaaagaagcagaatttgtaccgttcggcacatctgcactgacccgcagatcagagacatatcctgattttgatatttttctgaagcgtgaatttgtaaaaaacgccctgccgccggttagtgccaaatacctggcattaccctacctcatgttcggtgccggtgttgtggatgcaacgtgcacagaagacagaaaagccgttctgttcaatatggggccgctgaccaatgaaatatacggcgacccgcagctcgttgctatggcagttatgccggagtatttcgatgcatgccgtgccgcccgtgaagaaggtagggaggacgaatga

SEQ ID NO: 277478 - DNA, 753 bp, Morganella morganii
atgaacaatttaatcaccattaataaaacccaaatgcccgttgttgaataccagggtcagcgtgtcgtgacgttctccatgattgatctggtacatgcacgaccagagggaactgctggacgtaattttcgagaaaacaagggctactttatcgaagggatagattacgtcgaattaggttccgacgctatacgccgagacctcccggaaggcacattttctaagtttgctccatctggaattgtgcttttcgaatccggctacttgatggttgtaaaatcactaactgaccctttagcctggcagatacagcgcgaactggttaatagttatttccgccagccacaaaccgctattagtgaattggaaatgatcgccagaattgccagcctcaacgctcagcagcagcgccagattaatcaggtgtccgaaaaggttgagcatgtccatgaagccgttgaacaaattaaacaaggcacaatacctgctggctggatcggctattcactggccagaacaaaatcaggtatgaccgtcgataaatgcaaaacactggtgaagcaattcaatatccgcaaggaccaaataaccatactcaccccagaaagggttccacgcccgatggcgatcatccctgaatctgagtttatggaagctttcaggttgatgatgagtgaggctgaattacgcggggcacgttggtatcacccgaaaatgggattgtttcaggctatcggctgggaggaaaaataa

SEQ ID NO: 277479 - DNA, 189 bp, Morganella morganii
atgaacctgtttaatgaactgatgatatccggcagcaacttagaaaagcgaaaattatatcgcagggcagcagagcaatacagaaaagcctattgtctgacatattccgagaatgaggaaaaagtaagcaaacaggctatggaacgctgtctggataaagcaaaaattaaaattccggagggttattaa

SEQ ID NO: 277480 - DNA, 348 bp, Morganella morganii
atggaaaataacaatattttatcaaacagaagaaagtcattcactgatgctttctttcatcatctgaaaaagaaaggtaaatcggcatcatttaaacgttctgtggatggtgtgcaatataggattgatttagatgctgaggtgctgactcaggctctgatatcgctctatgaaaataaggcatgtaaagacgcgggttataccgtgcagcagatacttgattcatatgccaattactacaaccaaaacggaaatatcacaccagatggtgaaatgttcatcagtttaattacagagttaattgctgaaaacatgcacagaaaggaatttaagaatgaacctgtttaa

SEQ ID NO: 277481 - DNA, 423 bp, Morganella morganii
atgactaataaatttgaagcaatcgaaaaagcatcaaaaggtgaaatcactatcgaaatgcgcccagtgtatgttgtatctggtgccaatcatgcttacctcagccagggcggcgcgctgaataagttggcctacattatcgctgaaaagcagttccgtgacgaaggtaagccaaccaatttcccggacgaagaaacagcgcttgaagacggcacaccggctcacaaaacaggagaaataacacctgaataccttgaacggaagaacgaagtgctgaacgaattaaaagaggcactgcgccgtgaaaatgaaattgtaaaattgaaagccgagtatcacagagcgaataaaaaattagtttctgcacaggaaaaggcgtctgtcgcaaaatggaaactacagtcagccgctaaaaataaatag

SEQ ID NO: 277482 - DNA, 501 bp, Morganella morganii
atgaatacaggcgaattacttaaaatcaaaaacatatctgaaatatccatagataagttaaaaagaatatcaattgaaagtgaagcctcgtcagattttttatttgaaggtataggagctatcggaacactaatgtttgaatcatcttgtaatgacggtgacgttttaaataaggatatcgtgggcaagcttggcctgcttattcaggaaacaatatctattgcactggcattagatgaaaacgcattccagtcatcacttgaatataaaaggcgaacagcccccctgcgcaatcaaaagccagatgaacatagaaatgaaattattggtgttattggcgatatcaacaacgctgaattatcactacagcaacttaaaaatgatttatacgaaaacgaaccagagaaagaaataatattcgcacagcttgatttagtggcatctaagttaagtggttcattagaccaactggaaaaaatgacaggaaacaatcatgactaa

SEQ ID NO: 277483 - DNA, 243 bp, Morganella morganii
atgtttgacatgcaaaaatataataaagtcaacaacaaaatcaataatattttagcagtagttggcacgcattattttcctaatagcactcaacgccacattgaagaaataaaacaactactactaaatatcaaatgcaatgttataaaaaaagaaactgatgttgaattattacaccactggatcgatggggtgttaaccattatcagtatcgagcagtttcagaataaggaagcatcatga

SEQ ID NO: 277484 - DNA, 342 bp, Morganella morganii
atgaataatacacaattaaaagaagctgctgataaccaattgatattcgccgtaaaaacactatccatgatagctaacggcgaaatccaattaataaactcaatcaagccaattgaaactgcaattaacaacatttcagatgcacgtagctttttaaaaaaaagcaattataaagcacatgaatataagataaagctcgaaagcattattatgaaaattgacgacctgacacgcgctgccattattcttgatgaagaaaatgatagtgaattacagcttgatttgttggataaaatacgtgacatcatcagtaaggaattgaagcccgctatattttcctga

SEQ ID NO: 277485 - DNA, 174 bp, Morganella morganii
atgtcacagaaagcaatttccgaccgtgcgcagctgatagatgtattaaccagagttaaggcatttacagtggcagcgcaatacctgacccgtaatagcgaagaattacggatatcccgtgatttactttgccaggcagaagctgagattgatgaggtgcttgaaaatgaataa

SEQ ID NO: 277486 - DNA, 198 bp, Morganella morganii
atggcgcatgaaattgatttagaaacagcagaaagaaaagcatcacaattaaataccctgctgtaccttctcagtgagtcgggatttgtcgccctcgacggccagcagttattagatttggtcgaattagccggatcactggctgacccggtcgcctgctggttaatcgaagaaaacgcacatagaaaggagtcgtga

SEQ ID NO: 277487 - DNA, 207 bp, Morganella morganii
atgccgactatacattgtatgtcaaatagcgatgtgtcagaagtggatatccgtacagcagttggtgcatccatgttcacttatatcttcgtaaaccgcgataactggaataagcgccgacatattgaatccaaaaacgatatcagcgcacaaagtatcgttggttctgactatatctttgcggctcgtttccgctgggcggtgtga

SEQ ID NO: 277488 - DNA, 471 bp, Morganella morganii
gtgaacaaattaaacaaccgcgatacagaaattttgcgcttaagcagacagacttcgacattgctgttctgtgtacttgagtcctcttccgaagaagatatccaatccttaattgaaatggctttggaaaaaaatgaggccattaaatttatattaaataaaaatagctctaaaccatgtccggaatgtaatgataacaaaagtgatattcagcctacagaaacaacatacggttgcttcccacagcgcttaaaacacgccatgaaagcggcaggattgacacagaaagaactggcagaacgcgctggggtatcgcaaagcgtgatcagtcggcttatcaccggtaaagataaaaccggaacccggtcaggcgtgttgtctcatgcgctgggggtaagttttggctggctgcattacggaaccggcgaaatgtaccctactaatttttccgccgataaccgtgaggtttaa

SEQ ID NO: 277489 - DNA, 669 bp, Morganella morganii
atgagcacttttggggagcgacttctacagagacgcacagaaatgaaaatgtcccaagacgacctggcgaaaaaaacaggagtctcacgggtaacaataagcaaaatagaattaggcgaatcgcaggatacccgttcagctaatctatttaaaatttcagaggcgcttggatgctcgcctgaatggcttcttaccggaaaaaatggagaaagcaaagataccgcgaaacttgacagtaatgtgtcagaccctaaaccttatcgcccgtctcctaaatacccagtattgagttgggtgcaagctggtgcatggaatgaggcctgtgaagcctacacactaaatgaaattgatgagtggtatgagtctgagattggtatccagggcgcggctttttggttaaaagtcgagggtgattcaatgacagcccccatcggaccaagtatacccgatgggtcacttgtactcgtagacaccgggcgtgaaccagtgaatggcagtctggttatagctaaattaacagactcaaacgaagccacctttaagaaattaatcattgatggtagcagtcattttttgaaaggattaaatccagcatggcctttgatggccgtcaatggcaactgtaaaatcattggtgttgttgtgcagatgatgatgcgttttgtgtaa

SEQ ID NO: 277490 - DNA, 222 bp, Morganella morganii
atgagcttatacgaaaccctgaagggtatttacaaaacgaacgccgcgatcgggatggcatatccactcaaaggtaaaccacgcagcagtcaaggtgtgggtaagtggaaatggcgtggtgtacctgaagatgtggcgattctgtgtcattacgatcctgaaattccctacacacacgagtcactgaaccatgcatccgaaccaaaacacactgatgcctga

SEQ ID NO: 277491 - DNA, 279 bp, Morganella morganii
atgcatccgaaccaaaacacactgatgcctgatagctattttcctgatgacggcaaatggattcaggaaatgctgttgcagttatcaccgggagccagaaacagggcgctggtggcttactcagcggtgtatcaggaacggtgggaagcagagcctattccgtacaggaaagacaacgcagcacgcagggaagcgaatacacggctcagggaatatgtcaggaagtttaacagagccatgcagggttacaccgcagacccacagaaagttgcgggataa

SEQ ID NO: 277492 - DNA, 1629 bp, Morganella morganii
atgttaactattacaccaaaatttgcacaggaacgggcgctgaccatgttgcggcagtcgtggaaacagcatgcctcgttcatgatttacgcgccgaccggtgccggtaaaacagggctggccgcatttatgacggatggctttatatcgcaggggaggcgggttctttttgtggcaccgttcacggttttgatttcccagactgcgcaacgctttattgaatacgggcttcctgaggatgagattgcctatatctggcgtgatcacccgaaccgtgatccggcaaagcttattcagattgcctcagccgatacgctgatccgccgtgacttccctgacaatattgatctgctgattatcgacgaggcacatctgcgccggaaaaagattctggagcagatcacccgcctgaccacggaaaccgggtgtaaggtggttggcctgtccggcacaccgttctccccgttcctcgggcattactacgaaaaactgataaagcccaccacgataaaagagcttatcgaacgcggtgatctgagtccttatgagttttacgccccgacaaagcccgatttgtcaggcgtgaaaagtacccgcagcgatgagtacggcagcgattacaaagaggacgaaatagccgcaatcatgtgtggtgccgatctggttggtgatctggtcagcaactggttaaaactgggtgagaatcagcccaccgtgtgcttctgcgtcaacgtcagccatgccaactttgtcacgatggaatttaacaaggcaggcattaatgctgaggttatgacggcaaacacaccacacgaagaccgtgatctgattattcaccggtttgaggcaggtgcgacaaaaataatggtgaacgtgggtgtgctggtcgccgggttcgacagtgatgtccgctgcataatctacgccagaccgacaaaatcggagatccgctggttacaggctatcggtcgtgctctgcgtccggccaaaggtaaagaccgtgcgattattctggatcactctggtacagttcaccgcctcgggtttccggaagacatcgagtatgacgatttgccgcgtaaaaatgacggtatgaaagaggccggatcttaccgtgagcaggagaaacgggagaagaagccgaaggaatgcacatcctgtcactacatgaagcctgccggtgtctacgtttgcccgaaatgcggatttaaaccgctggctggcgaaaatgtggaagtcgacacctcacgcagtattaaaaagatcggtaaaggtcagaagacctacacgatggcggataagcagagtttctattcccagctgctgtattaccggaatgcccgtgctgcacagggcaaggtgatgaatccgaaatgggtggataacacctaccgtgagaaattcggggtattcccgcgcggcatgcacaacacaccacaggagatcacaccggttgtcagtaacttcatacgtcacaaacagatccagtgggcgaaaatgtgccagaaacgggatgccgccgccaaagcagcagtacaggctggggcaaagcacacaccagaaagccgcactgacagcgtgcgccggttattggcggcgaaaccaactcagcaggggagtctgttatga

SEQ ID NO: 277493 - DNA, 990 bp, Morganella morganii
atgagaaccgcagatgccgcacgcgggcgctgggctgagatatttgaatactatggtctgccgccgatcaccggcgggaaacattacagtggtgagtgtccgctgtgtggtgaaaaaggcaaattccgcattgatgacaaagacggtaacgggacgtttatctgcaaatgcaccagcggcaacggatttaagctgctggaactcacgcagagtaaaagcttcccggtgctggcagatgagattgataagttcctggggaatgtccggcagcaggaatacagtcggccggtacgcagtgacattgccgctgaacgcgaacggttcataaaaccttattctgccatgtcatcactgaaagataccactgcggcacagtatctgcaggaacgtggcgtatttaccctgcctgctgactacagccggttctgtgctaaacaacccgttcccggatgtaagaagcacttccaggcgatatggtcactggccaccgatgcaaaagggcagccgtgctatatgcaccggattttcctggacggtgcacgcaaagcgagcgaggcagaagttaaccctgtaaaaaaaatggattcactacaggatgagaattacctgaagcacgccaaatcagtcgccgtccgtttgtttccggttgattcgacgctgggtattgccgaggggattgaaaccgcgttgtcctgtaaacaggtgtacggcatcaatacctgggcagcaatgaacgcaacatttatgaagaaatttattgctccgcgcggcgtaaagacactggttatttttgcggattatgacatcaggagtgccacagggcacgatgccgccttcagttgcgcccgcagtaatctgcactcaaacaatgatgtcgaaaaggtccgcgtcctgtggtgtgacagcggagactttaacgacctcatccgtgacggaagcgaagtccgtgaactgccattttaccgggaaaaacacagggagaccgcgtaa

SEQ ID NO: 277494 - DNA, 780 bp, Morganella morganii
atgaaactcgaaagcgcattaaaacaatttcatccgaagtcaccgacattcagtgacagttcaaactccacggtcccggacagactgaaaggcatggattcggcagcggcaatgggcatggcgtcacagcgggccgcgtttggtatgcatgcgtttttggcgaagaatgatgtcagcgcggaagataaatttaaaaccgttgaagcactgacgcagtatgctctgcgcacggtaccaaagctggtggccaaagcggccggcaatcgcgttgctcagtgtatgaagattctgtccgcaatggcatttgaggattacgcccgttcagcgggttcggtatgtcagtgtcaggactgcggcggaaaagggctgatttaccgccggaaagaggtggtgaagcatccgggtatcaccaatatggaaggtactgtgattgttgagccggtagtacgtactgagctcgttggcgaactgtgcgtgacctgcaatggtaaagggcagttaacccaccggtgccggtgtaagggacggggtaaggtatacgacgaagagcagagcgaattacagggcgcaccggtattcaaagactgcccgaaatgctcagggcgcgggtataagcgtgtgccgtcgtcagtggcttatcaggcgataaagcacttggtaccggatttaaacgagagaacatggcgcagaaactggaaaccgttttacgaaggtctgacagggaaatgtcatattgaggaaagtcaggcagaacagctatttggctgtataaccagataa

SEQ ID NO: 277495 - DNA, 1056 bp, Morganella morganii
atgaaaagcactgttaatttaaacagtattaatttggtcaatgacgactcactcagctatatcaaaaccctcccggacaattgcattgatttaatcgccacggacccgccgtattttcaggtaaaaacatttgcctgggataatcagtggccggatgtttctgcttacctgtcatggctggacgaaatgttggctgagttctggcgggtactgaaaccaaacggcagcttgtacctgttttgtggttcacgtctggcctcagatacagaaatgctgttacgggagaggttcagcgttctcagccatatcatatgggcgaagccttccggcccgtggcggcggcaaaacaaagaaagcctgcgttgttttttcccgtctactgagcggatcctgtttgcagagcattatcagggaccggtaaaaggaaaaggcagtgagtaccaccagcggcgggatgaactgaagaaaaatgtgtttaccccgctgattgagtatttccggcaggcgcgtgatgcattgggtatcacggcaaaagaaattgaccaggcaaccggcaaacagatgtcttcacactggttcgggtacagtcagtggcagttaccgaatgaagcggatttccggaaattacaggcactttttcagcggacagctgcagagtgtcagcgaaataacccgttataccgtgaacataatgatctggtcagtgaacaacacacactcaggcgtgaatatcacgaactggcagatcagtatctgttgttacgtcgttacttcacggtatccgttgatgtgccttataccgatgtgtggacattcccgccggttcagtattaccccggaaagcacccctgtgaaaaaccagccgcaatgatggagcacatcataaaagccagcagccgtgaaggtgacctggtagccgatttctttatgggatccggggcgacactgaaagccgcactgaagcacaatcgccgcattctgggtgtggagatggaggcggaacggtttgagcagactaaggcagaaataactcaactctccggaaattccggatag

SEQ ID NO: 277496 - DNA, 729 bp, Morganella morganii
atgaaaaaattaacagtatccataggcagtctgggtagcgcggctgccggtgattatgtgagctttaatatctggcagggcaaacgactactggtcagtgacaagattgcaggtaaacattccggtacattccatcgtgagtatgatgtggattatacccggggtgagccactgcgcatcgaaagcaacgcaccggctggctgttctgtcggggtgaatgtggctccatctgatgatgcggttgcctacatcaacacttccgctggaaaaatagtaattcataaacagaacggagatgtggcttgcgttatggggcccctggtcacagaaaataaaacaatagagcaacgcgttgccgatctggaaaaacagcttgctgatactattagcccatctgatgcggcaagtatcatggaaattgtttccgctgaaacagataggattatccgtgaaaaaaacatgataggtttcagtgcggatattgcctttatggcgaacgcaaagctaaactctgaatatgtatttatcgctgatcagatcacccccgatgatgacgatgtaaaagttaatgtcagaattacagggcggcaaactccagacctttcattgttctgggttcccgtattagttgataaggtggatggcgcctcgcttaaatattatgaagatcaaggggtcatcgctgcgaaaaagatgattattgatatttcaaaggcggcggccttgtga

SEQ ID NO: 277497 - DNA, 615 bp, Morganella morganii
atgaatagaaaaacgatgacaaaagtttcttttcaaattgggtcgaaagaaagccaaagtgacacactagaaacttttaaagataggttgaagttacttataggtgatagaagtatcagagcagcagctaaagaatggggattatctttttctacgttaaataactaccttacaaaaggtactgacccagcaatgagcactataaaatcaattgctattcaagaggatgtaagtcttgattggcttgttaatggtgttgacacaagaaaccagacactagagttagctgaccattatgacaaaaatgaactacttacagtatcaaatgcaatgtttggaatgatgtctgcgcaacagctcagccgactcattgcagccataactacaaagggagttgatggactattaaaatcaacagacagtaattctgaccacaatatggatcatttgttggatggcatgcccattcggcctacgttaaagcaagccattaagctagctatggctggcgatgaatcactagaccaagagattttgcgccgcattgaagagaagaaaaacatcgatgagactggtcatttaagccaggaagaagatcaccaaaaagtgggatga

SEQ ID NO: 277498 - DNA, 222 bp, Morganella morganii
atgaatgagtggtcacttttaattttcacttacatgatgaatgcggcggcggggctgtgcgttatgagcggggtgtttgccgtgcatctcagccgctgcctcccggcggacagtttcaaacgctttatgatgctgacgatttttattatctgcaccattgcgggggctggctcggtcgcatcaattacccacctcggcgtgccgcttaatgtggggaggtga

SEQ ID NO: 277499 - DNA, 591 bp, Morganella morganii
atgaataagtatcatgtatcaaacagtgaagggaaatttgctgccggttcaggtgatgatgttttggaaaacaagcttcagttgtctgaaaccaatgatattaatgatgccgaattagtactgctggaaaagctttataagattgttttcagtactgcatttcctgccggaaaaattaccgtaccactaataaaacaatggcaccgtcagtggctggggaatatctatgactgggccgggcaaatccggactgttaatatcagcaaagataacttcatcttcgcgcctgcaggcagaattgcggggttgctttcacaattcgaaaaagaatttctgagcaggtacacgccctgtacaggaatgaccagagaacaactaactgaagccatcgcagtcgtacacactgagtttattctgattcatccgtttcgtgaaggaaatggccgtttgtcccgccttatcgctgatgttatggcagttcagagtgggttaccgcctctggattacagctgctggaaacaacatccggcacattatattgctgctatccacgcagcattaaatctgaattatgaaccaatgaaatattag

SEQ ID NO: 277500 - DNA, 171 bp, Morganella morganii
atgaaaaacagtaagaaaacgccacagacgctgataatgcctgatagtgaacagttaatccgggctgttgtaacatctacagcggttgaaaccggacaggagcctcagaaactggctgaggctctgaaagaaaaacgtgaaaagtatgcccacctcagactggctgtttag

SEQ ID NO: 277501 - DNA, 1605 bp, Morganella morganii
atgcaacgacgcgattttttgaaatatagcgcattcttaggtgctgccacgatgctgccggcatggagccggtttgcttttgcggcacaggaacgcccggctctcggtattccgcccctgttaacagcggataatgcccaaaaaatcaccctgaatattcagcaggggaaaatggcgtttattcccggcaaaaccacccaaacctggggatataacggtgatttactgggcccggcactgaaactgcggcgcggtaaaccggtgacggtggatatcgtcaataaactgccggaagcgaccacggttcactggcacggtctggagatcagcggagagcaggatggcgggccgcaggccattatcgccccgggcggcacccgcacggtcagtttcacgccggatcagccggaagccacctgctggttccacccgcacacccatggcaaaaccggtcatcaggtcgcgatgggactggctgggctggtgctgattgaggatgacaataccgcctcaaccggtctgccgggggagtggggcattgatgatatcccggtggtactgcaggataagcgtctgactgcagacggcgaaattgattatcagctggatgtgatgtcagcggcggtcggctggtttggtgacaccatgctcaccaacggcgcggtttacccgcagcatatggctccgcgcggctggttgcgtctgcggctgctcaacggctgtaacgcccgcagcctgcggatggcagccggtgacggacgcccgctgtatgtggtcggcagtgacggcggcctgctgaccgaaccggtaaaagtgcaggagctgccgatgctgccgggggaacggtttgaagtgctggtggatacatcagacggaaaagtctttgatattgtcaccttgccggttcgtcagatggggatgaccctggcaccgtttgacggcccgctgccggtgctgtccatccgcccgactctcgatgccgcgcgtggtaagctgccggatgtgctggccgccatgcctgccctgatcgacacctcccgtctgccggtgcgtgagttccgtctgatgatggatatgcgcctcgacatgcagggcatgatgatgctgaccgacaaatacggcccgcaggcgatggccgggatgggcatgcacggcggcatgggcggccatatgagcggcggacacatgggcggaatgaataataatggtatggggcgcggtatgcgcggcggccactgtggctccggtgaggttgatctgatgaatgccaacagtatcaacggcatcccgttctccatgaccgaaagtgcctttgatgtgaaacaggggcaggcggagcgctggattatctccggtgtcggcgacatgatgctgcacccgttccatattcacggtacccgtttccgtattctcagcgagggcggacgcacacctgcggcccaccggcagggctggaaagatatggtgcggatcgaaggcaatgtcagcgaagtgctggtgaaattcgaccatccggccaccaatgcgcatccgtttatggcgcactgtcacctgctggaacatgaagataccggtatgatgaccggctttactgtcacggcctga

SEQ ID NO: 277502 - DNA, 1548 bp, Morganella morganii
atgaggcgcggcgctcgtctgctgttacagtcggtatttctgctgtttacctattccctgacctggattggtctgtggatcatcggtttttacctcagtcagaacagtgtgctgtcagcgttttttctgccggaaggattgcggctggcgctgatgatcctgctgtggcggcgcttctggccgaccctgctgctggcggagctgctgctgaatatctggctggcacaggaacaattgctgtcacagccggtgatcctgctgtcgccgctgctgagtcttatcaccgcctttattatccagaccacctggtggcgctacaccctttactggcagcgcctgttactgctgatcgccggtgtcggtatcaacagcctgctgcataccctggtgttcagcctgctgacgccgctgagtgtgacccagattttcctcaccacgctgaccggcggtattctgctgacaccgtttgtctatctgatctatgaatatctccatgaacagcatttccgcctgatcctggattatggcacgccggatccgcagctgcgcacttcgctgctgatgtggtgttttctgttctgtctggccgggctcagcgcccagctcttttttaccccggaaattgagcgcctgctggtgctgctggtgtttatccccaatgtctttatggcctaccgctacggctggcagggcggcgtgctctctgccctgctcggcagtctgatcatcacctttgcccgccagtttaacggcgcatttgccgatttacaggaattgcagatgtttatgagcacccaggcgttgattggtatcggcctcgggattgccatcagccgtcagcagcagctgtcgcgtaatctgcagcgctaccgcgaacggctggagcaggaattacaggcgcggcgtgacctgatgcagcaactggtgcatacggaagaggatgtcaaaaaagcgattgcccgcgaactgcatgatgaaatcggccagaacatcacggcgattcagatccagtcgatgctggtcagaaaaaccgcgccggatccgcaaagcagccgtgcggcagcacaaatcaatgaactggcacagaaaattcatcagtccacccgccagcttttacgggaactgcgtccgccggtgctgagtgaaatgtctcttgaaaatgcactgcgccatctgattacggaatttgcgttcggggaaaacggcattcagtgcgagtttcattatgaactgaaacagccgccggaaaatgaaactgtgctgttcacgctttaccggcttgtacaggaattgttaaataatatcagtaagcatgccggagccacccacatcctcatcatactgagacagcaacgtgacacgatacagctccatgtctctgataacggtatcggtatcccggagagcaaacgccgcggcggctttggtctgcgcggtattgaggaacgggtcagggcactcggcggcgactggacactgaccaccaccggcgggacccggattattgttaacctgcccacattttctgatgaaaatcacgaaaactaa

SEQ ID NO: 277503 - DNA, 1617 bp, Morganella morganii
atgaaaatttttaccgaagcagcgaagttggttgagaaaaattgcccgtttgccatggcggaaattattgaatgttcaggcagcactccccgtcacagcgcacaaatgctggtgctgggggacggaaaaactatcggtaccatcggcggtggtatggtggagcgcaaagtgattgaagaggcggtggaagcgctgcacgaagggcgttcccgcatgttccacggccggatggcccgcaacgggcagcatgctgtcggctctgactgcggcggtgcgatgtcggtgtatatcgcggtacacggtgtgcgcccgcgtctgatcctgctcggcggtggtcacgtcaaccgtgctattgcacagctggcggctttcctgaatatcgatattcatgtggcggatgtgtatgccggcagccttgagccggatctgttcccgccgtcaacccgcctgtggcacgcgccttcatttaccgatgcggtgaaccagctggatccgcagccggaagattatgtgattatcgccaccaacagccaggatctggaatctctcaactgccttatcgacaagccgttaaaatacctcgggttactcggcagccgccgcaaagtacagacattcactaaacaattaagcgaatccggggtatctgatgcacagctctcccggcttcatgcgccggttggctatgatatcggcgcggaaacgccgcatgaaatcgcggtcagtattctggccgagctgttacaggttatgaatgatgccccgggcggggcaatgaaacagagcccggcagaagcccgcagagcaaaacgggtagtgatccgcggcgcgggtgacctggcaaccggcgtggcattacgtctgtatcacagcggttttgaagtggtgatgctggatgtctgcaaaccgaccgtgatccgctgtacggtctctttcgcccaggcgctctatgacggcgaaagctgcgtggaaggcgtctgtgcccgctatgctcatgatattgatgaagtaaaccgctacctgaaagaaggtgctatcccggtgctggcggacgaacacggcgaactgttaccggcgctgcacccggatgtggtggtggatgccattatcgccaaacgtaatgttgccggtacccaccgcaagatggcgccctgcacgattgccctcggaccgggctttgaagccggtgtggactgtgatgcggtgattgaaactcagcgcggtcatcacctcggacgggtgatcacccaaggcagcgcggcaccgaataccggcattccgggcaatatcaacggcaaaaccaccgaacgcgtgttacgcgcaccgcacagcggcatgatgacgcgccatgtgaatatcggcgacctggtacacgagggggatgtgattgcccgtattggtgacacagaaattctctcgccgatggacggcatggtacgcggcctgctcaatgaagggctgtgtgtgccggaagggtttaaaatcgctgacgttgacccgcgcggtgcactggcggacttccgttcggtttctgacaaagcccgcgcgatcggcggcggcgtgctggaggccatcatgacacggctgaataaaatggacagcgccccgaagtgctga

SEQ ID NO: 277504 - DNA, 975 bp, Morganella morganii
atgaatactgatgatgcccgccggattattgaacgtgcagataaattaccgttatatctgcatgcctacgcctatcatctgaatatgcgttttgaaaaaatattgccgggtgacttactggatatcgcaaacgaacatcatttgccgggcgtcaaaatacatgtgctggatggtgaaacacaatctctttcaaccatgacagacgaacagcttgaggcttttgcagagaaggcaaaacgctatcatctggatattaatattgaaaccagcgcctccgataataaaaccctggatgatgcggtcagaatcgcactgaaaaccggggcaagctctgtccgtttttatccgcgctatgaaggtgcgctgtctgacgtgctccgccgtatttccgcagatatcggttatttaaaaacacactatcagcactccggtctgacatttgttctggaacagcatgaagatttaaaaagccacgagctggttaagctgataaaagaagctgatttcccggaactgacgctgttatttgacttcggcaatatgatcaatgcctgtgaattaccaatggaagccctggcagtcatgcaggatcatattactcaggtgcatatcaaggatgcggtgattctggaagaaggtgatggtttcggccataccgcctgccgttccggggaaggtaatctgccgtttaaagagatgctgcgggcattaatatgtctgggtgaagagaaaccacaggttatttcctacgggctggaagaagaagtggattattacgcaccggccttccgttttaaaaatgaagggaatgatccgtggatcccgtggcgtcagctgagtgaaacaccgttacctgaaaatgaaattgaagaacgtctcgcccgtgaaaaagaagatgccgtcaatcagctgatttatgtccgtaacgtcattgatgaaataaagacagaggcactcgccgttattcataaataa

SEQ ID NO: 277505 - DNA, 753 bp, Morganella morganii
atgcttgataaaaaaagatgggctatattcagcctgttagttctgtgtggcggtactatctataaattaccgtcactgaaagacgccttttatgttccgatgcaggaatatttccatctgacaaatggtcagattggtaatgccatgtcagtaaactcaattgtgacgaccattggtttctttttatctatttatttttctgacaaattaccgcgccgtctgacaatttcattctcattaattgcaaccggcctgctgggtgtgtatttatccacaatgccgggctactggggcattttatttgtctgggcattatttggtgtcacctgcgatatgcttaactggccggtattattaaaatctgtcagcctgctgggcaacagctcacagcatggccggatattcggcttctttgaaaccggccgcggtgtggtcgataccgtggtggccttctccgctcttgcggtctttgcctggttcggcagtggttatctcggttttaaaatggggatcttattttattccggcgtggctattctggtcggtggtattatcttcctgttcctgaaagatgataaacacgccgtcaccgaaccggtgaatgaatccggtgaaaataaagagaaaaaacccggcgtcagcgcggtattaaaagacggcactgcctgtcgcactggccggtatttacggtattctgaatcagtattgcctgaaaatggtcggcggccctatcggcggattaatcgcggataa

SEQ ID NO: 277506 - DNA, 468 bp, Morganella morganii
atggtcggcggccctatcggcggattaatcgcggataagattttaaaatcaccgaccaaatacctgttttatacctttattatcagtgtgattgtcctggtcacctttattttcctgccgcacgaaagtatgccggtgtatttgggtatggtctgcacactgggcttcggtactattgttttcactcagcgcgcgattttctttgcgccgattggtgaagccaatatcaaagagtccagtaccggggctgcaatggcactgggcagctttatcggttatgccccggccatgttctgcttcagcctctacggccatattctcgacagctatccgggcatgaccggttacaaaatcgtgttcggcctgatggcattgtttgcctgctgcggcgctttcgcttccggtattctgattatcagtattaaaaaccgcaaagctcgcgctgatatgatggcatcttcccgctaa

SEQ ID NO: 277507 - DNA, 2541 bp, Morganella morganii
atgagcaacgtcaagttagcaatcatcggtaacggtatggtcggccaccgctttgccgaagagcttaccgataaagcggacgccggacagttcgatatcaccgtattctgcgaagagccgcgtgtcgcttatgaccgcgtgcatctctcctcctatttttctcatcatacggcggaagaattatccctggttaaacccggtttctatgaaaaacacaatatttcggtattaatcaatgagcgggtgattaccgttaaccgtcaggaaaaggtgctgcataccaataccggccgcactgtgcattatgacaaactggtgattgcgaccggctcttatccgtggatcccgccgatcaaaggcagtgatacccgcgactgttttgtttaccggacgattgaagatctcaatgccattgaagcctgcgcccgccgcagccgcaaaggtgtggtgatcggcggtggtctgctggggctggaagccgccggggccctgaaaaacctgggtattgaaacccatgttattgaattttcgccagtcctgatggcggaacagctcgatgcgctcggcggtgaacagctgaagcagaaaattgaacggatgggtgtaacggtacataccggcaaaaacaccacggaaattaccgcatccggcagcggagagagccgcaaagtgctgcattttgccgatggttcatcgctggagaccgattttgtcgtcttttccaccgggatccgcccgcgtgaccggcttgcccgtcagtgcggactggccgtggcggagcgcggcggtctggtgattaatgaccagtgtcagacatctgacccggatgtgtatgctatcggggaatgcgcgtcatggcacggcagaacttacggactggtggcaccgggctacaaaatggcacaggtggcggctgatcatctgctggggaaggagaatcagtttaccggtgcggatatgagcgcaaaactgaaactgctgggtgtggatgtcggtggtatcggcaatacacatgcgacagacgacggctgccacagttatatttatctcgatgaagccaatgaggtttataagcggctgattgtcagcgacgataataaatatctgctgggtgcggtgctggtcggggataccgaagattacggtaatctgctgcaactggcactgaaccgtatcgaactgccggaaaatccggatgttctgatcctcccggcacacgccggcagcaaaccggcgatcggcgtggaatccctgccggacagtgcacaaatctgttcctgttttgatgtcaccaaaggagacattattcaggccattcataacggttgccagacggttgcggatatcaaagcggaaaccaaagccggtaccggctgcggcgggtgtgttccgctgatcactcaggtgctgaatgcagaactgactaatctgggtattgaggtgaatcatcacctctgcgagcattttgcctactcccgccaggagctgtatcacctgatccgcgtggaaaaaatcactacctttgatgagctgctgggccgctacggcgaaggttacggctgtgaagtatgtaaaccgaccatcggctccctgctcgcgtcctgccggaatgactatattctgcgcgacgacctggtaccgttacaggataccaacgataatttcctcgctaatatgcagaaggacggcacctactcggtgatcccgcgttcaccgggcggcgaaattaccccggaaggtctgctggctatcggtacagttgcacaggaatacaatctgtataccaaaattaccggctcacagcgcattgccatgttcggggcgcaaaagcaggatttaccggctatctgggaaaaactgatcgccgccggatttgaaaccgggcacgcctatgccaaagcactgcggatggcgaaaacctgtgtcggcacggcatggtgccggttcggggtcggtgacagcaccgcgctgggcgttgagctggaacaccgttataaaggtatccgcaccccgcataaaatgaaattcggcatctcgggctgcacccgcgagtgctcggaggcgcaggggaaagatatcgggattatcgccaccgacaagggctggaacctgtatgtctgcggaaacggcggcatgaaaccgcgccacggcgatctgctgatggctgaccttgataaagagaccctgatacgctacatcgaccgctttatgatgttttacatccgcaccgccgacaaactcagccggacatccacctggctggaaagcctggagggcgggattgattacctgcgggatgtgattgtcagcgataaactggggctcaatgcacagctggagcaggaactggcgcagctgcgcgaaaaagtgacctgcgagtggcaggaaacggtgaacaacccgcatgcccgcaaacgcttcagtcactttgttaacagcccgctgccggatccgaatgtgcaaatggtaagtgagcgctcacaacatcgtccggcccgcccggaagagcggattgctgtcactctgatcggggaggaataa

SEQ ID NO: 277508 - DNA, 546 bp, Morganella morganii
atgattttaattaccggcggcgcccgcagcggtaaaagcagttttgctgaagaactggtggataaccgctgtcacagtgcgctctatatcgccacctcagtggtgacggatgatgaaatggccgcccgcgtggcacgccataaggccgatcgcccgcagcactggcgtacgtgggaaggttttaaaaacattgcccatgctatccgttatgaacgcaaaccgggcgaaggggtgatgctggaatgcatcaccacgctgattgccaatctgctctatgacgcctcgggcggcgcggacccggacacgctcgattacgcacaactggagatcggcatcaacagcgaaatcgaccatattattgatgcctgcaaagagagcgagtgcccggtgtatatcgtcaccaacgaactggggatgagcatcacaccggaaaaccggctggcacgccattttgtcgatatcgccggacgtattaatcagaaactcgcccgtcaggccgaacaggtctggctggtggtctccgggatcggagttcagatcaaatga

SEQ ID NO: 277509 - DNA, 1815 bp, Morganella morganii
atgtctatttatgataatgcactatcaaaaatatatagtgaaaaggaagattttataattattggactaaccggaagaactggttcagggtgctcaactgtagcaagtattcttgcatcaaaaaaagatgatataaagcatgacttgttcatcggagataacccatcaaataatgaagacaggaaagaaagaatacttacaaagtatttcaataaaacatgggaaagttttatacgaattcaaggcagctcaatcatcacattacatctatctaatgattatacaaccgaaagaaacaaatttaaagaattcatattatctacattattcaataaaaaagatattgattcattggacgataatgaaaatacatacctagaacatatagtaaaaaaattctcaggaatattaaatgaaataaaaagagaacactccgacagtaaaatatcatttgaaaaaacaaaggagttctataacgaaatcttaattaaaaaaaacaatgaggtaaaagaagtatttagagaaaaaatacattatgttaaaatatatcaagcattaagtaataattatagagtaagcggtaaattctttagtagtgaatatgatgaaaattgtttccatggtttttttatagctgagaaagttcatgatgttatccgagaaattaaagaaaaaataaaaaataaaaaaggaaataagaatctattcatagttattgatgcaataagaaatccttttgaagcaacttatttccacgatcgatattcgtcattctatcttatggctgtttcatcagaagatgatgaacgaaaatcaaggctaagaaaattaggctttgatgataatgatataaatgaagttgataaaaaagaatatgcacgcttgtctttagatgaaaaagaagcctatatttttcaaaatatccaagcttgcctggaaatatcagatatatacataaagaatgaaaatgaagatgatattactagtagatataaaaaattatcaaagcaaataataaaattcacatctttaatgaaaagaccaggaataataacaccaagtaatatagaacgctgtatgcaagttgcatatactgcaaaattaaattctggttgcatatctaggcaagttggtgctgcagtagcatcaccaacctactcgataaaatcaataggttggaatgatgtccccaaaggacaaattccatgtctattacgagataggtttgaccttatcaatggtaaagataacaaagcatattctaattttgaaaaaaacaatgagaaatttataaatacaataaaaaaacataatcataattttataaaaatgaaagaatccggactaaacataccatactgttttaaaagcgagtataacaacgcaattgataatgattataaaaataactttattaatgaaaactcaataactgatgaaaacattaaagaagtaattttcaaatttaaatcaaactcaaatcaagtattcacaagatctttacatgctgaagaaaatgcattcctacaaatttctaaagatggtggagttggaattcataatggaatattattcacaacagcaagcccctgtgaactttgttcaaaaaaagcatatcaattaggtattaagaaaatttactatatagatccatatccaggaattgcaataagtaacatattaaaatctggggaaaacagacctatattgaatttatttcacggggcaataggtagagcattccataatttttatacaccaagaatggcatataaagatgaaatcactgctagatcaaaagactccaatgaataa

SEQ ID NO: 277510 - DNA, 327 bp, Morganella morganii
atgcaaaaggagatagtgcagccggtatctgcggacaccggcgcgattgagcagtccgcggataatccgtcgccctgtgcgccgctgaccccgtcggcggaaacccgctatctgaaagcgatggagcagactgaccgttatcactgccgctataatccgtcctatgctctgctggataacgcagagcccgcgccggtcattcccgcagcgctgttccgcagcgggtgtccggccacgcactcattctgtcagatgcgtctgcaatggctggcggccacctgcgccattgattccgctgcagaacatgccctcagcgactcacattag

SEQ ID NO: 277511 - DNA, 1029 bp, Morganella morganii
atgttacgcccgatacttcatactctgattattaccggctcactgagcctgagcgctttttcttatgctgacggcccgactctgtcgttaagtgtcagccagtccggcggctctgcacaaaatgacgatggctctcctgatgccacccgtccttctgaatccaaatcccgtattctgcctatctggggcgatgaagcccgcgcccgtggttatgatcttcccgagccgtttggtgtcggttataactatatgaatctgcggcaggatattgttgtggataaaatcggttttattatgccgacaaaaattgtcgtcggtgaaggcctttttaaagcatcggttgaaggtattaacattgatgccggtcatacccgtgaaaaaacagaaacccatatgctgaagttagactcatgggtatttccgtttatgaatgtgtatggtttatacggaaaaacaaagggtaaatctgacacaacactggccggtggttcggtggatgttaagatgtttggaaaaatacataatattaatcttgactcaaagattgaaggtcagccctttaaactggatttcgaagggaaaacttatggtgcgggtgtgacttttgccggtgcctatgagcaattcttcggtacagtcgatgttaactataccaaaaccaatcttgatatccttgacggtgatattaaagcattggttgtttcaccccgcgtcggttatgaatttgttttttcaccgttaattgccggtcagggaaataccaaattacaggtctggaccggtgctatgtatcaggatattacccagcgtttcaaaggggatatcagcggattaaacttatcgttaccgggaggcatggaaaatatgatccccggcgatatgaaattcgatgttgaacagcatcttgctcataaatggagcaacctggtcggcgcccggttagaagtgacccgcaattttaatataatctcagaagtgggttttaataaccgtaacagtttctttatttccggagaattccgtttttaa

SEQ ID NO: 277512 - DNA, 453 bp, Morganella morganii
atgcctattgcagagccacgcagagatgacgtcatgactgactacggtacacttaatcgtctttatccacagactgttacatataaagttgataataaaaattatattcttatggaagatgaaaatggtgaattcctcatcaaagaaatcagccagaaagggaaactggataaagatatttcaagtggtcaattctcaagatatttcgacatcattcaggtagcctatgatgataaaaataaaaatacatatatttgcgctatcagtttaggaggaaagaaaatgaaattattccaggcaaataacctggggatagataaaaagtattccaaagattatgtcatcaacggccggaaatcatttaacttctttttcattgacgggttactccatctttttgaatgcgatgaagacaacaaaggccgctatagtatttattcaatttctttttaa

SEQ ID NO: 277513 - DNA, 576 bp, Morganella morganii
atgatgaaaaaaactgtattcgcttttacgctttcctgtttactggcctcaccagcgttctctcacggctatatcactgagccggcttcacgggcagcaaactgcaaaacaggtaaaaatccggcccacatgtgtggtgccgtccaatgggaaccacaaagtattgaagcattatccggatatcctgaaggatattatccgccggacggccaacttgccagtggtggtattgagcgctttctgccgctcgatgttccccgtgataactggcatcagatgacggtaaaaccgggaacaactatgttcacctggaaaattacagcggcccacaaaacccgtaactggcgttactacatcaccagaccggactggcaccccggcgaatcactgacacgggcttcatttgaaaccaaaccattctgtttttatgacggaaaaaatcagataccaccgcagtcagtgacgcatcagtgcaacatccctgaacgtaaaggtgcgcagatcatttacggtgtatgggaaatcgcggataccgccaacagtttctatcaggtgattgatgtccggtttgattga

SEQ ID NO: 277514 - DNA, 822 bp, Morganella morganii; identical to SEQ ID NO: 16544

SEQ ID NO: 277515 - DNA, 1482 bp, Morganella morganii
atgtggcaaattaatgaggttgtgctatttgataatgatccgtatcgcattttggctatagaggatggccaagttgtctggatgcaaataagcgctgataaaggagttccacaagctagggctgagttgttgctaatgcagtatttagatgaaggccgcttagttagaactgatgacccttatgtacatcttgatttagaagagccgtctgtagattctgtcagcttccagaagcgcgaggaggattatcgaaaaattcttcctattattaatagtaaggatcgtttcgaccctaaagtcagaagcgaactcgttgagcatgtggtccaagaacataaggttactaaggctacagtttataagttgttacgccgttactggcagcgtggtcaaacgcctaatgcattaattcctgactacaaaaacagcggtgcaccaggggaaagacgttcagcgacaggaacagcaaagattggccgagccagagaatatggtaagggtgaaggaaccaaggtaacgcccgagattgaacgcctttttaggttgaccatagaaaagcacctgttaaatcaaaaaggtacaaagaccaccgttgcctatagacgatttgtggacttgtttgctcagtattttcctcgcattccccaagaggattacccaacactacgtcagtttcgttatttttatgatcgagaataccctaaagctcagcgcttaaagtctagagttaaagcaggggtatataaaaaagacgtacgacccttaagtagtacagccacttctcaggcgttaggccctgggagtcgttatgagattgatgccacgattgctgatatttatttagtggatcatcatgatcgccaaaaaatcataggaagaccaacgctttacattgtgattgatgtgtttagtcggatgatcacgggcttttatatcggctttgaaaatccgtcttatgtggtggcgatgcaggcttttgtaaatgcttgctctgacaaaacggccatttgtgcccagcatgatattgagattagtagctcagactggccgtgtgtaggtttgccagatgtgttgctagcggaccgtggcgaattaatgagtcatcaggtcgaagccttagtttctagttttaatgtgcgagtggaaagtgctccacctagacgtggcgatgctaaaggcatagtggaaagcacttttagaacactacaagccgagtttaagtcctttgcacctggcattgtagagggcagtcggatcaaaagccatggtgaaacagactataggttagatgcatctctgtcggtatttgagttcacacaaattattttgcgtacgatcttattcagaaataaccatctggtgatggataaatacgatcgagatgctgattttcctacagatttaccgtctattcctgtccagctatggcaatggggtatgcagcatcgtacaggtagtttaagggctgtggagcaagagtag

SEQ ID NO: 277516 - DNA, 627 bp, Morganella morganii
ttgcgagtagcgttactgcctcgccgaaaggtctctatttcttcatttggcgttaatttgtggggtttgtattactcggggtcagagattctgcgtgagggttggttgcagcggagcactgatatagctagacctcaacatttagaagcggcttatgacccagtgctggttgatacgatttatttgtttccgcaagttggcagccgtgtattttggcgctgtaatctgacggaacgtagtcggcagtttaaaggtctctcattttgggaggtttgggatatacaagcacaagaaaaacacaataaagccaatgcgaagcaggatgagttaactaaacgcagggagcttgaggcgtttattcagcaaaccattcagaaagcgaataagttaacgcccagtactactgagcccaaatcaacacgcattaagcagattaaaactaataaaaaagaagccgtgacctcggagcgtaaaaaacgtgcggagcatttgaagccaagctcttcaggtgatgaggctaaagttattcctttcaacgcagtggaagcggatgatcaagaagattacagcctacccacatacgtgcctgaattatttcaggatccaccagaaaaggatgagtcatga

SEQ ID NO: 277517 - DNA, 1668 bp, Morganella morganii; identical to SEQ ID NO: 16546

SEQ ID NO: 277518 - DNA, 1527 bp, Morganella morganii; identical to SEQ ID NO: 16547

SEQ ID NO: 277519 - DNA, 1617 bp, Morganella morganii; identical to SEQ ID NO: 16548

SEQ ID NO: 277520 - DNA, 126 bp, Morganella morganii; identical to SEQ ID NO: 16549

SEQ ID NO: 277521 - DNA, 378 bp, Morganella morganii; identical to SEQ ID NO: 16550

SEQ ID NO: 277522 - DNA, 372 bp, Morganella morganii; identical to SEQ ID NO: 16551

SEQ ID NO: 277523 - DNA, 498 bp, Morganella morganii; identical to SEQ ID NO: 16552

SEQ ID NO: 277524 - DNA, 789 bp, Morganella morganii; identical to SEQ ID NO: 235392

SEQ ID NO: 277525 - DNA, 525 bp, Morganella morganii; identical to SEQ ID NO: 16553

SEQ ID NO: 277526 - DNA, 474 bp, Morganella morganii; identical to SEQ ID NO: 52832

SEQ ID NO: 277527 - DNA, 537 bp, Morganella morganii; identical to SEQ ID NO: 16554

SEQ ID NO: 277528 - DNA, 1161 bp, Morganella morganii
atgcttaaacatatcagtataagaaccgtcattgtcgtctttctcatctgtaatttcactacaattaatattatctttctcttgcccctgtccgcactaattaaattagtaatgcttaatattgttagtgtttttacgttcgcctgctcatggttttacattacgaagtatctggttatgccgatcaatgccgtgaaaaacagtattgatgaggttaacgccggtaacttgtcggtgcggatcccggtatttggtaataactgtgccggacgcctgatccccggggtgaatcagctggcggaaagcctttctctgctggtcagtgaaattcgcagctcatcagattccgcatctgtgttgtctgagcaactggcaatgcgcagttttgagctgtctgccaagacggagcagcaatcagccatgctggtggaaacagcggccaatatggaggagattgccgccgggactaaaaataatgcggagaatacggtgctggtcagtgagcatgcacaggaagcaacggtgtttgccggacatggcggtaagctgatggaggaagtggccaccaatatgcattctattaatgaatgcaccaataagatgactgaaattatcaccctgattgattccattgccttccagaccaacattctggcgctgaatgccgctgtagaggccgcccgtgccggtgagcacggcagagggtttactgttgtggccggtgaggtcagaaatctggctcaccgcagttcagaatcagcgaaaaatattaaatccctgattgcggtgacaaccgataatgttaagcagggagaggatattgttcaccgcgccgaagtgaatatgaataagattgttgagggtgcggagcgggtaaacggcctgatggcgcagatctctgtttccacacaacagcagcagcaggggattgagcagatagcaacggccctttccgagctggaacaggcaactcagggcagtgtgatgatcgccgatgagcttgccggttcttctgatgcgcttaaggctcaggttgcggatttacagtcacggacacgggatttccgcctgacgaatcacaccgctgctcagccacacagcaaaccggcattaaacaccggtaaacgggttgcgcggtttgccgcatcagctcaggcatga

SEQ ID NO: 277529 - DNA, 162 bp, Morganella morganii
atgaagatcgatttggaaaattttgtcagtgaattcaataaagagaaattcccgggctattacgtcagaaatgcaaaaatgtatggctggtattcagggattatgaatctccggatctttttcagaagagccttaaacgtgattttgattttaaaacactga

SEQ ID NO: 277530 - DNA, 234 bp, Morganella morganii
atgcccggatggatatctgggcgggtaaaagacaccgatgcttataacgatattgatcagctgaccgaacagtgtctgatgaaaaaagagattgatctctttctgattgcggcaggcccggcaggtacggtgctatctgcaaggctggcagacaacggtaaaacagcgctggatatcggtaatctggtcagcagttataatacggttttccctgaacagcttcaggcggagtaa

SEQ ID NO: 277531 - DNA, 933 bp, Morganella morganii
atgagtaacccggttatttcggtcatgattgcagtacataatgcggagtcatcaatcttggccgcgttggagagtctggataatgccctgaatgagaatggttctccggagcatgttgaagcgatcattattaatgatggctccaccgataaatcgctggatcttatcaaccattatcagccacgaaactttattaaagtcgttgaaacagttaacttttctaatgtcgggaaagtccgccattatgcatattcattatcccgcggcgaatatatcacagcgttagacagtgatgatatgctgaaaaatggtgcactgagccgggttatggacattatgcgggagcatccgtttgatctgctgataacccgtctggatgaacatcatgatcgtaatccggtattagaaattgaggataaacctgtagtatcaatcactcaggacaggttaaaagaactctatctggaacataagacggtaaaaggtcatttactcggccggtttatccgcagggatatcctgacagatgatatgttccctgaaatttattgctatgaagatgtggttattacagcaaatgttatttgcgctgctcagaatattctgatcacagatactcagatttattgctactataaacatcgcggcagcttatccacagagaaaagtatgaataaaaccgttcttttcctgcaaattgttttatcaatggaaagcttctttgtaaaaaataaaaatgaaaaagtgatgtttgaagggttgttcgttaaagtatgttctgattatttatcaagaaataataaacgtaagcttccccattttgttatggatcggtttaataatattaaaatattccgctttctgttcagctctaaagtaagattaagcaggaaaattatgtttttaaaaataaaatcagcaggagttttttaa

SEQ ID NO: 277532 - DNA, 1251 bp, Morganella morganii
atgttcacaagcagaacattaccaattctcattggtatgctgatgactttctcaatggttattgcttctttcgtggataccttgtcacgggactcttattttatactgagttatttatctgttatcgtgacactctggctggtctttttcaaaaaaatgtcacttttccgtgaccgtgctgtgttgcttgttgcagtatcgttcctgttgtttggtatttcccgggttgcctggtcatttctgatgaatgatgacgggttgagtatttataaaaactactctcccacagcatcgagaatcatactcggagcatttattttttgtgtttgtattttattaaaaaatgagttgaagtgttttttcagtaacaaatatatttcatctgtcattaaggtattaccgctctatattttattgtatgcgctttatgatatctttgttttgcataaagacagagttgagctggatacaaaccgggcaacagtaactgcatactttatcagtgcgatattttttgtcagccttcatttttgttcgcgggtgaaaaataaactgaatatttcattattttttactaatctgattgtttcaaatgcgattattattctgacacaaacccgtgccgcaatagctatttatcttctgctttcagttttttatactgtcattgttttccggaagagcctgaatataaaaaaaataagcatggttgtggtacttctgctaatttttgccggtacatcatatgagtttttatataaatcccgtattaatgaggcaatcactgaaactcagggttatgatgtgacaaagccggggggatcgctgggtgaccgttataccatgtggtatgcagggttatctgcgtttaagcatgccccgatgggggaatcttttcaggcccgtaatgattttatttcagaaaaaatagctgccggtgcaatcagtgattcaatcactgtctacctgacgatacatctgcacagtgaactgattgaggtgttgtcattgcagggggttatcggtggtgtgctgctggtgctgatttatctctctctgttgtatgccggtattcgtaataagaacgtattgctgataatgattacattatgcctggccggttatggtctgacagatgtcttgttcttcagtcgtgagagtattactgtttatctcctgtgtattgcagtggccctggtgaccggcggtaaagaagataccgcagaacagccgctgccgattgatcgctga

SEQ ID NO: 277533 - DNA, 951 bp, Morganella morganii
atgatcatcattatcggcggctcaggcttcattggtactcgcctgtccacacaattacaaaaagacaatatcccgttcaaaatcgttgatattgagaaaagtgctgcatttcctgatcattgggaatttggggacgtcactaaaccggaatctctggttgagccactgacaggttccgacgttattattaatctggctgcaaagcacaaagataatgtgcatcctatcagtctttactatgatgtaaatgtcgatggcgctaaacatgtatgtgatgtcgcagctcagcttggaatcaaacatatcgtctttacatcttctgttgccgtttacggttttgttgaaaaagaaaccggtgaagatggtcaatatgagccattcaatgattacggcaaatccaaattagctgccgaacatgtctatgatgcctggcaggcagaagaagcagatcgcacactggtgacaatccgcccgactgtagtatttggtgaaaacaaccgtggcaatgtctataatttattccgccagattgcatccggtcgtttcctgatgattggtggcggtaaaaaccaaaaatcaatggcttatgtcgaaaatattgccgcattcttaaaatttgctactacctttaattcaggtcgccatgtatttaactatgtcgataaacctgattttaatatggaagaccttacagatataatctgcaaagcaatggataagcataagtctaatatccacgtaccatatagtgttggtctgttgggtggttactgctttgacattctggcaaaagtgactggtaaggaattcccgataagcagcatccgcattaaaaaattctgtgcccgtactcagtttaaatccgattttattgctgataccggatttgttgccccagtgagcctggaacagggaattgctaatactgttcgccacgaatttaagaagtaa

SEQ ID NO: 277534 - DNA, 1449 bp, Morganella morganii
atgaaaaaatcgataaccttgaatggtgtatataaacttgctttaaatttattcagatttaccttaccagcattgataataccttatgtatatagaacattatcacctgataacatcggttctgttaattatgctgaaagtatatactcatattttaatgcactcgccgttctcggattatcattctatgccataagagaactaggtaaagtaagaagcaacagattaaaatcttcttttttattttctaatatctttactatcaatatacttttagttaccttttcgttatttctatatttattactaatcttctttgtaattaaagatccaaaagtacaaatcatatcattggttcttgctttaaagttatttttgcttgcatttgatattgagtgggtcaatgagtcacatgaagattataaatttatttcaataaaaacaatgttatgccgcagtgtatcattggttttaatgtttttccttattacatcatctgacaattatcttatctatgtctggctgaatgttttctttgacctaataaatgctcttttttctttctattatattgttttttataaaaaaagagtttttttctcattcaaattagttagactcaataagttattttcacattttaaaaggatagcatctacattatttttagttgatgttggttttttattttttgcctttgataaggttgctctgggagcatttgtttctaatactgaagtggcctattttgcactatctgaaaaaattattgtcttggtagttgttatttcatcaaccattactcaagttactttacccaggttatctatacttgcaaaaactaaccgcgcggaatttttattgcttataaataaaatatatacttccttaatgatgatagtattaccatctttcatcggtgtatatttaatggcttccgaatttttattcatattcggctcttatgagtttatgccagctctcgatactataaaaatattttcattctacatactatttttttcactattaaaaatattggctactcaaacactatttgcacttaacaaagaaaaagtatatatcattcttcttatagcttttgctttagtaaatgctatcgtgaaattagttttccaaggaagtataaattcatctataagtattctaattacactatcactactactactgatgtcaattatcatttacttccacatcagaaataaagaaaaaataaaaatacctattattaacaaaaacatatgcatatatatcactggctgcctgcctatgttttttattccgtttcttcgtgagcacatacataatgtatttatattttctattctgtctatgatcttttctatattttcctatacaatagtactattgttttttaaagaatctatttcccaatctctcattaaaaaaatattgaaacgataa

SEQ ID NO: 277535 - DNA, 810 bp, Morganella morganii
atgaattataacttttcagttttactctctatttactataaagaaaatagccaattctttgacgctgctttaaatagtatttatacacaaacatacttgcctaatgaagttatcattgttcatgatgggaaattaacatctgaactatatagcgtgattgaaaaatgggaagcattactacccattcagaatgttatattagataataattgtggccttggtatcgcattaaacatcggtttagaacaatgctctaatgatattgtgatgagagctgatactgatgatataaacttaccaaatcgatttgagatccaatacaaatatatgactcagaatcctgagataaccttatgtggatcacatgttaatgaatttgaagcatcttcagatgaaatcatcagagtaaaaaaagttcctattggtgataatattgttaaagtaataaaaaaaagaaatccatttaaccatatggcagtttgctttaggaaaaaacatattattaatgttggtgggtatatggatcttccttatatggaggattactatttgtggctcaggcttttaaataaaaactataacctcgttaatctcgatactatcttagtttctgccagggtcggtgaagccatgattaatcgcagaaagggttttaaatatgtaaaatcagaaatcaccatgttaaagtatatcctcaactctgatttagaaaagaaatacacttcaattccatatttttcattaagaatactaagccgtattctaccaacttatcttctatcaaaaatatacagcaaattaaggaattaa

SEQ ID NO: 277536 - DNA, 1002 bp, Morganella morganii
atgaaagtaccaaaagtaataacatgtactggttatggcggcactggttcaagtgttatttctgatttgctcggtgaatttagtaatgtctcttccatgggtaacttcgagttcaggtttattcaggatcctaatggtataagagacttagactatggtattaatgaaaataataaccgactaacaaccagttatcatataaataattttatttcttatataaattatttaagtaaaagcaaagtatataactatgaattatttttcaatggtcaatttaaatcaatatctgataaattcataaacaacattgtcgatgttaaatgggatggattttggcatcaggatatcattgactcatcttttttcagaaaattcatttattattctgaacgaataattcagaaaaaaatactgcgaatgaaagaaggtggtgccaatttttatgggtctctttttaataaaaaaatgtattattcctccggaaaaaactttcatcaacacgtcaaaaactatatgaacgagcttattttaagctctaaccataataataaagatttcgttgtatttgaccaaataataccctctgataatgttgataaatatactaactatttcaatgaaattaaagtgattatcgttgatcgagaccccagagacttatatatattgaacaaagcattgtggaaagaaaaatggattccatctgacaatttagatacttatatagaatggttccagcttttaagaaaaaataagaccgagcacgaaaatgtaatttatctgcagtttgaagattttatttataattatgactctaccattagaactgtatgcgacttttgtaatatagacattgctaaccaccagtggaaaaataaatatttcgatccttcggtttctataaaaaataccaatctgattgagcgattccctcaatttagggatgatgcaaatatcattaaaaatagattaatgcaattctgctaccaccaatactaa

SEQ ID NO: 277537 - DNA, 471 bp, Morganella morganii
atgaaaaaagttattacatatggaacctttgatttatttcatatcggacatgttcgattactcaaaagactgaaatcttatggtgattatttagttgttgcgatctcaacagatgaatttaataagctcaaaggaaaagagtcattttgttcttttgaggaaaggaaagaaattgttgaagcctgtaaatatgttgatgaagtaatacctgagtgtaattgggaacagaaagaactggatataaaaaaatataatatagatattttaggtatggggaatgattgggaaggaaaatttgatagcctaaaaaatatctgtgaagtcatttaccttgacagaactgagaatatctcaaccactaagataaaaaaagaattatctgttattacgccggataaagttagagagcttgaaatttctgttaataacatattcgatattattaaatcaatttcaaaggtcaataattaa

SEQ ID NO: 277538 - DNA, 1077 bp, Morganella morganii
atgatttgtgagtactcccctctatttattataatattgtcattatcatttttagctatttctattatatttgatatacaaagtaataagaaattatccgctttaattgcattggtaatgatactatcgtatgcaatactatttggattgcgggattattcaattggctcagatacaagttcctatgtagacaactttttatatagcaactggaatttcgaatatttattctcactaattacaacaattattcaaacgctcactaatgaacctcaaatttatctggtaattatgacggttatatatggcattaccatatatttatataccgccatatacggaaaaaaaataaacactagtattgttatatttacttggtgtattatttttagtccaagtgtcttactggggactataaattatttaagacagccccttgcttttactttattttttatcgggtttagcttatatacaaccacacgaaaaattaccatagctccatttttgataatgtttctatctatttttgttcattcatcgacatctattttggtattattttcgctattagttaagcacattaaaattaagtacatggtaatattattaatattatccatatttatatttctatccggattaatgaatactataattgatagtcatggcgataattatatcattcaaaggacaatcgcacgccatatatatttcaaccctcgtaggtctattacaacaatctatctaaatataatattgtatctcttccactatgttatattattattcctcttttatagcgatagggataaccacgaggcaggaataactctaaaactttatagttttatattgtctttatctatattcttatcatttaatagagaattatcgcttaggtactattatttattacaatttattatccctatttcttatatgtgttttacccaaaccagcaaatatcgtaagttgattaaacctttcttgatattatactgcctttcctacctatgctatctattaactcgtccatggtttatcgatcaactttcaggtaatatcacaccctag

SEQ ID NO: 277539 - DNA, 1089 bp, Morganella morganii
atgaaaaaagatattgttttcctgacagaaagtatggttggtgctggtggtgttgtcagggttataacaacatgggctaactatttcagtacacatggatataagtgtaaaataatctctgttgttaaaggcgaaccttattttcctttacacgaaggtattcaatttaagattaagacattcttttttaaatggaaactactttcacttcctttaaatctactggcaataatcccaatattaaaagagtgcaaaaactcaatattagttgtcaataaatctgcgtatatcgaacctatttatattctcaggaagttaggattatttaaagatattcaactggtatatttctctcacggaggtaatgccgaatttgaattattttacatgtctcggttattcaccagacatcgtgtaaaaatgatcttttcagtatttgataatgtagtatgtttatttaaaaatacagatacaactcctgaatgtgttatagatgaaaaaattacatttattgctaatccatgcccattagaaatatataaaagagatttatctcaggaaaataaaacggtatcgtttattggccgagtgacgaaagaaaaaggtgtagatattttaatacaatcgtggaaaagcattgaaaataaacatcctgattggaaattatcaataattggtgatggtaaagataaaactaattttataacacttgcaagtgaattaaacttaagaaatatcagtttccttccttctactaatgatatcagtaaatatttgaaagagactaccattagtgttcttccctctctatttgaaggaatgccaatgagtataattgaagctcgttcccaagggtgtgccttagtatcgacaagtaccaacggtggaataaagctaattgataatttaaaaaatggattactcgtaaatataaatgatacatacgatttaactgaaaaaataaatcaacttattactgacaaaaacctacgtaacgcattgattttacagggttatgatgacgctctaaattatgatattcaggtaatcgtaaacaactggaaaggtatacttggacatgatttgtga

SEQ ID NO: 277540 - DNA, 1176 bp, Morganella morganii
atgaataaaataaaattaattcttataacaataagaaatatgttaatatctttaactaacaagcctgataataacatagcaatattcagttttgacaaaaataattttaaattcaactctcggtcattatttgaatatatcattgataataaaaaagaagattttgaaataaaatatattataaatgatgatgccaaaaggaatgatctaataaaagaatatggtgattactttataacaacaaagtacaaagaagatataaaattaatatcccaagcaaaaatttggatcactgatggtggctttccgttaaaaacaccttttaatcataagaacagaatacttgtgaatttatggcatggaataccactaaaaaaagtgggcctaatgggttatagcggaattaataaactccgggtagcacttactctaaaaatgtttgcacggcattatacattattctcatcaacatctgataatcttgcagagatatattcaaaaagcttcttaattaagaattctgtcataaaaacgatggggcaaccacgaaatgataagctttttgaggaaccaaagaatttaagttactttattaaggatattccggagtataaaaaaattatactgtatgctccgacatggcgggcaggaatttatggtaaaagctggatcggggaagatacccaatttttcccatttgaagatttttcccagactcagttagagcaatttcttgaggaaaaccaatatttattattattacgtcctcatcatcttcaaaaaataaatatttcagaatcaaaatggatacgctctttcagttctgatgagtgtgaagagattatggatgttatgccccattttgatcttttaatcaccgattattccagcatatattttgatttcctattattaaataaaccaattatatttctcccatatgatattgaaacatatcaaagccaggtaggactgaatttcgactacaacttttccactccgggtcctaagccaaaaactcaaaatgagtttattcatgaaatacatcagtctctaactaataatgaatatttcctggaaaaaagagaacttattaataattactttaatcaagttaaatatggtagcagcaagcttatctacgactatattgtaaataaccttagaaataaataa

SEQ ID NO: 277541 - DNA, 687 bp, Morganella morganii
atgaatgctgtgatcttagctgctggtcttggttcccggtttggtgatataacaaaaaaaacacataaggctcttttacctatcggtggaatacctaatattgaaagaacaattcaatatctgtcagaattcggtattactgaaatagttattgtcaccggtcatctcgcacatcagtttgaatatctgcaagaaaaatatggctgtatactgatacataatgaacagtatcaagagtacaataatatatattcatttttgaaaatagccgattattttaatgatactctggttattgatgctgatgttgtactgctgaaaaatatctttatcaaaagtgaacacagcctttattatactgtaaaacgtacaactcctgaacatgaatggattcctgtattaggcagaaatggatatatcgaacgaatagatatcaaagaaccaacagccccctctttattaggtatttcttactggaaatcagctgaatcagaaaaaattttagctgagctaccaaaatttactgatgtaacgagtctaaataattcaaagctctattgggataatatccctatgtctataattcatgacctaaacatgaaaacttatgaagtttcatctgatgtcgctggcgaaatggataatatagaaaattataatagccttgttatgttatataataattaa

SEQ ID NO: 277542 - DNA, 936 bp, Morganella morganii
atgcaactactgaataagtctattattgttggtttagcatcaggagtactctgggcacttgatacaatacttgtagactataatatatcatcagtcgatacactaaaatatgctattcttttctctatttgtatcgccttccttcatgacctattctcatcgttatggttattttcgtttataactctatctggaagaagtaaaaaattagttaactccctgaaacaacgagatagttacataatctgccttgcggctctcagtggtggccctataggtatgagctgttatattttaggtatctattacagtaatgcttcaatagctgctaccatatccactatttacccggcattaggttgcttgtttgcttatatatttctgagagtaaaaacaacttttgtaaatttcctgggacttttactggttattattactactgcatatattggcctaaaccttgatagttttaaccaaatatcattacttggatttttattttcactaggctgcgcagtgggctggggactggaaagtaccatttgttcttatgcattaaaaaataatctcagctatgaaattgcattatttctcaggcaattaacctcatccgttatttacttcctgataattgcattattctttaaaacagaagcactcgctgtcgctgatatcattctgaataattctctgatattgacaatggctgtaattgcaatttttggcgccctttcatacctgttctattatcgtgcaataggtgaattaggtccaataaaagcgatggggctaaacatcagttattctgcctgggcaattcttcttggcccattattagggtatgagttatcgcctttattattagtgctttcagctattattatagccggagcgcttattacaaatctgcaatcaaaggaagttttagcaaaatga

SEQ ID NO: 277543 - DNA, 897 bp, Morganella morganii
atggcagatgatatccatacaactattgcagatattgtacattctgcaatagctgaacctccggtcaaaatagaaaaaatcggcggaatgacaaatacaaactattattgtgaaacacaaaatacgaaaacagttgtcagactaccgggtgaaaatactaatgttttgattaacagaggaaatgagaaggctaactgtgagttagctactgaactgggaataaaccccaaattatattattacaataccaacaatggtataaaagtaactgaatatataaataatgctgtcacactaacaccaaaaataatcaacaaagatgtaaatctggaaaatatagcattattactacgaaccttgcaccagtcagatttaaaatttgaaaatcatttcaatgtttttgaagaatataaacgttatctgagtgacttaaataaaaatcagatcagctatcctgacttcacagagactgaatcttattttttatattttgaagaaagattgaataaattaggtctgaatatctgtccttgccataatgaccctgtccctgaaaatttcatctataacgataatggttattatctcatcgactgggaatattccggaatgaatgacaatatctgggatattgcagcactttgtgaagaatcacatttatctgataacgatgagaatatttttttaaatcattatttaaacgaatattcttctgaatcagaagcgataaaagaaaaaatattaatttataaagcatgccagaattttctatggtcaatatggactttaatcaaagaaaaaaatgaaaatttatttggaacctacggtattgacagatacaaaaaatgccaaaaacaaatgaatctccataggaaaaaatatgcaactactgaataa

SEQ ID NO: 277544 - DNA, 498 bp, Morganella morganii
atgggtaagatagcaacaatcactttagcgtcaatgtttgtgatgcaaagtgcgccgggactggcgcaggattcagaaagtgatggctgcgttaccccggtgcagagtcacagtcagtataaaggtataacgacatcagggggagatggttatacctctatgttgaccggcatccggttaacggaagaacagcggatgcagttgcgggatctgatgcacaattaccgcgaccagttacggaatgtccgtaaccttgcagaagatgatattgcgctgtacgagctggttaaggccgaaaagtttgatgaaacggccgtgcgtaatcagcttgaaaaggagatgcgcaagcggctggattatcaggttgagatgatacgggttcaccatcagatgtatcagttactcaacccggagcagaaaatgcagctggatgctaattttgagccggagagtattcatacctcatccgcctcctccgcgcagaatatgccggaatga

SEQ ID NO: 277545 - DNA, 981 bp, Morganella morganii
atgcctattaagaaactcgatgatggtcgatatttagtggacgttagacctcttgggcggcagggaacccgcatcaggaagaaattcaataaaaaatcagaggctattgcttttgaacggtacacaatggcaaacgtttcaagcatgtctgccactggcgcgaagaaggacaggcgcacacttactgaacttttagatttgtggtggctctatcatggttctgccagtgatagcggtgatgcagagtttcgccagctgaaaaaaacgatatcagcattaggcgacccggcaataaaccggctgaataagcacactctgcttgagcaccgcacccagcgtctgagggatcagatcagcccttcaaccattaaccgcgatatgtaccggctttccgggatgctgactgcattaaaaaagctggaaatatttcacggtgacaatcctgtaaacggtttgccgcctctgaaagaaaagcagcccgaaatgacttttttatcacaggatgaaatcagcaatctgctgggtattctgtcaggtgatgaaaaacggatcgctctgttatgtatcagcaccggtgcccggtggagcgaagcggccactctgaaaagtgaacaagtaattaacgggcgcgtgacgttcttaaagacaaaaaacgggaagcagcgaacgatcccgatatcagaagaactggaacaggcagtaaaaacaagaaaagccggggtgctcttcaaagttgattaccaaacgttccggaaaaaactgaaggcaataaagcccgacctgccatcaggacaagcaacacatgttttacgacatacgtttgcgagtcacttcatgatgaacgggggaaacatcgttgcactacagcagatactcggacatgccagcattaaccagacgatggcgtatgctcatctcgcccccgattatttgcagttcgcaatcttgtttaatccgctgaaaggtggtgtgacaatttag

SEQ ID NO: 277546 - DNA, 306 bp, Morganella morganii
atgaccaacttgtcaaccctcggtgaaaagatacgtatgatccgcgaggctgaaaatttaaacagaaaagaaatggccgagttaataggcgcgtcctacggcacacttaacaactatgaaacaaaaggagttttagtaacagaaaccgtactagtgaagctgacgagtcatccccggtttgaaaaatacacactctggcttatgacgggaaaaaccaatgaagcaatgggacaaatcagcccgactctctcccctgatggtgcagatgcaactccgtcagaccactcagagcggaaaattggttag

SEQ ID NO: 277547 - DNA, 291 bp, Morganella morganii
atgagcgagcagaacacagacggttatatgcaggtttattacccagttgacgcggttccgtatcaaaaatttgctgatctgattggcaaatcaccggcagcagttaaaggaatggtcgataaaaacaagttaccggtgatccaatggacaaaccctgattcaattggggacgtaaaaacacgcggtgaaacatgggtctatattccggaatttaaccgcgcaatgcgggacgcattccagaacagaccgaaagaattacgtgacgcgtggctgttgtgggtcggcttatga

SEQ ID NO: 277548 - DNA, 216 bp, Morganella morganii
atgagcaacagcggctttccattagtcaggtataagtcgcactgctatatatatcgcggctttaatatctatgtgttgccgcgcaacgtgaccagaaaaataacgcagtatcacgtaatgctgagtgatggggctgacagcttcaattcattcggcaaagttgatgcactggcgcaggcgacgggttttatagattcattgttcgataaaaaataa

SEQ ID NO: 277549 - DNA, 396 bp, Morganella morganii
atgcgtgcaacggctgaattaattgatattacatcacagttacagagtggagatattaatcattcgctggcaggcgttaagagttacaagaataacggtatgtcattttctgaaaggacagaaaaactaactgaggccggagcattgcggacaactgtttttttcaaaaacaaacaggataatccagataatagagaactagccggatttcttgaatatatgcggctgtcagataaacgaatgttggatatgattttctttcttgctgagttgggtaataaagaaaggaaatatgcagacctgacaaaagaggaaaagcagcaattaattattgccattaataaaataaaatcactgacggcgttaatgccgaaaaacatttcttacccgatttaa

SEQ ID NO: 277550 - DNA, 222 bp, Morganella morganii
atgaaatcaattccggatccaatattcacccctgtagctgaaaatatcaaagccaatcgcgaagacgagcgcaaaactctgatgaatggttttgccggtcgtttacgcaccatttcatacaaagcattaagccagaaaatgacaccaacagaaatttatcacctgctcaatggtgaggctgaccgtatcgaaaacgaagcgggagagctgaaccatgtctga

SEQ ID NO: 277551 - DNA, 222 bp, Morganella morganii
atgtctgacgaaatcgatcgcgccaatgaccacgccgcgcttgtacttgaaagccagatagccgccgcccgtattactgctgcgggtgtgtccgcgtttgaatgtgaggggtgcggtaagccaattcctgagccacgtcgccgcgctgtgatcggctgcaccatgtgcattgattgccaggcaattgatgaactgaaaaacaaacattaccggagcgtgtga

SEQ ID NO: 277552 - DNA, 156 bp, Morganella morganii
atgaatattcgctgctttataggtctgcataaatggacagttttaaacgtgatttattgggatatggctgacggagtatctttcgccgagcgtaaattaggctgcttgtgttgcgggaagacaaaagttgtaagaaggaaagttggcaatgaataa

SEQ ID NO: 277553 - DNA, 807 bp, Morganella morganii
atgaataaaaccatcctcaaatgggcgggttcaaaagtcggcattatggaacagctgcgcccgtacctgccaaaaacaaaacgcctcgttgaaccgttcgccggttcctgtgctgtgatgatgaatactgactatgagcagtatttaattgcagatgtgaataacgatttaattaccatgtatcagcaaatagcgtcagataatattgatgaggttataagaactgcatacggtctttttgaattggaggctgtcgagtcgggttattatatagagcgcgatttttttaataaaagtaaacatgtattgcagccagagtatatcgccgcgtatttcatatatttaaaccgtcactgttacaacggattgtgccgctacaatcagaaaggtggttttaatgtaccgtgcggaaattataaaaaaacatactttccggaagaagagatccgcgcctttgctacgaaagcacacaaagctgatattaaatgccagggctgggcggcaacgctgttacagacctgtgccggtgacggtatttattgtgatcccccttatatgggcaccggttttacccggtaccacactgaaggttttaatgatggtgatcaggtcgctcttgccgacgcgttgcaagctctgcatgccaccaaaggcaatccggtcacagtatcaaactcgttggccgcaaaagagctgtatgcagattttggcttcaccatccacgaaatagaagcaccgcgaagaatatcggcgaacggaaacagagaaaaagcacctgaaattattgctgtgctgggcggttgctga

SEQ ID NO: 277554 - DNA, 324 bp, Morganella morganii
atgagtatcaccgatccgcgcaacggcatttatattaccgatacccgctatgctatcgctcgcagactgccggaagagcacgcatcacttccggcatatgcgctgattgaggctgatcttaaaaataatagctggtcactggttgcacggtatgacaaccctgtcgtgatggttgctgatctggtcgccatgcaggttatcaggccgaaagataagccggtgaaaacactggatgaatatctgcgtttcagcgaaatgatagtgaaacgttgtcagacagcgttgtctgtactccgggaaatgccggttggtgatcagccatga

SEQ ID NO: 277555 - DNA, 2313 bp, Morganella morganii
atgaccggaaaaataattgatttcagcgtgcagcctccgccggaaccggcggtttttgtgcatgagtggaacaaaaagcgacatgaggcggtgctgggttttgagctgcctctgaccgccgcacagctgaaacaaaatcaggaattgcaggacgagatagaacgcctgccgcgtatgctgcgtttcccgttccgtaagcgctatgaaaaaatccatgaagaagaagggctgttagcagctcataaatatctgtatttcaagttttaccgggaaatacttccgcgagttaatgccgttaatgaccgcttttcagtgcgtcatatggatcagtttaatgccctgccggagttatccgacaaggccgttaaattactggcaaagcaactggcgaaagtattttttgagcgttgccaactgctgatcgataaggtcagcgagattggtgatggtgccatatttaaatttaagtacctgtatgaaatatacgggcacatggctgctgatgccaaagaactgcatattaccccgcttcactacagccggtatctgaaaggctcaattagtgaaaaaaatatccactctgcccttgcccgtctggtgaatgatgatttctggtaccgccgtttacgggcgcaccgtgcccgctggcgtgagtcgttgctgattgccgttatggccgtcaatatgaataagcgtccgtatgccagccgccaggcgattaatgaagtccgcgcccagcgtaaagcgaacgaagaatatctgaaacagatggatattgaagacactgagacgggtgagcggtttgatctgtttgaaaaagtgatggggagtatttccaaccctgaaattcgccgtatggaacttatggcacagatcgccggcattgaaagagtggctatgcaacgcggtgatatcggcatgtttgttaccatcacgacaccgtcaaagtaccatccgacaaaggttaccggtaagaaagacgagaaaaaggccattattaatcataactggtcaaaagaggcttacacaccaaagaacggacaggcatatcttgttcgcgtctggtcaaaaatacggacagctttcaaggattacgggctcaaagtctacggtattcgcgttgttgaaccgcatcatgatggtactccgcactggcatttattgttgttcactgacaaagccagccgtgcgcaggttatcgacattatgcgcaaaaaagcccttgccgttgacgggaaagagcaaggcgcacaaaaacaccggtttaagtgtgaacacatgaaccgtggcggcgctgtcagttatatcgcgaaatacatttctaagaatatcgacggttacgcactggacggtgaaatcgataatgacaccggaaaaccgctgagtgataccgccgccgccgtgaccgcatgggcggcaacatggcgcattcctcagtttcagttttataacctgccgtcgaaaggcgcataccgtgaatgccgcaagttgcgtggtatttctatcgcagagcagatcggtgatgtggcggaaaaggtcaggtttgcagccgataaaggtttttttgatgaatacatcctttctcagggtggcccgtgtaccccgcgtgacctgcaaacggtcagagtagcgagacgcgccgctgatcggctgaaccagtacgacgaagaagtccctgaagtattcgggatctactcccctgttttcggcggcgatgtcgtcaaaacccgcgaacgtaaataccaaattgttaaaaaacgcgacagtcaaaacccggcaccggttgccgttggttttgattttaatcttttaaagggcggcatcgccgaccctcggagtcctgtcaataactgtggatcggtgatctcaaccgatggtgataaatcgccagatttagcgccaaactacggcgtgacaggggtttaccaaataaaaccgtggggttcatgcctcagtgataaggccgctgagaaagcggcgcaggcagcagaaccggtacaaaccgccagccgggttaattcccgtatcactttaagcgacaacgaaatcgcatttatcccggaaatacagaaattcaccgccgcaatggggcatgaaatgccagcgaacgggctaatgatgatgtttatccggggcatgaccgttgattacggtgatcagaaactgttgttccgtgatggccggatgcggctggagctgggcgacgaggcaaaagcagtgaaagaacggcagcaggccgtgaaacgagagcagaaagcggcgtcaatattggcgcgggttgagaaaatgaggcgaaaagacgatgacaattaa

SEQ ID NO: 277556 - DNA, 675 bp, Morganella morganii
atgacaattaaaattgcagtgacaacagaattaattattagtctgtacaatcggctgaatagtttatttccgtggcaaaaacgctggtatgcacaacgttttcagcgtgcccgtgatttacataaaggccgtcagattggtgcggattattattttgcatttgaggcggtacttgatgcctgtctcaccggaagaaacaaaatatttatcgaaccggcaccggctgatccggaagatacgtttatttcaggcgctataaattatgcagcgttatttttggggtgcgaagtcaagccgtgtacacagactatagagctaagtaatggtgccagtattcggtttgttcccgacactaaccagtgttgggctgggaattgtgcagatgtttatgtgtctgagtgggcttatttttctgacccagggaacgccattgctgccgcaatggcaattacggcacatataaaatggcggttaaccgtatattcatcaatttatgaatataatcagggaacgtacatgaaattcagcgggaatagctggtatcacgattcagtaccacttctaccacatgagtgtactgaggcgcattgtgctaaagctaccggaatgcgaaccgattttccggatgattatttccgtctgtgtattttgtgccagttgccggaaggggcttaa

SEQ ID NO: 277557 - DNA, 552 bp, Morganella morganii
atgcgcctttttcatgcgccgtacacacggagaaagagcggcaccctatccccctcagcgcgcgattgctcccccgcctcgcccgcacacaaaaggtgtgcttttttgtgcaggttttgccaccggggcaacgcgcagcccgtcagggcttgcgcggtattttatgtgaaccggaaattgtgcaggagtgtgcggatttgtgcggtgatttttggcaagaaaaaaccgccggtttcggcggttctggttggctgttactacttatccggaaatgacataatcctttttatttccgccgctattttagtaacattcgctatatcctcatattttttatacaccacagcagcacaaccaataaattcatccggcgttacctgtccttctgaaaaaatcagctccagcttatcaataaatgactttatccgtaccgtcttatcatccggcggagcacctgtgtataaatgcaccattattaagccccttccggcaactggcacaaaatacacagacggaaataatcatccggaaaatcggttcgcattccggtag

SEQ ID NO: 277558 - DNA, 1035 bp, Morganella morganii
atgaaaaaaaagaaaacactgcctgtcaccgctaaagcagaaatacccgctgacaagcagtgtgctgcattcacctttgataatcctgtgccagtcaccggtgcttatgacctgctcgactgcatggagtgcgcgaaaaccgataagtggtatgaaacgccgttagacttctacagcatcgcccgcgcattccgttcagcggtacatcatgaatcaccgctgctgtttaagcgcaacgttatcatgagctgttttatcccgcataaatccctgtcctatcaggaaatgaacgcctacgttcttgattatcttgtattcggaaacggatatcttgagcgccgccgtaatatgttcggcggactgctgcaacttaaacgatcaccggccaaatacacccggcgcgggattgacctggacacttattatttcgttcagacatggcaggatgcgcatgaatttaagcgcggtgatgttttccatctgatcaatccggatattaaccaggagatttacgggctgccggaatatctggccgggctgatatccgccaaactcaataaatcggccaccacattccgggtcaactactatgagaacggctcacacgccggggtgattgtttatcttaatgacgcactggccgacccgaacggcgttgaggatctgaaaggcgcattgcagaaatcacgccgtgacggggctttcaagaacctgtttgtttattcggcaaacggtaagaaggacggcattcagatcctgccgttcagccagatagcggccaaagatgaatttatgaacgtgaaggatgccacccgtgatgatttgcttgccatgcaccgtgtgccgccgcagctgatgggtatcgtaccaaccggcgcgggcagcttcggggatgtggaaaaggcggcgaaagttttttctatcaatgagctgatgccaatcatgcagagcctgaaatccgtaaatgactgggtcggtgaggaagtggtgcgcttcaatgagtacgccctgcttgaagccctcggcgcaaaataa

SEQ ID NO: 277559 - DNA, 1719 bp, Morganella morganii
atgataactgactctcagcgcgatccgcggtcggaagcgaaaagcctgtactggcaggcgtacagtatttcacagatagcgtcacacctcggtgtgagcgccaacacgctctattcgtggcgcagacgggataaatgggatgaaacccaccctgttcagcgcgtcagtgatgagatgcatgtccgcattctgcggatcctcaataaaaaagacctgaccgcgcacgattttaaagtgatggattttctcggccgtcagatggcgcggctgaacaaagaaagcgataagcaggagaaagagaagaagccgaaaacgccaaagaaccactttaccgaagagcagatcgaacaactccggcagctggctctggaaccgctgtttgaacatcagaagaagtggtttaagcagaaaaaccgccgtaaccgcatgattttaaaatcacggcaaatcggcgcgacctggtattttgcccgggaagcactgctgcacgcactggaaaccggcaataaccaaatattcctgtcagccagccgggcacaggcgcatcagtttaaaggcttcattatcgccctcgcgcggctcgtcggcgtggagctgaaaggcggggataaaattattttgtccaccggtacaacattctattttctcggtaccgctgcggcatccgcacagtcttataccggcgatctctattttgatgagttcttttgggtggctaacttcgccgaactgcgcaaagtggcggcggctatggcctcacaggtcggattacgccggacttatttctctaccccatcatctgaagagcatgaggcttatccgttctggacaggggacttcttcaatgaatcccggcctgaatccaaaaaaatcagcattgataccacacacaaaaccctgaaaaacggtgtgctgtgcggggacaatatctggcgacagattgtcactattcatgatgcgattaacagcgggtttgacctgatatcactggcggatatcgaaagcgagaacaccccggacgatctcgaaaacctctataactgtaagtttgttaaagccggtgaacgggcattcgactataacgcccttatttaccgtggtgttgatggttataaccgtgatgtctggccggactggaagccttacgcagacaggccgctcggtaataaaccggtgcgcatcggtgccgacccgaccggcaccggcggcaatggtgacggcctcggcctcgctgtgctcgccccgcctgccgttcccggcgggaaatggcgtgttgtcgaggcgctgcgcttccgtggcatggcttttgaaaaacaggctgaagaaatcagaaaactgacactgcgctataacgtgcaggggatcaacattgatattaccggcggtaccggcgaagccgtgtatgaactggtgaaaaaattctacccggcagtacagggcatccgttataccccgcaggtcaagcggatgatggtgcttaaagcacagatgcttatccgcaacgggcgcattgaatatgatgccggggcatcacagatcccgtcgtctttcatgactatcaaaaaagtcatcacacagggcggcattgtcacctatgcgtcagaccgcacacgcggtgttgatcacggggatattgcctggtctgttatgaacgttttatacgctgaacctatcggcagcgaatccgcagacagcggatcctgtgtatcggagttttaa

SEQ ID NO: 277560 - DNA, 846 bp, Morganella morganii
atgccagaagacaataaaaaactacaggtcatcgtctgcaccgagggcggcacgttaaacggctttgctgtcacgcgtgaccagattcagcagatggctgacaactataatccgcagctgtacgccgcgcgtatcaatctggaacacatcaccagtgtgttacctgacagtacatggcgtcatttttccatgatcgattctgcccgtgcatttgagttacaggacgggccgttaaaaggaaaactggcgctggaaatctccgccaccattgacccggtcaaagacgcaccattaatcgccctgaacgaaagcggccagaagattttctccagtatcgaatttttaccggattgcccgaatgacgcggcgaaaggtgcctatctgaccggtgttgcgctgactgataccccggcggcattcggcacgcaggttatcaccctgagtaaccgtgagcgcggcctgccggaagatgcgaaaaatacctataccgcatcactggaaactgtcgtgaagatgagcgctgccgaaaagcagcaggcagagcaaaaatcactggcagctgaatttctcgacggcctgaaaaaagtgctcggttttcagcgtgaaaacagcaatcacgacattgccgcgttgcaggaaggtatcaatctgaccgcgaaaacctgtgcagaggcgttaacggccatgcagaaactgacagccgaaaaagaaacgctgtcaggtgaagtcgcgaccctgaaacaggaattatccgccctgaaaacgcagctcggcggcactgacgcggataacgaacagcgccagctttccaccggtaacggcggttacgttcagtctgaattttaa

SEQ ID NO: 277561 - DNA, 1056 bp, Morganella morganii
atgtcattaacacctgaagcaaataaagcgtatctgtcctacctggacaatcaggcgcgtttaaaccatgccgtccgtgacggtaaatcactgcaattttctgttgatccgtcagtgcagcagaagattgaaaaggccgtgatggaaagcaaccctttcctgaaagaaatcaactcattcggtgtgactgaacaaaaagggtcaacgattctgattgcgtcaaatcagccgattgccagccgcaatacgtcaaccactgaccgccgcgagcctgcacaggctttcgggatggaagaaaacacttacgcctgtgaacagaccaattttgactcaatgatcccgtatacccagctcgacgcctgggcgggtcaccctcagtttcagagcctgattaatcagcagattattcagcgtgaagggcttgatcgcctgatgattggttttaacggggttaagtgtgcggcgaaatcagatcgtcagcaaaacccgttacttcaggacgtcaatatcggctggttacagcttgtgcgtgaacgggcaccgcagcgtgtgatgaaaaacatcaccctgacttcgcgcgatgaggacgggaaaatcatcaaaaaaggccgttacgccaatattgatgccgttgtgtatgacgcagtaaacaacctgatcgatccgtggcaccgcaatgctgccgggttggtggcgattgtcggccgtcagctggtcacacagaaaaacttcaaaatcatcaatcagcacagccagcaaaacccgaatatggaactgatggccggtaaagaactgatgaaactcagcagcgtaggcgggattccgtctgttcaggtgccgtatttccctgacggtgctgtgttaatcaccaccatgaaaaacctgtccatttactggcagaaaggcaagttaagccgcttcattaaaaatgagccggaatataaccgtattgccacctatgcacagagtaatgacggttacgccgtggaagattacggcctctcctgcctgattgaaggtatcacttacgccgaagctgagagcagcggcgaataa

SEQ ID NO: 277562 - DNA, 792 bp, Morganella morganii
atgcaacagttaacacctgctcaggaacactggcaacgcgtcatggcagagcgccggggcagcgaacaaacaaccgtaaacatgacggcatacgagcagatcctgcatcgtctgcgtcacgatcagtcacgtctgagcgacattcagggcactgagttcaaaattgagtacaagaaaacggtgcttgaccagtacgaaccgtggattgacggcgttattgcggccaataccggccagtcagatgaggtttttacgaccgttctggtctggcagattgactgcggaaactatgaccgggcgctggatatggcaggttacgtgctggcacacaatttaccgctgccggaacgctacaaccgcacacctgcggtgatggtgattgatgaaatctgtgataaagcgctgaccctgttttctgccggtgtcggtgctgaccagctgatcccgctgccggtactggaacgcgtcagaacactgactgagtaccatgatgtaccgaacgaagtacaggcaaaactctgtaaagcactggcgtacacactgcgcctgagtaagcagccggaagataaatcccgggcgcttgagctgttacagcgtgcgctgctgctgcacagcaaatccggcgtgaaacgggatattgaactgctgcaacgggagctgaaaaaagcggacgacagtaaacaggacgctgcgccggaaccggaaaagaaaccggcgaaaaataccggcacaaaaccaaagccgggcagcgctaaaaagacagccacggcgcggaaaaaagccgcgtcataa

SEQ ID NO: 277563 - DNA, 486 bp, Morganella morganii
atgagcggattagtcgcacccaaggccgttgcgccgaccgatgaaacgacagatatcagtgacaagggcgttgtggtgacaaccatcccgttttacccggatatcacattgtctgatctgcgctgggctatgcgggttaacggcaccgttactaccgcgagactgaagcacgcagctaccagtgccgccctgtatgtcaatgacctgctgaaagaatggcaggcagcgcagacagcggaaacgctgggtgatgtgccgtcaacacccgtcaacgacgaaacccggcatttgtttttataccgccaggcggtttacagcttcacaaagtcatatctgattgaaaattatcgtgatatcgacacaacccgcgaaggtgaaaaacacgcggaagccctgagcacgcagattgatgatctgcgccgtgacggacagaacgccgtccgtgacctgatggggctgcggcgcatggtggcggagctggcgtaa

SEQ ID NO: 277564 - DNA, 201 bp, Morganella morganii
atgaaagtacaggcacagcagggcgataccgtggatttactctgttaccggcattaccggcgcacgcagggagtcgtcacacaggtgcttgatgcgaatccgggtctgtgtctggcaaccgttttacgtccggggcagtgggtggaaatgccggatatcaccgaaccgaaacagaaagataccgttcaattgtgggattag

SEQ ID NO: 277565 - DNA, 261 bp, Morganella morganii
atggacgaattacacagcagactcacctatttttttgccacgattggcgcgtttttctctgggctttccctgtatgaaatgggctttttaatcgggctggccgtcagtattgcgctcggcgtgctgaattacctgcttaaccggcgctctcagcagcagcggacggcgatatgggcggattatgtggcggcactgaaacagcagggtgtcagcggcgaatccgcaaaagatttcattaccgcaccgaaacaggaattgtga

SEQ ID NO: 277566 - DNA, 546 bp, Morganella morganii
atgcaacagaataacctgaatgtattcagcaaagtaatgatcggtttgttgctgggtggtgccggagcgacggccattgtcgatcagtttctggatgaaaaagaaggtaattccctgaccgcgtatcaggacggcggcggtatctggactatctgccggggcgtgacccggattgacggcaagccggtaaaacgcggtatgacactgacggcggatcagtgcgccaaagtgaaccgtatcgaggctgaaaaggcggtgcagtgggtgctgcgtaatgtgcatgtgccgctgaatgatgcacagattgccggtattgccagcttttgcccgtataacatcggcccggggaaatgtttcacatccacattttataaaaaactgaatgctggtgataaacgcggtgcctgtcaggaaataaaacgctggatctatgacggcgggaaagactgccggaagaccaaagggcagaaaaacggctgttacggtcaggtgctgcgccgggaacaggaagctgcgcttgcgtgctggggtctggatgatgaataa

SEQ ID NO: 277567 - DNA, 528 bp, Morganella morganii
ttgcgtgctggggtctggatgatgaataagagcggcttttcgacctatgccattgttggcctgttactgctgactgtcggcggaaaatggtactacgacagaaaaatcgccgtactgactaccacacaccagaccacattaaacgcgctgacgctggcagcgaaacagcaaagtgatgcggcagcggaacggatgcggacagcacagcgtaaagccgcagaattggatgccagacacacaggaaaactgaaagatgcgcttgaggaaaataatcatctgcgtgatgccgttcgtgatggtgctcggcggttgtggctcaccggtgccgaccttgccacctgtgaattgtcagcaggcagaaataccggcggcggcagcgtgggcgatggaaccgaaatccgactcactgaaaaagctgaacgaactgttttcgatatcagagccggaatcatcagcgaccaggcaaaattagattatctgcaatcccgggtcagggagttagaaaaacagtgcagggtatcaccatga

SEQ ID NO: 277568 - DNA, 156 bp, Morganella morganii
atgaaaacagcctgttatgtcattggcaccctgatttttctggccgtatttctgatctcatcggcatatttgctgacagataacagttgcggtactgaccgtaaaagccttgaaaagcgctgtgtcagtgcgattaaccactacagggggcagtga

SEQ ID NO: 277569 - DNA, 423 bp, Morganella morganii
atgctgaaaccgaagttactgcgggattttctgacggcgcgggagccatacttccggcagaacgctgaagcactggaagtgtacgcgtcaaagggatcggttatcgcaaccggtacacccggactctcgtttctgtacagctatgagctgaacgtactggcaatggattacccgaactcactggataaattgacagtcaccatcctgaaatgggtacggaagcatcagccgtcactgatattcaacccggacaagcgcgaacgcgggatcagttttgatgcagatattctggataacaacaccgctgatattttgtttgttatgccggtgacagagcgtgtgattgttgaagaaacagacggtgaagatatcgttacacacctgccggaaccggattttaacccccgcaaggcggcagcatga

SEQ ID NO: 277570 - DNA, 642 bp, Morganella morganii
atgagtaacgaaaccacgctgttttcacagctggatgccgaattatcacggctgctgtcaacgacaagcccggcataccgccgccggttgtcggccaaactggcaaaagctatccggacagaccagcagaaacggatccgcagtcagcaaaatgcggacggctcaccttacctggcaagaaaaacccgggtactgcggtcaaagcagggtgttgaatttctgtataagggcgaagtccgccgtctgcggggctggcgtaacaccaaagggcgcaacggtcggatgatcaccggctatgacgaagagcgcggcgcggtacggtcattcatgcggaaagatattgatcgctttctgtcaatcgacctgtcagaaacccgccgcagcacaaagcgcggtgatccgatgtttaagcggctgcgtactgcccggtttttacgggcgcaggcttttccggatgccgccgttgtcgggtttcagggtaaagccgccgccattgcccggcagcatcagtacggcctcaccggtgccgttaacgagctggcgcggacgcagtacccgaaacgcgaattactcggcttgtcgcagtacgaacgcgctgggctgctggaacttatttatcaggatttgatgaactcacgatga

SEQ ID NO: 277571 - DNA, 630 bp, Morganella morganii
atgacactgaatgaactggaacgccttatttccaacctgttacgcgtgggcgtggttgaagaggtgaacactgaaaaaatggtctgccgggtcagaaccggggacattctcactgactggatccgctggggcactgaccgtgccggagcggggcgctcatggtgggcgccggttgccggtgagcaggtcataatcggcgctgtaaatggtgaattaaccacggcatttgttctgtgctcgctgtacagcgatgcaaacggggcaccgagccacagtgcgcaggctatgcacaaaacattcagtgacggtgccgtaatcgaatacgagccggaaaccggtgaattaacggtgaccggcattcagaaagccacagtgaacgccgcgcaaaaaattgatgccaccgccccggaagtgacagtgacggccagcacgcagattaattttaataccccgaaagtggtgtgttcagacaatctgacgtgcgcaaccctgaatgtggaaaaaggcggtgaaatgaccggtaactttaatcataccggcggcagtattaactctaacggtgtcacgctgcatacccataaacacggtggggtagagcggggcagcagcaatacggactcaccggcatga

SEQ ID NO: 277572 - DNA, 339 bp, Morganella morganii
atgacatacagcggctttgataaaaaaacgggtatggccatcagtgacgatgcgcatattacgcagagtatgtacgacattctgcacacgccgattggttcccgcgtgatgcgccgtgaatacggttcgttactgtcagagctgattgatgaaccggataacaaggcaacgcgcctgaaagtcatgagcgcctgttatatggcgttaatgcgctgggagccgcgtatcagcctgcaacgcattgaagtaaaaccggacgaaaacaacgtaccgaccctgtattttcagggcacgaaaaccgataaccagccgtttacggcagaaattccccgggggtaa

SEQ ID NO: 277573 - DNA, 612 bp, Morganella morganii
atgtcactagatgaacctatgaataacagaagtaaaagacgattaagaaatatattaatatcattaaatgtagatttaataatgatcgaaaatcagatttatcataatgatatgattaaactgacaaatttgcattattatattgtatgtttagaagaccgacgattttttagtcatcgcggagttgattttcgatctgttttaagggagtgttttaaggctctaacatttaaaaagcacggtggtgccagcactatagatatgcaaatggtaagaacaatcactggctttaaagaaaacactatgttcagaaaaatatatgagtctatattagcatttattattaattatagatatacaaaaaagcagatcattgattgctatgttagaactgcattctttggtagccgtttatatggagcagaagctgccgcaaagaacttttatagtaaaaaaattgaaaaactaaataatgatgagatggcctttatcgcatcaatgttacttaggccaaaaccactgaacccaacagaaaaatggttaagtaatactacattacgttctcggtacgcgcagggtgtttttaggaaaattaaggatcgatttaagtaa

SEQ ID NO: 277574 - DNA, 678 bp, Morganella morganii
gtgattgattttactaaatacataatacaaattggtattggtttttacttgaccaacattgtaggccaaaaaatagcttcgtcatatcaacgtaaaaacgcccttgagctgataaaaagaaaaaaagctgaagcagaaatagactctattcaatcagtacttttaagtttgattactgcttctagtgaacgtaggtttgcagctacagacttgatcactgcactaactgataaaccgcgtaacgatgataaactgcgtaacgatgataagattatagagttaagaaaaaaaaataaaattaaagttaatgagtggaatataaatcttggaatattaaacatgaagatgtttaacctcgatttatatgaattatctatagagattgaaaatacgattcattctgagtttagaaaatctcatagtgagataaattcataccttgacgatgacgatagtgaacatttattaaaagcaactgtccatttagaaaatgtttatcacaatagccgaaaaattagtaatcgtttatccattatatcaaaagatagatgggaaaaattaaccagtgacaatactgagcagttagacctatataatttacataacgcatcaaactatgtattacttaaatcgatccttaattttcctaaaaacaccctgcgcgtaccgagaacgtaa

SEQ ID NO: 277575 - DNA, 1512 bp, Morganella morganii
atggagtttagtgtaaaaagcggcagcccggaaaagcagcgcagtgcttgtattgtggtcggggttttcgaaccgcgtcgtctgtctcctgtggtggagcagctcgataaaatcagcgacggctacatcagtgctctgctgcgccgcggcgagctggagggcaaggtcgggcagtcactgcttctgcaccatgtcccgaatgtcctgtccgagcgtatcctgttaatcggctgcgggaaagaacgtgaactggatgaacgccagtacaaacagattatccggacgaccatcaataccctgaatgaaaccgggtcaatggaagccgtctgttttctgaccgagttacatgtcaaaggccgcaataactactggaaagtccggcaggcggttgaaacagccaaagaatctctctatgtctttgatcagctgaaaagtaacaaaaccgaattacgccgtccgctgcgcaagctggtcttcaatgtaccgacccgccgcgaactgccgaccggtgagaaagcgatcagccacggtctggcgattgccgccggtatcaaagccgcgaaagatctggccaatatgccgccgaatatctgtaatgccgcttatctggcatctcaggcgcgtcagctggcagacagcaactctccggtgctcagtacccgtgtcatcggcgaagagcagatgaaagagctgggcatgctggcgtatctggccgtcggccagggatcacgtaatgaatccctgatgtcggtgattgaatataaaggtaatccggatccggaagcacgtccgatcgtgttagtcggcaaaggcctgacctttgactccggcggtatttccatcaaaccggctgacagcatggatgagatgaaatacgacatgtgcggcgcggcaaccgtctacggcgtgatgcgcgtggtggcggagctgggtttaccgctcaatgtgatcgggattctcgcaggctgtgaaaacatgccgggcggcaatgcctatcgtccgggggatatcctcaccaccatgtccggccagacagttgaggtgctcaataccgatgcggaaggccgcctggtactgtgtgacacactgacctacgccgagcgttttgatccggaaacggtgattgatatcgccacactgaccggtgcctgcatggtcgcactcggtaaccacttcagcggcctgatggcaaaccacaatccgctggcgcacgagttactgaatgcctctgaacaggcgggtgaccgtgcatggcgtctgccgctggcagaagagttctacgagcagatcgagtccaattttgcggatctggcaaacaccggcggccgtctcggcggcgctatcacagcgggctgcttcctgtcccgttttgccacccgctataactgggcgcatctggatatcgccggaaccgcatggcgctccggaaaaaacaaaggtgcgacaggtcgtccggttgcactgctgtcacaattcctgttaaatcgtgcgggtatcagcaccgacgactga

SEQ ID NO: 277576 - DNA, 1260 bp, Morganella morganii
atggctctgagtgatgtgaaggttcgttcggcaaagccggaagcaaaagcctataaacttactgaccgtgaaggcatgattttgctggttcaccctaatggttctaaatattggcggctacgttatcgcttcggtggtaaagagaagatgctagcgctggggaaataccttgaagtctcgctggcggatgccagggcacgccaggatgaagcccgtaagctattggctaacggtgtcgatcccagtgagaacaagaaagccgttaaggtagagcaggagcaagaggcaataacgtttgaagtggttgccagagactggcacaccagcaatcagaagtggtcagcatcgcatagtgctcgtgtgttgaaaagcttggaagataatctctttgctgctattggtaagcggagcattgctgaattgaagacgcgagatctgctcgtacctatcaaagcagttgagtcatccgggcggcttgaagtcgccgcccgtttgcaacagcgaactaccgcaattatgcgctttgctgtgcagagtgggttaatcgactacaaccctgcacaagaaattgccggtgcggttgctactgctaaaagacagcatcgtgcggctctggagcttaaccgcatacctgaattacttcactgtattgatcattactccggcaggccgttaactcgactggcggttgaactcacgttgttagttttcatccgttcaagcgaactgcgctttgcccgttggtcagaagtggattttgacacggccatgtggacgattccaggtgagcgtgaaccgatggaaggtgttaaacattctcagcgtggttcgaagatgcggactccacctcttgttcctttatcgcggcaggctctggctattttggaaaagctcaaaagcatgagtggtaaccgtgagctgatttttgtgggcgatcacgatccgcgtaagccgatgagtgagaacacggtaaacaaggcactgagagtgatgggctataacacgaaaacggaagtttgtgggcatggttttagaacgatggcctgtagttctctgattgagtcaggattgtggtcgaggaatgcggtgaagcggcagatgagtcatcaggaacgaaattctgtgcgagcggcttacatccataaagcggagcatctgggggagcgcaggttgatgttacagtggtgggcggattatctggatagaaatcgtgaaagtagggttagcccattcgactttggtaaccatttattcagttaa

SEQ ID NO: 277577 - DNA, 762 bp, Morganella morganii
atgaaccatgagcagttagttcagtatggattcaagtttggaaaaaatggacctcatgcagcgcgttgcatgatgatcgaagaattgaagatattgctccaggcacggcctgagaacaccttacaagaagaatatagggtaagcattgtggatgacaatattcttcataaacccagttctagtgccaggaaactaacttatcggcacatggttggtctttatgggatgtctccgcacatacctttgttcaaattttttcgtcaattttgggagctatctgaagaagctcagcctctactcgcactgcaattggctattgcaagagatccactacttcgagaatctgttggggtcattacggcacttaagcctggacaaatcttaccaagaagcgttatggaagaacatctagcaaaagacgatccagatcgatttagtcaggcatcacttcagtcatttgctcgaaacattagtggcacgtggactcaatcaggttatctttcgggtaaggttaaaaaacaacgtactgacccaaaggtaacgtatgtgaacgtggtctttgctctacttcttgggcactttcaggggctttcaggtaaacgtttgtttgatagcttttggatgaaaatattaccagttgatgaaacaactttgtacgagcttgcatatagagcaactttgcgcggcttgattaatttcaaacaagccagtgaggtcgttgaagtgtcttttgcacctctgaatctcttagttaaggaataa

SEQ ID NO: 277578 - DNA, 543 bp, Morganella morganii
atgtctgacagattgtcaaaattactgaaaattttttccagtcacatcagtgtgccatggggtaacaatatctcagctgaagagaaagctatctttgtcgtatatgacaaagaagatgagcttaagcttcgtgctcgcatgactgaatttgagcatgcatgtatcgaaagcgagcacccatggctgttgttggacttgaccaatgagttcccctactggatggccagacaggactacaaagaggcttatttcgaagatcctgagtatctggaaggaagttatgactattttgctgaagagcttgtgtcgaaactccatgagcagattaatgcgcaccaaacacctgaatctgtagtggctcttatgggatgtgggaccatgttcggctttgtatcagtctccgctttagttaaatctttaacgactcaagtacagggacgcttggtggtatttttccccggagaatatcatgagaataactacaaattgctcgatgccaaagatggttggggatatcaagccactgctatcaccatagcttaa

SEQ ID NO: 277579 - DNA, 3474 bp, Morganella morganii
atgctaaaccgcgaaatttataaacttgaccctctggaaagcaaattggccaacaacggtgtggccgaggtaaaagatgatctctccaaaggggctcttgaaacattagattatgagctgcggacgtttgtctgtagcggagcttatgccaaaggaatggctgatattcttagcaactacttacgaaacgttaaaagttctggtgaacaacctgcagtttggatttcaggctttttcggttctgggaaatcgcatctagctaaaatgctcagaaccctttgggtgaatcagaaaatggagagcggagcagaagctcgctcattggttgagttacccgatgatgtacgtcaatattttgacgaactttcaacattgggaagtcgactgggaggacttcatgccgcgtcaggaactttgggggcgggagcagaagacaaagttcgattagccttgttggcgatcattttcaaatcagctgggttgtctgagcaatatcatcttgcccaatttgaactttggttaagatctgaaggggtgcttgagcaagtaaaagcttacatccaacagcatgccaaaggtaaagaaggcgaagacctttggaagaaagaactgcgcaatctccatgtttcaccagtcatggcgaatgcgctgttacatactttaccatctcttggaagtgatgctaaagaagtacgagatatgctgcgtgcgcaatataaaattgttgatgatgtatcaaatacggaaatggttcagtcgattgttgatgcattgtcaaatgaaggtgaaatgcccttaactttggttattcttgacgaggttcagcagtatatcgctgatgatcccgatcgtgctcatcttgtgcaagagaccgttgaaacatgctgtaaagctggtgcacttaagtcgaaattacttttcgtcgccacagggcaaagtgccttatccgggttgcaaaacctgcaacgccttatggggcgtttccagatttctgttcagcttgaggatactgatgtcgatgcagtaatccggaaagttattcttcagaagaaagaaactgccagagctgagatcgaatccgtggtacatcataatctcggtgagattaatcgtcatatgagtggttctgttattgaagctcataaagacgatgaaaaatggatggttgcagactatccgttactgccagtgcgtcgtcgtttctgggagcgagtcctacctgcactggataaaaccggaaccggatctcaactacgaaatcagctacgtgtagtgcatgaggctacaaaatctacggcacttaaaccgttgggttctgttgtccctgccgattttatctatgaacaaattgcaatcaacttgctacaaacgggtgttattggcaaagagatctacgaaaagatagctcgcttcaaggctggggacgaagatgacgtcctccagggtagagtgctttcgttgatactgctcattagtaaactaccaacagatatcaatcacggtattgcctcaacggaagctttcctcgctgatttgctcttggaacatttaagtgatggtaagcatgaactgagagcaaaactgccacatttaattcaacaactggttgatgacggcgacttattgccaatgaatactagtgcaggtgttgaatacaggttgcaaacgcttgaaagccagcagtggcatgatactttcaaacaacaacaaaatgatctacgcggtaacccacagcgtttagaaacgttccgcagcctcgaaataaaaaaccgtgttaacactgctctagggtttggtagcgttaatcaaggggtcagtaacgaaccccgtaagatcaccgtgtgtttcgaacaggatcttcctgctgatgctaaaaaaaatctctatgctcatgtacttgaatgtaaagaaaaagctttcgaggatgcagtgcgtagtgcgaaccctgatgacgctactattttcattcatgttccatccattcgccgtaatgagctactgagtgcaattgtcgattttaaagcggcggaaacaactctggaagtgagtgggataccctctacggatgcgggtaaagacgctcgcgctgcaatggagcaccggaagtatgaagctgagcgcaccaagaaactgatccttatagagattattgagggtatccaggtacaaatggctggtgggagcgaagtacctggcgacacgctagttgagcagttccagaatgcaggtaagaaagcatgtgaacggctctatacagagtttaagcaagcagatcaaaaaggttgggataaggtatttgagcgtgcaagtaaattcgctgatgccaatgctctggaagctgtaggccataatgatgaagtggaaaagcaccctgtctgtgtcgccattaaacgctatatcggtgttgcaaaaactgggggagagatacgagaaaactttatgtctgctcctttcggctggccgaaagataccgttgacggcgctctttttaccatgttggctgctggtgtattgaaagcaagcgattctcaggaaaaatcagtcgatgcgaaaagtttggagcgcagcaaagtctctcaaaccaactttcggcctgaaaccgttagcttgacgccgcgacagttggcgggcattagaagtttgatccatgcgattggtttgaactgtaccaatggtgaagaacaatctaaattaagagatgcgatagaaactgctaagcaattggctcgtaaagcgggaggcgacgctccactaccattaccaccaaaagcagaattacttgttgaagttgagagactttctggtaatgaacagctaatggctgccttcgaacgacatcgcgatattatcgatgaagtggagcgttggaaagggcttgctgaaaaagtgttcgtcagacaagctcgctggggcgaactaaaatcggcgcttaagtattgccaaaatttagttggttttgacgagctcatgaacgaggtgcgtgcgattgagcaaaaccgaagtctgttagccgatcctgatccagtacagccgttgctgaagctggtaattgaaagaattcgcgttgcgattttgaaaaagtacgaagattttcaaactgaatataacgagtgtctaaaggaattgcatgaagatgcaatctggagccagctttctacagagcagcaggagcaattgctgacaaagcatcatctggacaacctggaaatgtcaccattatctgataacgacagagtactcgactgtattgaaaatacctcgttagaacagtggagtgataaagcctctgctttggcaggccgttttagccgtatgcggcaggatgcggttgatatgttggtgcctaaagcaaaaatcgtacttttaccaaaatcagtcattgaaacagaggctgagctcgattcatggttggcaaaagttcgacaagaagtgatgtccgctttagctgaaaatcgtcctgcatcgttgaaataa

SEQ ID NO: 277580 - DNA, 3474 bp, Morganella morganii
atgcgacagtcactggataaaacgcttagaaatcagctggaaaaagttgttgtcaaggcccgagaactgatagaaaaagcagcatcagaagcattaatacgtttaggggtagaaacggcggaagttccggcatacctaaatgataatgagcgaaaactgcgtaatcgcctgcgtgcccatgcccgtcagttgggggacaaactgcaggctaatggtgtgcagagtattgaacacctgcgagcagaagtcagttatgaacactggcatcgtatgttgtttgcccgctttttggagcaaaacaatttgctgatgctggataaatatcttgctgtcacgctggcagactgccaggaatatgcccaagaagaaggctgtaaagatggctgggagctggccggtaagctggcgcagataatgctgcctcaggtgtttagggtcgattcccccgtatttgagttgcaaattcctgtcgaccgcattcgcgagttagaggaactggttctgacactccctggcgcggtgtttgaggcccaggatagcctggggtggtgttaccagttctggcaaagcaaacgaaaaaaggaagtaaatgctgcgggcattccgattggtgcggatgagttaagtccggtcacccagttattcactgagccctatatggtgagcttcctgctggataacagcctgggtgcttggtgggcgaaaaaacagctgacggatgcagatttgcgctcggcaagtgatgagaaaaccttgcgccaggctgctgctatagagggcattccgctggaatatctgcgttttgttaaaaccagcgatgagcagggcgagttgtggcaagccgccggcggctggtttgatggctggccgcaggaaatcggtgcgctgaaaacgctggacccgtgctgtggttcagggcattttctggtggccctgttcttgatgctggtgccaatgcgtatgcagcttgaaggacttgatgcgaaagccgctgtagataaggtaatagctgataatctttatggccttgaacttgacagccgttgtgtggagattgcagcttttgcactggcgctggaagcttggcgctatccggaaactggcggttatcgtagtctgccagccctgaatattgcctgctccgggctggatgtcagcgcaaccactcagggatggcagacccttgctaaacacaatccggatatcagcgaggcacttagttggtttacccgaaccttcaaagatgccccagtgctgggcagcttaattgacgtcaatacggcttattacgaagggaaaactgaaggcaaagccccaccttggcagattctcctggatgagaaagttgcaaccgacgatgaagcaaaaacagccgaggtgacagcccaggggctggcagtagcagctaaattgctgtctggaagttataatcttgtggcgacaaacgtgccttatctggcccgtggtaagcagtgcgacaccttacaaaatttttgtgaaaactattttccggaagcaaaagcagatttggcaacagtgttcctagaacggtgtgtggattttagcccagccggtggcacatcgaccatcgtcttaccgcagaactggcttttcctgactagttatactgattttcgtaagaaattgctgactgaagatacttggaacttagtcgcgcgcctgggagcgggagcgtttgaaactatttctggtgaggttgtgcaggcaattttggttgttctaaatagagggccagcacccctgggaaatatgctacatggaattgatgtttctgaactaaaagcaactgcaaagaaagcggaacaacttttggttcagcagtttagaagtgttttacaggctgagcagttggaaaaacctgatgcaaggatatctttaaattctaaatccagcggtgccttagttaataattatgcagatacagcaactggtatgcaatcctttgatcgcccaagatttatacattacttttgggaaatgagtgttttttcagatggttgggaaccatgtcaatccactgttcgcacaacctcccatatgggcgggtgtgagtatgctgttctatgggaaaatggtcaaggacagttatacaaaatgatggagcaaaagcgagtattagaaaattataccagcgctatctggaaggccggctctcaatactggggatcaaagggagtaatggtaagtctaatgggaaatttacctgttagcttatatctaggaagaccctatgatcaaaatgcaggtttaattaaacctgataatgaagactcgttgttgtcactatgggcttattgttcatcgggtgagtatagttcttccgttcgtgaagttgaccaagcattaaaagttacaaatgcgactctaggaaaaatagaatttgatcacgaattatggcttagtgttgctaaggtaaaatatcccaatggacttccaaaaatctatacaagtgatccaacacagtggatttaccatggacatccttgcggttccgtcatctgggacgaagagaaaaaatggacagtgattgcggataagcgtaccgatgaaaccgtgctacaagttgcggttgctcgcctgttaggataccgatggccagcagagctggatgacgaaatggagctggctgatgagatgcttcactggcttggtaaatccgatgatttgctgagattagtggatgatgacggtattgtctgcctgccagcacttcgtggtgaaagagccgcggcttctcgcctcgaagctatgctgcaggctgcctacgaagaggactggtcatccagtgttctcagtgatttgcttgccagtgttggtagtaaaagccttgaaacctggctgcgggataaattctttgaacaacattgcaaactcttccagcaccgcccgtttatctggcaaatctgggatggtcttaaagatgggttctcagtactggtcaactaccataaactcaattaccagggtttggaacgcttgatttatacctatcttggggactggatccgtactcaggagcacggtttcaaagaaggcattgatggtgcagaaagtcgtttgatggcggctaaaaacctcaaagactcgctggaagccatccttaaaggagatgccatcaccggcaagagtggtctcgacatttttgtgcgctggaaaccgttacacgaacagcctatgggctggaacccggacttaaatgatggtgtgcgccttaatattcgtccgtttatgcaggcaccagatgtggataagaagggggccggtgttttacgcactaagcccaatattaagtggggtaaagaccgcggcaacgacgttgaatcggccccctggtattatctgggcctgcagtatggtgaaaaagagggggcgcgtatcaatgaccaccatatcagtcttgtagataaacaagctgccagagacgaatatgaaaataaggaaaatcacggatga

SEQ ID NO: 277581 - DNA, 1800 bp, Morganella morganii
atgattaaatcagtattcaactatccggtgtcaaccttgttggatattgaagccggggtggtgtatgccatcccacgctaccaacgggagtatacctggggtaaatggcaatgggatgctttgtttgaagatttgttagaaaacgaccttaattactacttggggtcgattatctgtatcaaccaaagtacagatacgctggctctgcagcagttagagttggtggatggccaacagagaatgaccacattgtcattattgttagcggccatttatgcaagctacaaccagttgggcattaaactcgagatggagcagcagatagagctgtataacctgaagcataaattggtgctaaaaaagaatgtggaccagccccggttagtacctcaggtgcaaaatgccaaccagcaggattacctggcggtgttgaaagaggcaggtattcttaaagaggctgagtgggtttccaatgcaggtaatcgtcgggtatttcgtacctatcgacattttttaatgcgcattgaacagtatgtccgtgagagcgagaccccattgcaggcgctgaatgcgctacttgataaagtcaatgcatctactctggtaaaaatagaggtggcaagccattcagatgcttataccctgtttgagtcacttaacaatcgcggggtgcctcttaccgcgattgatttaatgaaaaacaagctactggcgaagatcgaacagattgagccgggtagcattaataagtcttttatcagctggaccaaagtgatggaagctcttggggatgattatggggtacaagagcgttttttccgtcagtactacaatgctttcaagcctgagttaaaaggtatcgtcaatgtaccagtagcgacgaaatctaatcttattcaaattttcgaaaaattgattgctcatgatccgcatcaattcctacaaatgatgcgtagccattctaactggtatgcgcagattgtagggaattgcgaagttcgggatgaacctgaactaacaaaactgcttaaaagtctcgatagaattcaaggagctccttcttatctcttattgctaatgttgtttgccagacgacaaaacttagcgttgagcattgagcatattgaaaaagtggtcactttgctgctcaacttctttgtccgtaggaacactacagatgtgcctgctactcgggatttaaaccgcatatttatggagttaaacgaaatactgcgaagctgccacggtgagcaggtcgttagtgctattgctaataccctagggtctgtcagtacctctgatgagcatttccgccaagcgcttagtggtgctctatacgaagaaaatagctgggtttgccgctttatcctgtgtgctcttgaagaaagcatgatgaccaaggagagccaagtagacctatgggcagtggagggcaagcaatatgtgtggaccattgaacacgtttttccgcaaggaataaacatccctgattcttgggtagatatgatagcggatggtgataaaacgttggcggagcaatatcgtcaaagccatgtacataaacttggtaacttgactatttcggggtacaacagttctttagggaataagtgttttttggaaaaacgcgatcgtacgacccgggataaacgacctgtaggctacaacaatggtttgtatctaaatcaggagctggctgttactgagacttggtcaatagcgcaaattgagcaaagaacagccgcgatggtagataaggtcctgactctgtttagtttaccgggtgtcgtcgggagataa

SEQ ID NO: 277582 - DNA, 2037 bp, Morganella morganii
atgcaagtaattgataaattgatagagcagctacgaggtagtgcaaattttaatcctgcggtgcaggaggccccagtagcggtgctatggacagacgaagcctgccaatggcaaagtgccatgccattgattaaacaatttattcctgagctgctcgaacttggtgattatcaaccagagcagcggactggtccggctatttggttgaagtgtgccattgctggggtgctggaagatgttatgttacctgaaggtcgaacaccaattatctatcttcccaaaattgggcgaaaagcgttgcgcgctatcgaagattgcccggactatttacgtcctttagcagaattacaatatcgtgggtgttggtgggcctataatacggcaggacgtgattggagtataagttcttttctgacaaacccacgcgttgggcttgaattagacgtagcaaaagataaaaacacattagaaattatcccccaaatcttgaaggatcttttagaatcccgtattgaagacctacaaggaaagcggttagaggctaaagattttcaatcattagtatttaatgatcctattaaagatctacttgggtggctgaataatcccgaagataagcgtaagcagtgggacgacaataaatggtcgcttttcagtaatacttgctcaagtcagtttggttatgaaccaacagatgctaattattctcaaatgctcgcatcccttttatctgcccagggggcgtggcaagaagtgtggcagcgctttgaagataccgcacataacctatcaggattaatccttgtccttcgtgatgtaacccctgatttagctgctgatttaagtcattatcctattgaaaatactcgcgatgaaaaaagccttgccgatgcgcttgctggccttcctcaacttgatgtaaacaaagttagaggaactatctgttcactatatcaacagaataaagagcgcgaaagctggctttggtatcgattaggggaatctaaatacctcgagattttggcccatctggcaaaagtcgctgaattgacccagcaagtgttcaatcatcagtcaccggaagagatggcagagctatatcaggagtgcttctggcaagtcgatgctgcagcgttgcaggccatggcattggcaaaagaaccgggccaacaggaattagttgcaaatgtattaaaactaatatattccccttggttgaacgaggtatcgcttaacttccaacagttggttaaaagaaaaggatatcccgggaatactgaaattaaggaagcgacagctacttaccaggttaaagggatggtagtgttttttgtagatggtttgcgttttgattgcgctaaagtattagagcgtaagcttactgcgcgtcatttgattgtagataccaaaacacaatggagtgctctgccatctttaactgatacagcgaaagctgcggttactcctgttgctgcacttttgaacggtgcttatgacactcaggattttaagccttcagtagtggcaacgggtagtgagtttagtagctatcaattaaaaaaagcattggcacaacaggggtggcaatacctggaaggattggatactggtgagcctaatggcttagcgtggctacaaacaggtgacctggataacctgggacatcagcagcaaagaaaattacctcttggtattgatgatgttcttgaagaaatagctgatagggttagctatttgtttgaagcaggatggaagcaaatccgtattgtcacggatcatggttggttatggcttccagatcaattacctaaagcagatcttgaaaaaccattagttcgtaagtacttatcaagatgtgctattctcaaggataatgccagtacgaatttgcctcaggtagagtggtattggaattcctcagtgtcacttgccatggctccaggcatcagtgcatttactgcgggagattactacaatcatggtggcctaagtttgcaagaatgcctgacacctgtaattaaagttactaaggactag

SEQ ID NO: 277583 - DNA, 195 bp, Morganella morganii
atgatattggtcgatgctattttttctgtctataaatacattgatatcacagtgatttttatcgcctccctgttcattctctggctttcatccatctcacctgaccggcttttacgtattatattgtttctgttatcactcctgttaatcacaccctatatttttatggctgcttatgtgggatgtttacattag

SEQ ID NO: 277584 - DNA, 342 bp, Morganella morganii
atgcctgtaaccaatccggatattctgaagctccgtttattaggcgatatgtatgatgacagctatttcccggaccatctggtgaagcagggagaggagattcttctgcgtctgtgtgaggtgctggaaaacaatccgccggacgacctggcggcgctgtatgtgctgacacagcaggcgacagaggaatttaatgatttgcaggatgcgtttgatgaagcaggcagtgagattgaaaccgttgcccgggattctatcggcgaatccttttacctgattgcccgtgcatacggctttgaggatgcggacccggaggagcttatcgcaacgcgggactggtaa

SEQ ID NO: 277585 - DNA, 2214 bp, Morganella morganii
atgcgcatccgctctctctgtcttctgacaccctgcctgaccctgttaatcacaccggatgtcctggcggcaacttctgccgattccggcgaaccgattgtggtctctgcttcgcgcagctaccggacagtttctgaaatggcccagaccacctgggtaattgataatgcggatatcgcgcagcaggcggaaggcggcaaagagctgaaagatatcctggcgcagctgatcccggggatgagtgtcagcggccaggggcggacaaactacggcatgaatatgcgcgggcgctctatgattgtgatggtggacggtgtgcgcctgaattcatcacgcagtgacagccgccagctggattcgattgatccattcaatatcaatcatattgaagtgatttccggtgcgacctccctgtacggtggcggcagcagcggtggtctgattaatatcgtgaccaaaaaaggtcaggaagaaaaacaggttgaggttcagatcggcggcaaaagcgggttccgcaacggttcggatcatgatgaaaacgtggctgccgcagtcagcggtggtaatgatcaggcttacggacgcttatctgtggcttatcagcgttacggcggctggtatgacggcaaaggccgcgaaatcctgatcgataacacccagaccgggcttcagtattctgaccgcctggatgtgatgggctccggaacactgacgattgatgatcatcagtcgctggagctgatggcgcagtattacaacagtgaatctgacggtaaacacgggatcgatctgggcaaagactttgcggcggtgctgggaaaaggcaccgcgcataacagcgacaaactggattctgaccggatccccggcaccaaacgccatatggtgaacctgcagtacagcaacagtgatctgctgggacaggatctggtggcgcaggcgtattaccgtgacgaaacccagaccttctatccgttcccggcgctgggcggtaaaaagccggattatgtggtcagcagcatcagcgcatcagagcagaaaactgatttctacggcggtaaagtcacctttaacagcaagccgctggataacctgacactgacgtacggcgcggatgccgagcatgaaaaattcagtgccaaccagaagttctttaatctgcagaaagcgaaggaaagcaacggactgacactggattccgcctacaataccgggcgttatccgggctataccaccaccacgatggcggcgtttctgcaaagcagttatgacatcaacccgctggtgaccctgagcggcggtatgcgttatcagtacacgaaaaacaaagtggatgattttgtcggttatcagcagcaacagctgattgcggaaggtaaagccacttcagcggatgcggtaccgggcggggaaacggattacaacaacctgttatttaatgccggggtgctgctcaacctgagcgatacacaacagacttggtttaatttctcccagggctttgaaatcccggatatcgccaaattctacggtaccggcacttacggttcgccggtcagtggtcattatccgctgctcaacagtgtgaacatcaatgatacgcgggtcaaaggtatcaaagtcaactccttcgaactgggctggcgttacaccggggacagcctgcaaacccagctggcggcgtactattcactgtctgacagcagctacgacatcaataagaaagatatgactatcttcctgaaagatgacaaacgccggatctacggtgtggaaggggcggcggattacgcgatcgcagatactgactggcgtgtcgggactaatttcaacctgatcaaatccgagaccaaagcgggcgatcagtgggaaaaatggagcgtgaagtttgccagtccgtcaaaagtcaccgcgtatgtggcctgggagccgtcagactggacactgcgtctgcaaagccagcaatccttcagcctgaccgatgcggacggggagaaactggacggatataacaccgtcgatttcctcggcagctatcagttaccggtcggtaaagtcagctttgcggtcgaaaatctgctggataaagattacaccaccgtgtggggacagcgcgcacctatcctgtacagcccggcgtacggcgcaccggacttatacagctataaaggtcgcggccgcacatttgcactgaattacctggtgacattctga

SEQ ID NO: 277586 - DNA, 864 bp, Morganella morganii
atgaccaagatcctccgttatctcactgtgctgaccactctccttttatttgtgctgcctgcacaggcaacactgtacagctatattacccgctctgaaggtaaaccggcagatatcgattattactaccggattactgcctggactccgccgccggcgggcagcgtgcatccttgtgtgaaagtcggtctgacaaaaaaatgctacgccaatattaatcaccgccacacaaacgcagaccggggtggggtatcctcccgtaataacagcgaatttgaggggcgctgccggaatatgaacctgatgacactgccggatgccacagctgtttataactatatttataataactgtttcggcggactgccgtttgaggggcagaccaatcacaaaggtgacgctatccgtaacgaatgtgtgaccctctttttaaccagcagcccgaccggtggtaacggttatatgtatccggattctgtctgtggcgtagctcccccgccgggcggaatttgcagttttacggctgactatccgagcgccattctcgatcatggccggataccggataatgaaattaacggcaatcaggccagtcagtatctgagaatgaaatgcagcaaagatgccactgtccggatctactccgtgagtgatacggaatcccggctgagactgaaaaacaatctctacagcagactgacactgaacggctatccgctgaactcatccggcggtggtgtaccggtttatgtacgcggggattatgaagcaaacgcactgctgaaaagcacactggaaaccaccgggccggtggaagccgggccttttatcggtaatatatccattgttatgaccattgactga

SEQ ID NO: 277587 - DNA, 624 bp, Morganella morganii
atgaagggggggaataactacctttcactgagcggaacctatattcaggataacgttcttacggtatccggccagtcacgcggcggctttaccctgacccgtgaaggcgcggcattccaccgcagcggcaacagtatggcaccgcgcattctggtggataccagcggaacatcagatattgatgtgcgcggtaccggcaaagcagtacggaccaacgccttcgggaaagcgattatcccgaccgcgacggcctactcacgcggccagctgtctcttgatctcgatgccatgccggataatgccgaagccctgacatccgtgcagcaggcaacactgacctccggtgcgatcggttaccggaaatttaatgttgtcgaaggctataaaatcatgggtattattgctatgaatgataatactcatccgccattcggcgcctctgtcatgaatgacaaaaatgcggagatcggcattgtggccgataacggatcggcttatctgaccgggatacaaccgggccagaagctgactgtagcctggaacggacagacacaatgtactgtccggatcccggaaataaaggatgataacgttcagtttaatatgctgctgccatgccggtaa

SEQ ID NO: 277588 - DNA, 477 bp, Morganella morganii
atgaataatacaatgacatcatccgtaccggatctggtgacagtggcgcctgccacacagaatgattatgcgggctggctgccgcactggctggcctatcaggaattttataaagtcagctttccggaagaggtcacgctgaccagctggtcacgtttctttgatgaaaaagaaccgatgttctgtgccgtggcgcggatgaacggcaaagtcaccgggttcgtgcattatctctatcaccgctccacctgggcggaaaaagagttttgttacctggaagacctgtatgtggatccgtctgtgcgcggccagcatatcggcaaacagctgattgagtttgtacagcagcaggcgctggcacgtccgtgcggccgtctctactggcacacccataaagataatacccgtggccagcgtctgtatgactgggtggcaaataaatccggtgctatcgaatatattatgccgctgaaatga

SEQ ID NO: 277589 - DNA, 330 bp, Morganella morganii
atgtttgaactttcagtgattaaagcagcagaaaaagagatcatgaagctacccgcaggacttaaagctgagatgctgaccgggcttgaaaccctgcgtaaatacggtgcatttctaaaagaaccggttgtccgtgaccttcatcgtgacgggctgaaggagctgaggatccgttctcatgaagggtgtgccagaggggttttctttttttaccggggaaaccatataattattgtgcatgtctttcagaaaaaaacgcagaaaacaccaaagcaggtgctagagttagcacatgagagaatgaaagaagtgataaggaggctgaaatga

SEQ ID NO: 277590 - DNA, 318 bp, Morganella morganii
atgagtcgtaatgatgattatgatctagtcccttttgaagagctgaaaaatacattacttaaagatcctgaagtcattgatgcactggatgaaattcaggcacgaaaagtattgctggatacattaaaagcagcgagaaaagcccggaaaattacccaggctgaagtggctgaaaaaatggcgacgcaaaaacagaatatttcccgcctggaaaaaggggactatgacccgcaactgggaacattgattcgttatgcagacgccattggcggacgattatcttttgattttctgcctgtaatttcggagtctgtctga

SEQ ID NO: 277591 - DNA, 429 bp, Morganella morganii
atggcagctgatgctgaaaatcataaattattcacagaagcctgccggaaaaatcttgatacctatcagtccttatatgacgattcatcaaaaagtttatatgcccgcgttgatctgatttataactttgtctgtaaccaggaattaaaaaattaccgggccagttttaccggcgaacttcacgcaccgatgtatcgttacgacaattcaaagaataatacggaatatgattttgtccggaataaaatccggggcggactggatgaaaccagtaatgagatcaataacctgatctatgaacaaatgattgaaattctctacaaacccgcatatatgggtgaatcaaggcaccccggtaatattatgctgtcactggacagtgtcagaagagaaatggcaccggaactggtgctgaaactggttaaatag

SEQ ID NO: 277592 - DNA, 2433 bp, Morganella morganii
atggctggtgtaaacaaaacgaatatgagtgaaacggatattatcagcaaatttatccttcccgcagttaaggatgccggctgggatgatttgactcagattcgtcaggaagtgaaactgcgtgatggtaagatagtggtccgcggaaagctggcatcacgtatcaaagtgaaatctgccgatatcgtactgtatcacaagcctaacctgccattggcggttatcgaagccaaagccaataagcacgccatcagtaaagggatgcagcagggactggattatgccggactgcttgatgtaccctttgtgtttgcttctaacggtgatgggtttatcttccatgataaaaccaatccgcagcagctcgaatcagaaattacgcttgatgctttcccggcaccagagctgctctggcaaaaatattgcgactggaaagggtttactcagcaacagttgcccgttatcagtcaggattattacgatgacggcagcgggaaatcgccccgttactatcagatgcgggcaattaaccggacgatagatgccgtatcagcgggaaagaatcgtattttgctggttatggcaaccggcacgggcaaaacctataccgcgttccagataatctggcggctgtggaaagccagaaacaagaaacgtattctgtttcttgcagaccgcaacattctggtcgatcagactaaaaataatgattttcaacctttcggcactgtgatgaccaaagtcaccggccgtactatcgatcctgcttatgaagtacatcttgcattgtatcaggccattaccggaccggaagagaatcagaaagcctataaacaggttgctccggatttttttgacctgattgtgattgacgaatgtcaccgtggcagtgcgtctgaagattccgcctggcgggagattctggagtatttcggcagcgccactcagattggcctgacagcaacaccaaaagaaacagaagacgtctccaatatcgattattttggtgaaccggtttacacctattcactgaaagagggaattgaagacggtttcctcgccccttacaaagtcgtgcgtgttgatatcgatgtcgatgttcagggctggcggccggttaaaggtcagctggataaatacggcaaagagattgaagaccgtatatacaatctgaaggattttgaccgcacgctggttattgatgagcgtactatgctggtggcgaagactatcaccgattacctgaaacgtaccaacccgatggataaaaccattgttttctgtaacgatattgatcatgcagagcggatgcgtcatgcgctggtggtgcttaatcctgagcaggtattgaagaacgaaaaatacgtgatgaaaattaccggtgacgatgatatcggcaaagcacagctggataactttattaatccgaaaaagccttatccggtgatagcaaccacctcagaattgatgagtacgggcgtcgatgcgcagacctgcaagctggtcgtgctggatcaaaatattcagtccatgaccaaatttaagcaaatcatcgggcgcggtacgcgtatcaacgaaaagtacggtaagttgtggttcaccattctcgactttaaaaaagcaaccgaactgtttgcggatgagcgctttgacggcgtgccggaaaaagtgctggtggtcagacccggtgacatttccgatcaggattcggattttaacgagcaacttgatgcggaaaatgatgataataccgccggtgaagcgcgggaagataccgctgactatcaggttaaccgcgacaggtctgaaggctgtggtgaattccatagtgatgatgatgacgacaaagtccgtaagttctatgtgaatggcgtgcatgtaaaagtgctggctaaacgagttcagtattatgattctgacggtaaactggtgactgaatccttccgtgattacacccgcaaaacaatgctgaaagacagtgagtacgcttcactggatggctttatgcgtaaatggaagaatgctccgcgcaaacaggtcatcattgaagaactggagcaactggggattttatgggatgtactggccgaagaggtgggtaaagatctcgacccgtttgatttgctctgccatgtggtgtacggtcagccgccgttaacgcgtcaggagcgtgcagcaaatgtgcgcaaacgtaactattttacgaagtatgccgaaccggctcagcaggtacttaatactctgctggacaaatatgctgatgaaggtgtgcaggaaattgaggacgttctggtgctcaaactgaaaccgtttgatgcgctgggccgtccgggagagatcatcagagccggctttggtaacaaagcagcgtatgagcaggccgtcaacgaactggaaaacgaaatctaccggttaccgccacgattagcctga

SEQ ID NO: 277593 - DNA, 1434 bp, Morganella morganii
atgcgtaaagatgccggtgttgacggtgatgcccagcgtttggggcaactgtcatggctgttgttcctgaaaattttcgatacccaggaagaagagctggaactggagctggatgattatcagttcccgatcccgaagcgctatttatggcgcagctgggcagcagacagtgagggtattaccggtgatgagttactggagtttgtgaacgacgatctttttccggggcttaaaaacctcatcgcgccgatcgataaaaatccgcgtggctttgttgtcagacaggcgttcagcgatgcctataactatatgaaaaatggcacactgctgcgccaggtgattaacaagctcaatgaaattgatttcggcagcagccgggaacggcatctgtttggcgatatttacgaacagatcctgcgtgacctgcaaagtgcaggaaatgcaggtgaattctatactccacgcgccgtgacgcgctttatggtcaatcgtattgatccgaagctgggtgagtcaattatggacccggcgtgcggtaccggcggtttcctcgcctgtgcgtttgaccatgtgaaagagcattacgtcaataccaccgaagaccacaaaatactgcaaaaacagatctgcggcgtagagaaaaagcagcttccgcatttgctgtgtaccaccaacatgctgctgcacggcattgaagtaccggtacaaatccgccatgacaacacactcaataagccgctttcttcctgggatgagcagattgatgtgattgttaccaacccgccgtttggcggtaccgaagaagacggtatcgagaaaaacttcccggcagagatgcagacccgtgaaaccgctgatctgtttctgcaactgattatcgaagtgctggcagacaaaggccgcgcagcagtggtattaccggatggctcgctgtttggcgaaggcgtgaaaaccaagattaaaaaactgctcactgaggagtgcaatctgcacaccatcgtgcggttgccaaacggcgtgtttaacccgtacaccggtatcaaaactaatattctgtttttcaccaaaggtcagccaaccaaagaggtgtggttctatgagcacccgtacccggacggcgtgaagaactacagtaaaaccaaaccgatgaagtttgaagagtttcaggctgagatcgattggtggggaaatgaagccgacggttttgccgcccgcaaagagaaccatcaggcgtggaaagtcagcatcaacgacattatcgcccgcaacttcaacctcgacattaaaaacccctatcagggcgaaaccatcagccacgatccggacgaattgctggcgcagtaccagaaacagcaggtggatatcagcaaactgcgtaaccagttgcgcgatattcttggtgctgcactggcaggcaataaggacgctgactga

SEQ ID NO: 277594 - DNA, 1752 bp, Morganella morganii
atgaccgttgagaagctgatctctgaccatatcgatatctggtcttctgccctgcaaacccgctccgcagccggccgtggcagcaatggcaaaatcgatctctatggtattaagaaactgcgtgagctgattctggaactggcggtacgcggaaaactggtgccgcaggacccaaatgatgaaccggcgtcggagctgttaaaacgtattgcggctgagaaagcggagctggtaaaacaggggaaaattaaaaagcaaaaactacttcctgagattagcgaagatgagaagccttttgagttgccggcggggtgggagtggtcttcaattcaaaatctatgtctgcttgagaatggtgatagaagtaagaattatcccaataaatccactcttactgagactggtattcctttcgttaatgcaggacatttattgaatggaaaaatagatgaaaaagaaatgacttttattaagaaaagtcattttgaaactttgcgttcaggaaaatttttgcccggtgacattttgttttgcttacgaggttctctggggaaatctgcattagtcgaaaatgtctctggtgctattgcgtcttcgttagtcatagtgcgagtctatccgctggttaataacaaatatgttcatttttattttgatagccctgtttcttatcaattcataaaaaagtatgacaacggtactgcacagccgaatcttgcagcaaatgatttggctcggtttttgattcctgttccaccagttgatgaacaaattagaattcttgtcaaaattgataacttaatgtccctttgcgatcaactggaacagcagtcgctgagcagtctggatgcacatcagcaactggtagaaactctgctggcaacgctgaccgacagccaagataccaaagagctttctgacaactgggcgcgaatcagccagtattttggcacgctgtttaccaccgaagccagtatcgatgcgcttaagcaaaccatcctgcaattagcggtaatgggtaaacttgtgccgcaggatcctgatgacgaacctgcttctgagctgcttaaacgtattgagcaagagaaagcggagttggtaaaacaagggaaaattaaaaaacaaaaaccgttgccgccagtgagtgatgaggaaaagccatttgaattgccggtggggtgggagtgggtccgacttggaacaatcactaacactcggttaggtaaaatgttagataaagcaaaaaacaaaggtcagcttaaaaaatatcttagaaatacaaacattcagtgggattatatttcacttgaagatattaatgagatgcgatttgaggagcatgaacttgaagaatttctattaagaaaaggtgatttgttaatatgtgaaggtggcgagccggggcgttgtgctgtatggaatcatgagggtgaatattattttcaaaaagcactccatagattaagaacatttttaaatatgtctcctcacttttttgcaatgactttgaaaattggagcattgaatggaacactggatagtctatttactggggttactatcaaacatcttcctggcgataaactccagcaatatgtagttccattaatgcctttgaaagaacaagtgaaagtcctggctaagacttatgagctacttgagctttgcgacaccctcaaatcccgtctgcagtccgcccaacaaaccaggctccatctggcggatgcactcactgacgcagcattaaactaa

SEQ ID NO: 277595 - DNA, 1101 bp, Morganella morganii
atgccggttcatcatgcaatctggcggataggggaaaatccccagccgctaaccatcagcaaactcgccagtgagcagttgctggagaagatgattttaaatgacccgaccattctctccgaccagtggatgattatcggccatcaggaaaataccctcgataagggccgtattgatctgctggcgattgcgccggacgcatcactggtcctgattgaacttaaacgtgatcgtacgccgcgtgaagtggtcgcacaggcactggactacgcctcctgggtggatgatcttactgctgaccgtctgtcgcagatttatgaaaaattctctggtggcggcaatctgggtgatgcattcagactgcgtttcaatgctgagctggaggaagaatcgcttaatcagtcacatcaaatcattattgtggcggcagagctggacccgtccaccgagcgtattgtggattatctgagtaaaaatggtatctcaatcaacgtcctgttctttaaggtttttcagcatggagaagagcaatttttaagccgtgcctggcttatcgatccgagtgaaacgcaaactaatgcggcacaggccaccgccacaagtgcgaatgcaaaagagccctggaatggtgagttttatgtctcgtttggcgacccgcaaagccgggtctgggaagaggctcgtcgttacggatttatcagtgcgggcggcggaagctggtacagccagacgctgaaacaacttcagccgggggaccgggtgtgggtaaaaatcccggcgacgggttatgtcggcgttggtattgtgcagagcgccgttgagcctgccggtagctttactatcactacggaagagggtgaaaagctggcgatggatgtactcaggtacaaggaactttatcagcggaatgcagatgatcctgataaatctgagtattttgtccctgtcaaatggctggaaacccgcagtgaacaagaggcggtaaatgaagtcggattcttcggtaaccaaaataccgtttgtaaacccacggcaccgaaatggcgccatactgtcgaaaaattaaaacgctattttaaaaactggaatgtgaaggagtaa

SEQ ID NO: 277596 - DNA, 438 bp, Morganella morganii
atgactacagcagaatcaggacagttaaaggtcttgcaaaaactaatgagccttggtgctataaatgtttccgtctgcaaagaaggccgcagaacgtttatcaaatttgactctccaaatgacaaaaaatataaagtaacaaccagagctaaaatgtcaggtacgtggcaaacatcaatcaactatgccaataagtgtgtacctgataaaaacgacgatgaattctggatatttatcgatatcagaaaagagcctgccactttctatatcacaccattgtcatggatacagaatgatatttatgaggctcattcagattatttagataaacataacggaaggcgggctattaatgataactcgactcatcatgctatttcggtaaaacgaatttctgaatggaaagatgcatgggcacaattaggttttaatgtttaa

SEQ ID NO: 277597 - DNA, 1035 bp, Morganella morganii
atgagtgataatcttcctgaggcaccacagggcgaatttattctgttccgcagtgaagatggtcagacccgcgttgaatgccgttttgaatctgatacgctgtggttatctcaggcatcaattgctgaattgtatggaaaagatgtccgtacagttaatgagcaccttgtgaatattttctctgagggagaacttgctcaaaacgcaaccatccggaaattccggatagttcgattagagggaaatcgtcaggtttccagggagatagaccactatagcttacctgccattctcgctgtcggttaccgcgtccgctccgttcgcggcacacagtttcgccagtgggcaacgcaaacactggaacagtatctgatcaaagggtttgtgatggatgatgagcggctgaagaatccgcctgtcggtcagtctgtggtgcctgattactttgatgagatgctcgaacgcatccgtgatatccgcgccagtgagcggcgggtgtatttacgggtaaaagagattttcacgctggcggcagactacgaaccttcaaataaagaaaccacgcgtttcttccaatccattcaaaataaactgcattttgcctgtaccggcatgaccgccgctgagcttatcgccagtcgtgcagatgccaatcaaccggatatgggattaacaaactataaagccggtgaagtccgtaaaactgatgtgacgattgcgaaaaactatctgcgtgaaaatgagctcaaagaattaaaccgcatcgtcaatatgtggctcgactttgccgaagaccaggcgttgcgccgtaagcaggttttcttacaggattgggatactaaactggatcagtttttaaatttcaatgaccgcaacgtattgcagggcgctggtgggatcagtaagaaagcagctgatgaaaaagccaaagacgtatttgatatatttgaccggaaacgccgccggttaaaagagtcagaaggggcgagagcgaatatcgcggcactgagagatttgctgaaaaaagggaagtag

SEQ ID NO: 277598 - DNA, 981 bp, Morganella morganii
gtgaaaaacagcaaacgtatcctcagcactgttatcggcgcggtatttgctctcagcgctacccaggctttcgccgccaccacgctgaaactcagccataaccagaaccgtgatcatgctgttcacaaagccatgacacagtttgcggatgacgtaaaaaccaaaacaaacggtgacgtccgcatccgtatctacccggacgcgcaattgggcaaccagcgtgaatccatggaattaatgcagaacggtgcactggatatcgtcaaatccaatgctgctgaactggaagctttctcaccggcttactccgtctttaacctgccttacctgttccgtgataaaccacactacgaaaaaattatctacggtgatatcggacaggagatcctcgactccagcaaagacagcgggtttgtcggtctgacttactatgatgcgggcgcgcgcagcttctatgccaagaaacctatccgcacaccggacgatctgaaaggtctgaaaatccgcgtacagccgagcccgacggctatctcaatggtaaaagcactcggcggtaacccgaccccgctggcttacggtgaactctataccgccttacagcagggcgtggtggatgcggcagaaaacaatatcccgtcctatacactgagccgtcacagcgaagtcaccaagttcttctctctggatgagcatacaatggtgccggatgtgctggtgatgtcgaccaaatcactggataagctgacaccggaacagcaggaaattgtgaagcaggcagccaaagactccgcacagacaatggcgaaactctgggaagcctcagagaaagaagaacgtgcgaaagttgagaagcagggtgttgaatttatcaccgttgataaagtcaccttccaggatgcggtaaaaccgatgtatgacgatattgccaagtccaaccctgagttatccaaaatggcagatcgtatccgcgacgtgaaataa

SEQ ID NO: 277599 - DNA, 504 bp, Morganella morganii
atgaaaaaccttgtagcgctgattaataaagggcttgctgtttttactatctgtttatcagcattcctggtgttctgtgtgacatggcaggtgttatcccgctatatcctcagctccccgagtaccattactgatgaactcgcccgttacctttttatgtgggtcgccatgattggtgcggcttacaccacaggacaacaccggcacctcgcgattgatcttctcgttatgaaactgtcaggtgcaagaaagcagtttgtcagtttatttatccagattgccattattgcctttgcaggcattgtgctggtgtacggcggcagcacactggtctcttccacactggaaagcggtcagatcaccccggcactgggctggcagatgggttacatctatctctgtttaccaatcagcggcttactgatgattatgtatgcactggttgatatcttttcactctttcagccgggttcagcaaatactgaactgactgacagccattaa

SEQ ID NO: 277600 - DNA, 1311 bp, Morganella morganii
atggattggtatgtgattgccgcgctcttcggcacctttgcgtttctgctggttctcagtgttccggtttccttcgctatcggcctgtcatcgttagtggcgatagccatgacgctgccgctcgactccgcgattactgttgtcgcccagcgtatggcggcaggggtggataacttctcgctgctggcgatcccgttctttattctcgccggtaacattatgaaccagggcggtatcgctgcccggctgattaatgtggcaaaagtgatcggcggtcgtctgccgggctcactgctgcacgtgaatatcatggcgaacatgctgtttggtgcgatttccggttctgcagtggcttctgcggctgcggtcggcggcaccatgtccccgatgcagaaaaaagaggggtatgacccggaactgtccgctgcagtgaatattgcgtcctgcccgtcaggcctgctgatcccgccgagcaacacgctgattgtttactcgctggtttccggtggtacgtcgattgccgcactgttcctggccgggtatattccgggcatcctgatggggctgtctctgatgatcgtttccgggattatcgcgaaaaaacgcggttatccggttgcaccgcgcccgacatggaatgagtttttctcaaccgtctggaaagctgttccgtcactgatgctgatcgtggtgattatgggcgggattatcgccggtatctttaccgcgacagaagcatccgcgattgccgtgatctacagctttgttctggccgtgattatttatcgtgaagtcagtttcagccgcctgccgaaaattattctggaatcggcagtgacaacttctatcgtgctgctcctgatcggtgcctccatggggatgtcatgggcgatggcgaacgcggatctgccgtatctgattgctgacggtctgatggcgatttccgataacgcgctgactatcctgctggtcattaacatcatcctgctgattgtcggtatctttatggatatgacgccggcggtgctgattttcaccccgattttcctgcctgtcgccatggatatggggattgacccggtacacttcgggatcatcatgacattcaacctggctatcggtatctgtaccccgccggtcggcagcgcactgtttgtcgggtgttccgtgggcggcgtcagtattgataaagtcctgaaaccactggtgccgatgtatatcgcactgattgcggcgctggcggtggtgacctatttccctcagctcagcctgtggctgcctgagttagtcctgaactatacaccatcgtaa

SEQ ID NO: 277601 - DNA, 771 bp, Morganella morganii
atggcaacgcttttttggcagcagagcggacggggttcgcgcgatcttgtgctgttacacggctggggactgaacagcgaagtatggaacagcattgaattgcggctcgcaccgcatttccgtattcacaaggttgatttaccgggttacgggcgcagtcaggaatttggtgaaatgtcactgacggagatgtcggatactgttttcgcgcagatgccggaaaatgcggtgctggcgggctggtcactgggcgggctggtggctgcggatattgcactgcgttatccgcaggcagtgagccatctggtgacaatctgttcatcgccgtgttttggtgcacaggaagaggaaggctggccggggatcaaaccgacggtgctgagcggctttcagcatcagctggcgaccgattttcagcgtactgttgagcgttttctggcactgcagacactgggaaccgcaagtgcccgtcaggatgcccgtacactgaaatcagtggtactgggacagccgatgccgggtgtgtcagtactgaatgccgggctggagattctgagaaccgccgatctgcgcagcggactgccgtccctgacaatgccgttcctgcggatctatggttatctcgatggcctggtgccgcgtaaagtcgcgtcactgctggatgagcaactgccgtcctctccatccgttattatgcgtaacagcgctcacgcaccgtttatttcacatccggatgagttttgtgaggtactgacggagtttgttaaataa

SEQ ID NO: 277602 - DNA, 2319 bp, Morganella morganii
atgaaagcactcaccctgggactcatcggtaatcccaattcagggaagaccacgctgtttaaccagttaaccggatccaaacaacgcgtcggcaactgggccggtgtaactgtggaacggaaaatcggttatttcaccacgccggaacacaagattgagctggtggatttacccggcacctattcactgaccaccatctctgaacaaacatccttagacgaacagattgcctgccactttatcctcagcggtgaagcggacatgctgattaacgttgtcgacgcatccaatctcgagcgtaacctgtatctgacgctgcagctgctggaactgggtgttccctgcattattgccctcaatatgctggatatcgccgataaagcgaatatcaatattgatgtcaaagcgctgtcagaacgcctcggctgcccggtgatcccactggtttccacccgcgcgtccggtatctgtgagctgaaagccgcgatcgacaaacacacaatgacacctcatgaagtgctggtgaactatccggctgcgctgctcgacagcatgaacactctcgcacagtcgattcctgcggaagagttcagcgccacacagcgccgctggctggcactgcaaagcctggagggggatatctacagccaggcacgcgccggtttcaccccggagcatgtgcagtctgtccgtgacgcgatgcaggcacagcagcaggaagagccggaactggtgattgcggatgcccgttaccagaccatcgcggatatctgcgaaacaaccattgataacagccattccgagccgaataaactgaccgcagcgatggacaaaattgtcctcaaccgctggctgggcgtgccggtattcctgtttgtgatgtatctgatgttcgtgctcgccatcaatatcggcggggcattgcagccgctgtttgaaggcggttcggaagccattttcattaacgggacacaatggctggggatgacgctcggcttcccggactggctgaccattttcctcgcccagggggtcggcggcggtatcaacaccgtgctgccgctggtaccgcaaatcgggatgatgtacctgttcctctctttcctggaagattccggttatatggcccgcgcggcatttgtgatggacagactgatgcaggcactcggactgccgggtaaatccttcgtgccgctgattgtcggtttcggctgtaacgtgccgtccattatgggtgccagaaccctggatgcaccgcgtgaacgtcttatcaccgtcctgatggcaccgtttatgtcctgcggcgcgcggctggctatcttcgcggttttcgcggctgccttcttcggcaaaaacggcgcgagcatcgtgttctccctgtatatcctcgggattgtggtggctatccttaccggtctgctgctcaaacacactattatgcgcggcgaagcatcaccgtttgtgatggaactgccggtgtaccacgtaccgcatatgaaaaccctgtttatgcagacctggcagcgcctgaaaggctttgtggtgcgtgcgggtaaagtcattattgtcgccagtatggtaatcggcgcactgaacagcttcagtttctccggtaaaccggcggacagcattaatgattccgcactggcctcagtcagtaaagtggtcactccgctgctcagcccgattggtgtcaccaatgataactggcaggcgactgtcggcctgatcaccggtgcgatggcaaaagaagttgtggtcgggacactgaataccctctacaccgctgaaagtatcaccaacgaaccgtttgatccggaatcctttgatttatgggatgaactgggtgatgcggtaaatgaaaccctggattccctggcggaaaccttcacgctcgcggcattatccaacccgattgaagccagcaaaggcgacggcgagatggacggcggtaccatgggcaccatggccgcgaaattcggctctgatgttgctgcttacagctatctgatctttgtgctgctgtatgtgccgtgtgtctctgtgatgggggctatcgcccgtgaaaccagccgcggctggatgaccttctccatcctgtggggtctgaacgtggcttactcactggccgccctgttctaccaggccgccacattcagtacccatccggggagcagttcagtgattatcgctgtagtggtgattttcaacctgatcctgtttgcactgctgcgccgcacacgcagccgggtgaatctcagcttccgccgtgatgcacacagccgctgtggcggctgctccggcaacgagtgtcactga

SEQ ID NO: 277603 - DNA, 261 bp, Morganella morganii
atgggtttattcagccggttttttaacagcggaggcggatccggtcacgggaaccgcagcggcggccactgcagcagcggtcatggcagcaaacatggtaatacgggttacaataagcatggccgtgacaataatggttatccggagcagttaaacaacaatactccgcagaatatcagcggatattgtcagaagtgcggtaccggttacccgccggacagccgcttctgcggccggtgcggtaatgcactcaacccgtaa

SEQ ID NO: 277604 - DNA, 489 bp, Morganella morganii
atggcaattcggttttcaggcagatttgaagaatttcttcatggcagtttttatgttcatctctatcgcttctctgtcgatgggtttgattttgtggttatttttagtccggtcgacattactgatgcggcatattcggcgttccggagtgcagaggcggggttcaggcttccggaacgatgctatgacctgaagtttgatcgcgaagataattttttaaactcaacgttctatcaggtaccggaaagaggaatgtgttcgcggcgttatggatttgttcaggatctggctgttgccctgcaacgaattgtgattctgcattgtcagcaatatgctgcgaaggtttattttatgattgcagagaatgataagttaaaacgctactatgacagaattttacagcacggacatgataacgtactatcagaaataaaagtgggccttggtgaaggggggaaagggtatgtactcaaaacgcgacatttctga

SEQ ID NO: 277605 - DNA, 207 bp, Morganella morganii
atgccattcatcaatatccgcatcaccaaagaaggtgcgaccgcagaacaaaagcaaaaactgattgaaggtgccacacaattacttgttgatgtactgggaaaaaacccggcttcaacctttgtgattattgatgaggtggaaacagacaactggggtgtcggcggacagagtgtgacgaaactgcgcgctgacgcgaagaaataa

SEQ ID NO: 277606 - DNA, 1029 bp, Morganella morganii
atgccggcgcggaatttatcagccctgctgcaggatgttcagccggacggttttgccacggcattctgtttcaccggcgaagggtgtgaattaccggacggtgcggcacacggcggactgagcaaaaacgacagcacgccggtcaccccggataccccggtgcggatcgccagtaataccaaaacgtttaccgcggcggcagtgctgcgcctgtatgaacagcagaagctcagtctcagttcaccggtcgcgccgctgctctccccgcagtatgtccgctggctgacagaggcgggttatgatctgaatgccatcacggtgcagcatctgctcagtcacagcagcgggctgtatgatcatgccgatgagaagtatatccgtgatgtgctcgcggatcccggccatctctggacacgggatgagcagatccgcctgtatgtcagccggggctatccgctgatgaaaccgggcctctgtttcctctattccgataccgggtatctgctgctgggcgatattattgagcggatcacacaactgccgctggcacaggcggtccggcagttgctgcgctttgatgcaccgggcatggaatccgcttactgggaactggaagagcctgcgccggcgggtcttccgccccgggcacatcagtatctcggcaatattgacggggagaccatcagtccgaccatggatctctggggcggcggcgggttgattatgtcggtaaacgccctggcggtgtttatggcaaatctgtttgagggccgtatttttgacaagccggacacccttgaaaccatgctgaaaccgggcagccatgacggtgcggaagattaccgctgcggggtgatggtgacagagcgggacggccagacactctggtatcatttgggattctggggaaccgcagcttactatcactcgcagaaaaaaatcgcggcggcgggctttgtgaataacagggacacccggccgtggctgatgaatctgctggaaagcagcttgtgtcaggacgatgaatag

SEQ ID NO: 277607 - DNA, 1092 bp, Morganella morganii
atgccaaaaatagtaaagctgtccgttatcagcagtgcccttttcctcgctcagttcgcctctgcaacggatattaccgttaatcctgtatcatcagagaggactcaggtcatccgtcaggggaacaccaccaccatcaatatcgctccggcaaacatacacggtgtttcttataatgcctatgatcagtttaacgtcggcaagcatggtgtggtatttaataaccgcgaatccggtgcaggtatgattattaacgaggtgctttcaaccgaaaaatcacaactgcgcggcaatatgcatgtggatggccaaaaagcccatctcattatcgctaacccgaacggtattgtctgtaacggatgcagcgtgaccggtgtgaacagtttaaatctggctgccggtaatgtcagtatgacaccggacgggcagttttccggttaccggaatatcagcggaaaagtccgtatgctgaataccgcagaacaacattttgcagataccgataaactcacattagttgccgcagctattgatatgaaaaacagtcagctgaaaaccaaaaatctggcaacgtatatcggtcattatgatctggcaaaaacaaacagcggtcttcgtgatttggaaatgatcaatccggattactctttggaaaacagaaaaaataccaataactttctgaatattaaaacgaacagccatatcaaagcagataatatgtatatccattctgctgccgcacaaatacggaatacaggacagataactatcgggccggaattacaactgactgacccggaaaaaacgccgatgtacggtcataaccagctgacaatggatttgcatcattccggatttgaaaacaaatcatccggtaaaataaatacattactgatgaacaccattatgagtaacagcagcattgaaaataacggtcagatgaaaacaaactaccgtaatcctaaaagcccggtcagcgatttcactctgatttttgacggtaccaattatatcggcggaaaacaggatattgggctgaataaaacggatatccggaaaactgaaggcgcattattactgccgttggagtaa

SEQ ID NO: 277608 - DNA, 279 bp, Morganella morganii
atgagtgatacaaaacgtccgccgcacgatcacagccgctttatccgctgcctcggctgggtggcaacctttacggcattttgtatgtatgtctcctatattccacagattatggataatctggcgggacataaaacgtcaccgctgcagccgctggctgccgcatttaactgtacactttgggtgatttacggccttaaagtgaaagatctgccggttgcggtcgccaatgcccccggtgtcctgttcgggctggcggcgatgctgactgcattatag

SEQ ID NO: 277609 - DNA, 336 bp, Morganella morganii
atgtcatattacaaagatgtcactaaagaaatcgccgtaaacatgcaggaactgggtaaatttatcccggatgttatgaccgctttctcagagctggtcagcagcagctcggcggatggtgtattagataaaaaaacaaaagaactgatttttatcgcggttgcggtggcaaaccgttgtgatggttgtattggttttcataccaaaaaattggttgatgcgggggtaacggagcaggagctggcggaagcactgggtgtggctgttgctatgggtggcggtccgtctgtgatgtacgcggcaaatacgattaaggcatttaaagagttctcataa

SEQ ID NO: 277610 - DNA, 396 bp, Morganella morganii
atgcttcaaattcggttacatggtgcgccatgtaatgtccggctggataatggcaaggttatgtcaggcaaaaaagcagcagatcatctggcaaaaacaattaaagccacaggaaattcaccaattaattttgttagttgctacggggctgcaggaggcgcgatttcgaatgcacagatgctggctaataaaacaggttgcccggttaaaggatacacaaaaaaaatctcaccggtacaggcgggtaataacagtcatgcaggaaaaagccgggtattccacccgcaaagccctctgaaagcgaaagtttgcggcatcactaaccagacagcaggttcattgatacaacccggtatgcatgcttacaattttctgagaacacatttgcatccctga

SEQ ID NO: 277611 - DNA, 1353 bp, Morganella morganii
atgctaagcctgtttaaacctgcaccgcacattcagaggctcagtgctgatcgcattgatccggtataccgccgtctgcgctggcaaatttttataggtatcttttttggctatgctgcctattatctggtccggaaaaatttcgccctcgccttccccagcctgatggagcagggattttccaaaggcgaactggggacggcattgtctgcgatctccattgcttatggtctttccaaatttatcatgggatcgttttctgaccgggctaacccgcgctattttctcccgaccgggcttatccttgcctcggctgtcatgcttatcatgggcttttgcgactgggcaacctcttccgtctggattatggctattctgctgtttctctgcggatggttccaggggatgggctggcctccgtgcggacgtactatggtgcactggtggtcacagaaagagcgcggcggaattgtatcaatctggaactgtgcccataacgtcggcggcggcttaccgccgatgctgatgctgctggggatgtattggttcggtgactggaaagcggcgttttacatgccggcatttgcggccattctggtggcactcatcgcatttgccctgatgcgggataccccgcaatcctgcggcttaccgccaatcgaagagtacaaaaacgactatcctgatgactatacagagaacagtgaagttgaactgacggcaaaacagatcttcatgcaatacattctgccgaataagttactgtggtatatcgctgttgctaacgtctttgtttatctgctgcgttacggcgtgctcgactggtcaccgacctatctccgggaagtcaaacatttcgatataacaggctattctgtcgcctatttcctgtatgagtgggcggggatcccgggtacgctgctgtgcggctggatgtcagataaagtctttaaaggaaaccgcggcgcaaccggggtgttctttatgacgctggtgacgattgccaccgtggtcttctggctcaacccggcgggtaacccgtctgttgatatggcgtgtatgatcaccatcggcttcctgatttacggtccggtcatgcttatcggcctgcatgccctggaactggcaccgaaaaaagcagccggtaccgccgccggattcaccggattattcggctatctcggcggttctgtggcagcaagtgcaatcgtcggctttactgttgattatttcggctgggatggcggttttggtgtcatgattggcggcagtgtgctcgctgtgatcctgttagttgtggtgatgcgtggtgagaaaaaacaccacgatgaaatcgcccgcaataaagcctaa

SEQ ID NO: 277612 - DNA, 1083 bp, Morganella morganii
atgaatatatcccgtcagttttatcttgtcagtgcccttgcgggtgccatgatctgcggctctgccgcttttgcggcagacaataagattgtgattgcacatcgcggtgccagcggctatctgccggagcataccctgccggccaaagcgatggcatatgcacagggtgctgattatctggaacaagatctggtgatgaccaaagatgatgagctcatcgtcctgcatgatcattaccttgaccgtgttaccgatgtggcaaaacgctttccggatcgcgcacgtaaagatggccgttactacgccatcgattttaccctcgcggaaattaaatccctgaaatttaccgaggggtttgaaatcaaaaatggtaaagccgtacaaaaatatccgggtcgttttccgatgggaaaatcagatttccgtattcatacctttcaggaagaacttgagttcattcagggtctgaaccattccaccggaagaaataccgggatttaccccgaaatcaaagcgccgtggttccaccgtcaggaaggtaaagatatcacccgtaaaaccctggaagtgctgaaaacctacggctaccagactaaagattccggggtatttcttcagtgtttcgatccgaatgaattaaagcgcatcaaaaatgagctgatgccggaaatgaagatggatttgatgctgatacagctgatcgcttacaccgactggcaggaaacatttgaacagaatgcggaaggcaaatgggtcaactataactacgactggatgatggctcccggtgcgatgagtaaaatcgcagcatatgctgatggtatcgggcctgattatcatatgcttatcagcaaggagtccaaaccgggtcacatcactctgacgccgatggcaaaagaggcacacgcttcgcaactgatgatccatccgtttactgtccgcgcggatgccttgccgccgtatgcggaaaacactgaacagttatttgatgctatttatattcaggccggagcagaagggttatttactgattttccggacaaaggcatacagtttctgcaaaaacataaactgcatcagtga

SEQ ID NO: 277613 - DNA, 327 bp, Morganella morganii
atgtggatcccggggctgctgggcgtgatgaatgtctggaccttactgatccctgctgcgctgtttttctttggtgccgggatgctgttcccgctggccaccacggcggccatggagccgttcccgtatctggcgggggctgcgggtgcgctggtgggcggattgcagaatgtgggctctggtgttgccacctggatttccgcactgatgccgcagggcggacagggcagtgtcggtctgctgatgctggcggtctctgtgattatggtgttgtgctggctgcctctggctcaccggttgcagaatcagcagccgatggcatcctga

SEQ ID NO: 277614 - DNA, 525 bp, Morganella morganii
atgaaccatatactaaaaactggatgtgttttattacctttcatctcagcgcctgtactggctggtgaatggcatgtctcatattttgaagatgaaatgcgcggaaccgcaaccaaagttcttgctcttccatctcaaaatcagcatgaatttaactttccgtatgctggcggttcaacaatgacactagtgctcagatcagataaaactacactcaaagacggacaaaaacccagtgatctaaaaatgtctgaggcaatggtatttatcgataaaggccaatttacctgccagtcatacaatcaatgttacgtttccgtcaaattcgatggtaacccggttgaaaaattcaatgttttaaaggctcaagatcatagctctgactcattctttattgaaaacagtaaaaaatttatcaagcaagtcaccaatagcaaaaaggctattattgaagcaaatttctataacgaaggtctggtgcagtttaaattcagtctaactgacatagataaagcaaaagaataa

SEQ ID NO: 277615 - DNA, 252 bp, Morganella morganii
atggcgtttaattgtccaaaatgcggcgccgcatcctggactcgcaccagcgagccggtaactgaagaaacgaaacgcagctatcaccagtgtcaaaatatactgtgtggctgtacttttactaccctgaccagcgtcgaacggtatttaacaaagccagccccgcagccactgccgacaggattccgcctgccggagaatgcgtttccgaaaagccactacggcgaaaatcaattagtattgccgatgtaa

SEQ ID NO: 277616 - DNA, 1125 bp, Morganella morganii
atgttcgaacaatattttgatccggaactggtaaagcaaccggcctttgatatcactatcggcggaaagcaggtgttaagcctgaacgggcgcatgatgggactgactctgacggacaaccggggctttgaggctgacacgctggaaatcaccattgatgatactgacgggaaaatagagctgccgccgcgcggggttgaggtcagtgtcgctatcggctggcgtggtgaaccactgacgcataaaggcatttttaccgtggatgaagtaagtcactccgggccgcctgaccagttaattgttacagcgcggtctgcggatttccggcaggacttcaacgttaagcgcgaatacagctggcacgatatcactgtcggtaaggtggtcagcgctatcgccggtcgctacaacctgacaccggcagtcagccgccagctgattgatattgaaatagaccacgctgaccagaccaatgagagcgatatcagctttctgtcacgcatggccgaaatgctgggcgccattgccactatcaaaaacgggaatctgctgtttatcatcccgaaccgggggctgtcagccagcggcaagccgataccggaaatcgtgatcacccgtgacagcggcgataagcacagcttccgcgtggctgaccgggacgcttacaccggcgtaaaggcgaactggctggatctcaacttcgggaaaaaaccggaaaccagcgtgaagcggaagaaacgtaaaagtaaaaagcccaaaaaagaaaagaaagaaaaatcaagcagtaaagagggtgaatatctggaaggggcagagggtaacgtttttgtgatgcgtcagacctttaaaaccgagacagcggcaaaacgggctgcggcggcaaagtggcttaaactgcaacgcggggcggcggagttttctatcacgctggcgcgtggccgggcagacctgtttccggaaatgcccgccacggtaagcggatttaaatcggtgattgataatcacaaatggattattgcccgggtggtgcatcagataggtgaggggggctttcagacacagcttgaattagagcttaaaattgataatgacaatatggtggatggtgataattcagacaactaa

SEQ ID NO: 277617 - DNA, 1191 bp, Morganella morganii
atgacttatcatcacggcgtggaagtcaaagagacaaccaaactcaccaccctgatccgcgatataaacacctctgtaatcggtgttgtctgcacgggtgatgatgctgatgcggaacagtttccgcttgatacccccgtacttgtaacccgtatccgatcagtgctcgggaaagcaggtaaaaccggcaccctgtataaaaccctgaaagccatttctgaccagtgcagcccgaaagtgattgttatccgcgtggcagatgcggccaatatccagcccaaagagggcgaggcggccaaaactcaggatcagcttgttatcggaggtaatggtgccgatggccgctataccggcctgtatgcgctgctgacggcaaaagacaagacagacgagcaaccgcgcatcctgatcgctccggaactcgacacaaagcctgtggcgctgcaaatggctgtttttgccgataagctgagcgcattcgcttatgtgtccgccaacggctgcaccacgattgccgaggcgaaggagtaccgcagtgatttcagtcagcgtgaagtgatggtgctttacccggactggatcggctacaacagcgaaaccggtaaaaatgaaattattcccgcgcctgcggtggctgccggattgcgtgcccgtatcgacgatgaacagggctggcacaaatcattatccaacgtgccggttaacggcgttctcggtatgtctgcggatgtgtactggtcactacaggacaaagacaccgatgcaaacgacctgaacgaaaaaggcattaccaccctgataaaaaatatggggttccgcttctggggtaaccggacatgtgacgaagagatttatgtctttgaagtctacacccgcaccgcgcaaatactggcagacatgatcgccaaagcccatttctcatacgttgataaaccgctcaccccgtctctgattaaagacattatcgacggcattcagaagaaaggggatcagctggttacccaggggcgcttactcggcttcagctgctggtatgaccctgccgacaacccgtcaacacagttacgtgatggtcacgcgatcatcaaatataaatatacgccggtgccgcctcttgagcgcctcggccttgagcagacctttaccgatgaatattttgcggtattcaatcagttaggttcaggagcgtaa

SEQ ID NO: 277618 - DNA, 513 bp, Morganella morganii
atgggaatgcctaaaaagctctttatgttcgacctgtttattaacggtcagacctaccttggacaagtagaagaggtgacgccacctaaactgacgatgaaaaccgaagattatcagggtggcggaatgctcggtgccgtggcggtcaatttcggctttgatgccggggcgctcgacatggacgttgcaatgggtggcttaaacattgaactcatcaaacagtggggcggtacgattgacagcctgcaattccgttttgccggttcctactatgacgatgccaccggagagacaaccgcgtatgagatccagacacgcggacgttttaacgaacttgaccaaggcacagcaaaagccggggataacacccagcataaatacacgctgaaaaatacctactgcaaaatcactgctgacggtcaggacattttcgagctggatttaatcaacatgaaatggctcgttgatggtgtggatcgcctggcagagcaccgcgccaatatcggccattag

SEQ ID NO: 277619 - DNA, 300 bp, Morganella morganii
atgtctattgttaaatttaaaagccctgtctctctgaaaaacggtaagacaattacagaaatcacgattactgaagccatgcgtcaggccggaaccctgcgcgggctgaagatgtgggaagtcgccaccggggatgtgaattcaatgatcaccctgctgccgcgcgtgacacagccgcgcctgtcggaacaggaaattaccgaaatgccggttgagtgtttttatcagctgattaacgaggtggcgctttttttagcaccgagtgccccggacgacgagaccctcgaaccggcagaataa

SEQ ID NO: 277620 - DNA, 2886 bp, Morganella morganii
atgacagatcgcaatctcagcattcgggtagcacttaacgccgtcaataactttacctcaccggtgagtgctgcacagcgcagcgccgccggtttcgcctctcagataaaagccactcagaacaacatcagaaatctggccggtcaggcggcaacgtttgaccggttatctcagtccgtcagacgcaataccacggcttacgaagaggcaaaggcaaaagttcaggctctgcgcgacagctacccggcattaaatcagcgcaccgaagaacaaaaacgcgcactggaacaggcacggcaggcgcgtgaccgccttggccgttctctcgacagtgaaaagcaaaaactacaggctgcggcggcgcagctgtaccggcacggtatatctgtccggaacagcgataacgccacagcacaaatcacccggcgcaccgaagcctataaccggcagcttgaggcacaacgccagcggctggcatccgttacccgggcacaggcgcagtacgaaaaagccaaacaactgagcggcaaaatggcaatgggcggtgcggcagccgctgctgccggtggcggtgctctgtatgccgcatcccgcgtcatggctcccggccgtgattttgatgaaggcatgtccggcgttcaggctctgacccgcctggataaaagcgatccgcgcctgaagatgctgcgtgaccaggcgcgggaactcggcgccagtaccgcatacacggcaaccgatgcggcatccggtcagaagtttctcgcaatggccggtttcacgccggaagccattaaagcggcactgcccggtattttaaacatgggtctggccggagatatggatctcggtgaggcttcagatatcggttcaaacgtcctgacacagttcaagatggatgctgaccagatgaaccgcgtctctgacgttctgaccgccacctttacccgcagtaacaccgatttacggatgctcggcgaaacgatgacttatgccgggcccgttgccgcacagctcggtgtcagtctggaaagtatggccgcgatggccggtacaatggccgataacgggatccgcggttcaatggcaggtacgtcactgcgcgccggtttatcccgccttgttgcccctgtcggcaaaggtcaaaaggcaatggagcagctcggcgtatcgatcagggattctaacggccaactacgggatgccggggatatcctgaaagatgtcggcaaggcgctgaagcaattcgaccaggcaagccagatccggattaaaaaggagatattcggcgaggaagcaatggtcggcatgggtgccgttatcgacgctaccgggaacggccgttatgacgaactcaaaaaagccaacgaaaacagcggcggcgaagcggataaaaacgccaaggtcaaaattgacaacctgaccggtgacttaaaacaactgcaatctgcctgggaagacctcggcattcagatgcaggaaagcgttgattccccgctgcggaatctgacgcaaggcattaccaaaatcgtcagtaatatcggcaactggatgaaagcacatcctgagctgacatccgcactgattaaagccggactaatcatcgccaccgtgaccgctgcactcggcacactggcggctggtgctgccgctgttatgctgccgtttgcggctatgcgcctgagcctttctctgttaaccggcggtcagggattgatgggggcggttggcgcattcggaaagctttttaacgtgataaaactcggtgcatcaatggcatctggtgccttttcgctgttaatgagccctgtcggtcttgtcgttgctgcagtagtcggcgctgcattactgatctacaaatactgggatcacgtaaaagcctttttcggcgggttctttgaaggcctgatgaccgcccttgccccgctcggtgaagcattcagcggcgttttcggcggtttggctatggtttttgatggtatctggtcggctatcagaaaagtatgggagtgtctcaccgatttatttgcgccgatcaaagcctcagatgaggcattacaggcctgtacgtctgccggtaaaatatttggtgaagcgcttggcattgctattcgtgccctgcttgcccctattgaactggtagctcgcggaataggctcaattcttgaactactcggcatggctcccactgccgccgaagatgccgtaaataaaatcaacaaaatgaagcccgttgaactctccgccgaggatgccgcgaagctgaaaggtcagggcgaaaaagtcatgagcctgctcacgcctaaatggaaactgccgaaaggtgccagtgactttatcgacggcgcgggtaaaaaggtttcagacgttgccgggaaagcgaaggagaaattaaccggcgcgtgggatgaagccattaaagaagcggagaaaaagaacaaacagaaggaagccacagaagccgcttacggctcacgggtgtatgacccgacagcgaaaaaagacaaagacggctccggcttcagcagcccggcagagaaagcggcgaaagacccgaataaactcggtgaaatcgtctttaaaaacttcccggcaataaaagcagtagacggactgtatcaggatccgtctgtgcgttctccgtctgcctttaagcgcgtaccgactccggatattgccgcgtcagacttcactccggcaaaaatggaaatgcagcgcccggcggcacggcaggacattaaacaggaaggcgataaaattgagctgcattttcacggcgtggatatggcaaacgcgaaaagtatcgcggcactggtacggcaggaactggaaaaactgaaacgctctcaggacagccgccgccggtcacaactcactgatatagggtaa

SEQ ID NO: 277621 - DNA, 444 bp, Morganella morganii
atgatgatgatttacggtatgtttgtttttatgctggaaaccataccttaccagaacttacagcgatcaatgagctggcgctatgccaaaaatgaccgtgtcggccgttccgcaagctggcagtatatcggggcgggtgaggataagattaccctgaacggtgtgctgctgccggaagtgaccggcggtgatatctcactggaacttctgcgcactgccgcctatcgcggacggccttaccctctgattgagggtaccggcatgatttacggtatgtacatcatggacggtctgaacgaaggccgggctgagttcttttcagacggtaaagccaggcggatagaattcagtatttccctggtgaaagccagtgaggatctgcgcgaacggctggccgagatggagttcagcgatttgatggatatgctgccggtgtcgttataa

SEQ ID NO: 277622 - DNA, 462 bp, Morganella morganii
atgagcggtaaaaccgccgtcaggccgggactgaaacgggcattaaaggccatacagccgggcgatacactggcagtgtggaaactggacaggctcgggcgcagtgtcaaaaacctgatagccctgatatctgatttgcacgaacgcggcgcacacttccggtcactgacggacagtatcgataccagtaccgctatgggacgttttttctttcacgtcatgtctgcgttggcagaaatggaacgcgagctgatagtggagcggacgctggccggattggccgcagcgagagcacagggcagagtcggcggacgaccggcggcactgacacagaatgaccgggagcaaatcggccgtctgctggataaaggatattcccggcagcagctggcaattatttatggcgtgggggtatcgactatttaccggtattttccggctgaaaggcagaagagaaaataa

SEQ ID NO: 277623 - DNA, 840 bp, Morganella morganii
atgaccgccattgttttccctcatgtttactgtaatgacgggattattacggatttatccggttatggctgcattcccggaaaccttggtttaccggaattgctggataagaaggctgatgctgatattttcacctcgtcaccaataacaaaaatattcaactcatcaaaaacccatttcatccagctatcaaacggcggatattttgaggttaaacgcgcctcagatgatgtggcaacattccagttcaatccgcaaggcataatgaccgccggggaaattccgataagctttgtgtccgggttcaatgaagtgttcattggctcgattggtcatttcccgttccgcgctacacagttgcctaagaaatggtatgcacttaatggcgaccgcttcagcgtaacatctgcacagggtaaggcattgaaagaactgcccgcagaaatgaagtcagactgggggataacggagtccggcgggatgataaacctgccaaatattaaacaatctgacgggcgtgtaccgtttttgcggcctatcaatggaacatcacgtttgccgggctcagtggagtctgattgccagcaggaaatgaccgggttcttcggcgggcgtgatatcaggggagctaacgggtggacaagtttcttttggggtgaaaatggcgtattcaggagcgtgaaaaaaacatctggtgcagggcaggctccgcaaacacagacagcggatgctggtgattggtctggtgtcgagtttaaagcatccaaccaggtaagaacgggtgatgaagttcgccctctcaatatcggcgtgactgtagcaatattcctcggagtttaa

SEQ ID NO: 277624 - DNA, 555 bp, Morganella morganii
atgaccataattaattactattttgacgacaatcacccgctgcggccatatttcagcgatgactatgcaaataaagactcctttgcccctgtcaatgcgttgcgcatcgcacctgaatttaaggccgggtttcatccgtgcgagcgtgacggtgcatggattatgattccggatcaccgtggcacaaaagtttatgacatcaccaccgcgcaagagtcagaaattaaagaactcggtgaattgccggacggtgtgacaactatcgcgccggatgtggattttccgaagtggaatggtaaaaagtgggtgacagataaagcagagaaaaatgccgctgacattgcggcggcagaggcacagaagcaatacctgatcgccgaagccagccagaaaacccaactctggcagactcagcttattctggggattatcacagacgaagatgaagccagcctcaaagaatggatgctgtacgtgcagcaggtgcaggcagtagatccatccctcggggctggtgttgtatggcctacaccaccggcttcaccggccagataa

SEQ ID NO: 277625 - DNA, 1275 bp, Morganella morganii
atgaaaaaaaatttaatttccctgcttatcatgctgcctttttcatatgcgaacgctgatgataacagcaactactattatgcaagaacacttgttgatttatctgaatataaaaaagttactgaagacgagattccggtattagtaccggaaaccagtactaaattatattttgtagaaaataattatcagccattgattacatctgaaattaaaaatgagtatgaccgcagtgcaggtatttctgaagttattcaaacatataattacttaaatgacaaaattaatcatacactgaacagtgttacggagatacagagtaattcccctgtttataatcagtcattatctcaaactattgatgaatttaatagtgacatgaaaaatatacaggatgctaatgaaaaacaggatactaagctggagaaactgggggcggcagccctgtctgctgaagttaaaatcaatgagataaatgagacaatatcaccggtattcaatgagatatctcagttaaaacaggatgcagacagtatcaaaatacagagtgaatctgtcattttatctgtgggtgaactgcatacggatatctcagccgttcagactgtgaataaagaacaggatgatcaactcgaagaacttcattcggaaaataaaaacataagaaataatatcaattctctgattgaacgagcgatccctgccgataatgcaatttatcagttaaaacaagatagtaagaagaatgagcaggaaattaataatctggaatcagctatcgaactgacagatgaagtgaatttttcacagggtaacgaaattcagcaacagggaaaaatgatctctgaactgaaagccgattcagacaagctgacaacagatttaaaagatgttcgcaaaaagagtaatacgacaaccaatgtggctaatgctaacagaagagatattgataaacatgcgaccaaaattgataaaaataccctcgatatcctgaagaaccgccaggatctgcgttcactggaaaatgatttacgtgaaaccaacgagcgccttgataacggtctggcggccagtgccgcactgaacggtctgttccagccgtacggtgtcggtaaactgaatatcactgcggcgatgggcggataccagtccactcaggcagtcgcagtgggaaccggttaccggttcaacgagaacatcgctgtgaagactggtgttgcatacaccggttcgaacgatgtgatgtacaacatggcttttaaccttgaatggtaa

SEQ ID NO: 277626 - DNA, 843 bp, Morganella morganii
atgtccgccacgctgtttattgctgtactgtttgctgccttcttccatgcatcctggaatgcggtgattaaattcggacaggatcgctttctgggtatcgcggtgatgaccatctggtccggcgtggtctctgttcccgccctgttttggctcggcttaccggatgcagcagcggtaaagtggctgctgctgtctgccctctttcacatcggttatgccatttgtctgagtaaagcgtattcaaagggcgatctcagccagatttacccggtttcccggggttgtgccccgctgctgacgaccctgtttgcggtacttctgtttggtgagcacctgccgtggctctctttagccggtattctgctgatcatcaccggggttatccttcccgcgctgaaacacggagcctccgggcacgcccgcagcgggctgatctatgcggtgatcaccgccttttttaccgcctgttacacactctccgacggcttcggtgcccgcagcagcacagactcactgacttatattttctggttgttcgccctgaacggactggtgatggtggtgatgggttttgcccgttaccgccaccatttcacccgtgactttctgcgttacagcaagcccgggctgaccggcggtattctgcaaatcttcagctacggcattgtgatatgggccatgggacaggcgccgataatgattgtcgcagcgttacgggagaccagtgtgctgttcgcactgctgctctccgcgtatttcctgaaagaaaagctgactcccgcccggattctggccgcctgtattattgtggccggggtgattgtgacgaagatggggggatag

SEQ ID NO: 277627 - DNA, 276 bp, Morganella morganii
atgaatactatcggatccgccattattcacgccggactggttgcagttcagccttcagtatctaccggatacagcgccggtgttgcgaaaagcatacccgtgacacaggtctgcaatacccgggccgagtttgcccggcaggagatgactgcacctgacgcggtaaaagtgaatgtgaagtcaggtgaaataaatctgctgatgctgaacacgctgtataacatcagggctgaaactatccccccatcttcgtcacaatcaccccggccacaataa

SEQ ID NO: 277628 - DNA, 543 bp, Morganella morganii
atgaaattagaaacagaacgtatgattctgcgcccgtgggcagaaaccgatgccgccgatttatatgaagtggcgaaagatgaccgcgtcggcccgattgccggctggccgccgcacagttgcgctgaggaaagtgccgatattatccgcaccgtttttaacctcgatgaggtctatgccactgaactgaaagcgaacggacgggctgtgggctgtatcgggatcctgatcggtgaaaacagcaactttgacatcagtcagcgggaaggggaaatcgcctactggattggtgtaccgtaccagggacagggtctgatcccggaagcggtcagggaagtgatgcgccatgcattcgaaaccctggagctggatgcactgtggtgcggctattttgaaaacaatgaacagtcacaccgcgcccaggccaaatgcgggttccgtcatcatcataccgaagagaataaattcaatcagttcctgaatgattaccggactgaacatatcagccgcattacgcgggaagagtggctggcacagcagtaa

SEQ ID NO: 277629 - DNA, 417 bp, Morganella morganii
atgaaacttgtcaagatcaacgatgatacaattctgacattgcctttgttcctggagcatgtccctgccgggttcccgtcaccagcggcggactatatcgaggaccgcataaacctgaacagcgaactgatccggcacccggaaagcacctatctactgcgggttgagggtagctcgatgattgatgctaatatctttgatggcgatgtggttatcgtggacagcgcggtaacagcggatgaaggtgatattgtgattgccagttttgatggtgagtttactgttaaaaaattgcagctgtcaccggtacctatgctgatcccgatgaatccggattatcagccaatcgcaatcagcagtgaacaggatttacagatcttcggtgtggtcacctacatcatccacagggcccggtaa

SEQ ID NO: 277630 - DNA, 285 bp, Morganella morganii
atgcttcgtatcaatgtactttttgacaggaaactcaaagacactttgccaactggtattttcgacgcactacgtggtgaaattaaaaatcgtattcctcaaaaatatcaggaatctgatatacgaatcgcctggggatcgaatactgctttttctgtagatggattaaagaaaggtgacaaaaaagaagatctggagacgcttatgcaggagatttgggaggatgacggttggatgccggaaatggaaggtacctatgatgatgtagattattttgataagtaa

SEQ ID NO: 277631 - DNA, 1461 bp, Morganella morganii
atgatttacacagacggaaccatagccattaacgccggttcaccgattgtgaccggtaccggcacacagtggaaaaagaacattcacggtgtggcccccggccagcttatcagcatcgagaacggcacagcaccagtcagtatgatgatccgcgcggtaaacagtgataccgaactagtgttgtcattcaatgtcccggtaacactcagcggcgcgaaatactccatcgccaccacggtaccggataccatttcggatgcggcccgcaccatgtcagcgaaccagggttatatcgtttattttctccaggcaatgcagcagtggatgacagacaccggtcaggtggaaattgagctaccgaacggccagaaagtgacgctggatagcatcaaggcactgaatgatgctttaagcaatctgtctcaaaaagttgatgatataaagatacccgaactgaaagacgcatcgataaatcagaaaggggttgtgcaactgactgagaaaattggcgactctgagactttggtaccacatcagaaggctgtgagagatggtatcaatgcgttaaattcaagtatcgggaaaggattatccatcaatgataatggatacactgagatttacccatcagacaaaaataagtcagggatttggcagagggtaagtgcattagtatttgatgtcctcaatggcggtgtaagtaaactttcagttaccagtgaagcggtaaaaatcggtggaacaattgatgttaagaccaatactcccggtaacgatcaatccaggattgaaataacatcaccggatggcagattcagcataggtttttgggcgtacaacgatggacgcacattagtttcgtgccgaaatacatcagggtggtctaacgtcagttttgcaaatgtcggaagtggcagcgccgcagtaatcggcgggaatatttatgtggatggcagtggttacctgaaaaaatcctccccgataattcttgtgtatccgggcggtacgtttgataccaatgacgaatccgagggcgcagaagtcagccgtaccggcaacggccaatatcacattaccggcattcttggttataactcagatggtgcctggggcgtaaacggtggtatctcagtaccgaaagataataacggccttgagttggtttacgtcgcggaccgcgttctggaggatggtagtatcatcatcgaaacctgtcaccgtcagcacgcgcatttaccggaacgtttccagaactggcggctgaaagaagttaccccggaaggtgggcgtgttttctatcaggacggtgaaccgtgtgacctgccggaatccacccgccttgatgtgcgcgtggaaatgccgcagggctcagtgtggaatgtgaagcagcgtgaactggctgaacagatggagcgtgaagcgcaggaagcagcagagcagggcgtagactcagatcaataa

SEQ ID NO: 277632 - DNA, 3573 bp, Morganella morganii
atgacacaaatcacaggccgcaaaggtggtggcggcagcccgcgcacacccgtcgaacagccggacgatttacagtccgttgccaaagcaaaattgctgatcgccctcggtgaaggggaatttgccggtgaactgaccgggaagaatatctttctggatggtacgccgctgctgaacgctgacgggtcggaaaactttcccggtgtggtgtgggaataccgccccggtacccaggcgcaaacctatattcaggggatgccggcggcggagaatgaaatcacggttggtaccaccgtgcagagcagcacaccgtgggcacatgcattcactaacccgcagttgtctgcggtccgcgtccgtctgaaatggccgtccctgttccggcaggaggataacggggatatggtcggtaacgaggtgaaatacgccattgatttgcagactgacggcggcggctggaaaaccgttgtggacggccgggttaaggggaaaactacctcaggttatgagcgcacccatcgtattgatcttcctcaatcggccacatcgtggacactgcgggtgcggaaaattactgaggatgccaacagtgccaaaatcggtgacaccatggtattacagagctacaccgaggtgatcgatgccaaactgaggtatccgcataccgcgctgttgtatatcgagtttgactcaaaacagtttaacggctctatcccgcaggtcacctgtgagccgaagatgcgtattatccgtgtaccgtcaaactatgacccggagcaccggacgtactccggcacctgggatggttcgtttaagtgggcatggaccaataaccccgcatggatattttacgatatcgtggtttccgatcgctttggcctcggcgaccgcatcaaaatgcagaatatcgataaatgggaactgtaccgtgttgcgcagtattgtgaccagccggtaccggacggcaaaggtggtagcggcactgagccgcgctatatctgtgatgtgtatgtgcaggatcgcaatgaagcctataccgtgctgcgggattttgcggccatcttccggggaatgacctactggggcggtaaccagattatcaccctggcggatatgccgcgtgatatcgattacagctataccaaagccaacgtactcgacgggaagttcacctattccggcagcagcagtaaggcccgttattcctccgcactggtgtcgtactcggatccgctgaacggttatgctgatgcgatggagccggtgtttgaaaacgaactggtttaccggttcggctttaatcagctggaaatgacggcgatcggctgtacccgccagtcagaggccaaccgcaaaggccgctggggcatcctcaccaacaacaaagaccgcgtggtgacattcggtgtggggctggacggtaacattccgcagccgggctatatcattgcggtggcagatgaaaacctgtccgggaaagtcaccgggggccgcgtcagtgcggtgaatggccggagtatcaccctcgaccgcaaaccggatgccgcgccgggtgacaggctgatgctgaacctgccgtccggtaaatcacaggcccgcaccatccagatggtcacggataacgttataaccgttaccacggaatacagcgaaacgccggagccggaatgtgtctgggtaacggaatcagacgagctgtacgcacagcagtatcgcgtggtgagcgtgactgagaatgatgacggtacgttcacgatatctgcggccatgcatgatccggacaaatacgaccggatagacaccggcgcggtactcgatgaacggccaatcagtattattccgcccggtaaccagttcccgccgaaggatatcactatcagctcttattctgtcgtgaaccaggggatcagcattgaaaccatgcaggttacctggtcaccggcggagaacgcgattgcctacgaggcgcagtggcggcgtgatgacggcaactggatcaatgtgccgcgtaatgccaccacttcatttgacgcgcccggggtctattcaggccgctatctggtgcgggtcagggcgataaatgcagcggaaatctccagcggatgggggtattcagaggaaacccggctgactggcaaggtgggtgatccgccgatgccgctgaacttccgggcatccacactggtattcgggatcaaactgaactgggagtttgggaaatttacggaagataccctgaaaaccgaaattcagtacagcaaaaccagtgacgggcaaaatctgttgctgctggccgatgtgccgtacccgtcccgctctcacgaactggccggtctggccgccggtaccgcgttttattttcgtgcccgcctggtagataaaaccggcaatcaatccccctggactgagtttgtgcgcggtgtggccgagttcgatgcatcaaccattattgatgaagtggctgccggactgggtgattcccaaatcatcaaagacctgcaatcacaggcggatgataacttcgaggccattatcaacaatgccaacaacgcttacggccagtggaattactggcagcgcgaaaccggcgcgatgaaagccgaaattatcgaagtccgcaactacacggtcacagaaacaacggcacttgcggagaaactggacgcggttaaggtgacggcagacgacagtttcgccatggcacaaaactccatccgcgcacagtgggatatggccgccggcgaagcatcagtggttcacgatatgaaagtccggatccattacaacggtgaggactattccgccggtatggttatcggggccgagctgaaaggcggggaggtgagcacgctgatcgggtttaatgcgcagcagtttgcattttataacccggtgaataaatcgatggacctgtttatgtacatgaagggcggacaggtgtttatccgggaggcttttctggatgaggcgtggataaagagcctgctggtgatagacaagcttcagtctgaaaactatgactctgccggtaaaaaaggattcctgattgatgccaaaaccgggaaagcagagtttaacgaagccgttattcgcggaacgttgtatgccgtagatggcgaattcaccgggaccgtctatgcacaaaggataatcggtgacgttgccgtagccggcacttaccctgcagcatctgccagttatatacacggtggtgccggagggtggactacagcaacatccgtgattacctataccggtggcatgccttacgacatagatatagtgatgccatcaatgttgtttgaagttgtcgatgacacaacaccaaccaccaggccggatatcagcgattatgtcgtcagtgtcagggtaaacggtgtggctaaaacagtatctatggtgcggatggatttatcggctatttgttcttcttctttcatcatccctgccggatggaaaaacgtgagaattgaagtcgaactaagcatcagacacagaagctatgcaaaaatatttatccgtgaatgtatggttatggcctgcaaacgaaactccgcatcattctacaaataa

SEQ ID NO: 277633 - DNA, 594 bp, Morganella morganii
atggtaaaaatagaacttggtggtgtgttaggcaaaacttttggcaaaacacatcagcgtttaataaggactacatcagaagctattcgggcgctatgttgcactatcactggttttgaacaatttctgaataccagtaaatcgcgcggactgacctttgcggtttttcgtggtaagaaaaacatcggtgaagatgatctcgggtttccggtaacaggtgatgttatcaggattatgcctgtcgttatcggcagcaaacgcggcggattatttcagaccattttcggtgcagtgttggtggctgcggctgtatttatgtcaggtggtataggtgctgcttttgcggctggtggtatgaccggttttatggccacaaccggtgcggctatgatgctgggcggcattatccagatgctgtccccacaaccaaacgggatcgccatgaaagaccagggcgaaaacaaaccgtcctatgcgttcggcgcaccgaccaacaccgtttctcagggctatccggtaccgatcggttacggtaaacgccgcatcggcggagccgttatctcagccggaatttacgtcgaagatcagcagtaa

SEQ ID NO: 277634 - DNA, 708 bp, Morganella morganii
atgcgtaaaaatatccaggcagccattttttcacatgctgaacgtgagtatccccgcgaatgctgcggggtgatcgcgcaaaaatcccgggtggtgaaatactttccctgccgcaatgtcgcggccacgccggaagagcacttcgtattatcaccggaggattacgccgctgctgaggattgggggacggtgaccggtattgtgcacagtcacccggatgccaccactcagccgtcagaactggataaagcacagtgtgatgccctcggtgtgccgtggtatatcgtcagctggccggagggggatctgcggactgttcagccacgcggtgagcagccattactcggtcggccgtttgtactcgggtttacggactgctgggggctggtcatgagctggttccggcaggaacactgcattgaactgcctgattaccgggtggattacccctggtgggaacagggggaaaaccgttatgcggacaactggcaggaggccggatttattcaggttgatgatccgcagcccggagatttgatagtgatgcaagtgcaggctccggtcgccaatcatgccggtattttattgcctgataacatgctcctgcatcacttatacggtcacctgagccagcgggttccgtatggcggttattggcgtgatcgcacagttatggtgctgagacataaattacacatgacaacgtga

SEQ ID NO: 277635 - DNA, 759 bp, Morganella morganii
atgattacaagcgattatcagaagctggaaccgggtaatgccgtccggctttttgaagttgatggttccgcgttcggcgcgccggatgttttgcggttccatgcttacaacattcctcacacagaagcagatattacggccgctggcggcgaccctgaaaagctcccggcaaaatccatctggtggcagggcgaagagtaccgtgcctggccggtgcagatcgagggactggaagcatcaacaaccggatcaggtgcacagccgaagttatcggtggcaaatctggacggttctgtcaccgcgctgtgtctggcatacgatgacatgctgaaagcgaaagtcacgatacatgacaccctggcacactatctggatgcggctaattttccggatggcaacccggcggcagatcctacccaggaaaaagtctcggtcttttatatcgacagcaaatcctcggaaaccaatgaggttatcgagtttgatttagccagcccgatggatttgcagggggtgttgatcccgacgcggcaactgcatgcaatgtgtacctggtgtatacgcggcaaatacaaatctggtgacggctgtgattatgccgggcagaacgggtatttcgataagcacggcaatcgtgtggatgatccggcacaggatcagtgcagcggcatgctgaacacaggttgcttcccccgcttcggcaaaaacaatccgatcccgtttggcggctttccgggaacatcactactgaggaaatag

SEQ ID NO: 277636 - DNA, 336 bp, Morganella morganii
atgatagaagtattcacctggagtccgcggctgaatccgcagagtgatatttcgttccgtcttcgcaaagcaaaattcggtgatggttacgagcaggtttgcggtgatggtattaacatccgcagccagaaatggtctcttaacttcaccgggacggaaagttatatccggccaatccgcgattttattgaccggcacggcggaatccgtgcctttcagtggaaaccgccactggaagatatcggattgtatcgctgtgatgatccgaagctcaccccgctcggcggcgacaactattcactctctctcacttttacccaggcatttaaaccatga

SEQ ID NO: 277637 - DNA, 3297 bp, Morganella morganii
atgtcaaaccttgcagatctgcgtgtcggcctgctgctgaacgatgccagtttccgttcaaatatcagcaacgcaatgaaccacgccgggcgtgaaacaaaacgcttttctgataaggcaaagcgggacgcaaaaggcgttgaagatagctttaacggtatcagtaaaagcgtcaccaatgtagccggtaagctggcactcctggccggcggtgggttatctatcggcagcattctgtctgtttcacggcagtacagccaggcgttatctgatctcagtgctatcaccggcgcatcagccgaacagatgaagcgttatgatgatgccgcccgcagcatggggcgcactactgagtttggtgccaccaaagttgctgatgcaatgaagttactggcatccgcaaaaccggcactgctgaatacagctggtgcgctggaagaggtaaccgcgaagtctatcaccttggctcaggcgtccggtattgaccttgctgatgcggcgaaatccctgtctctgagtcttaaccagtacggggcatcggcattatcagcagagcgctatattaacgtgctggctgccggggcgaaatatggcgcatcggaaatcagtgaaacctctgaggcggtgaaaaactccggcactgtggccgcacaggccgggataaaatttgaagaactgaatgcggcaattcaggtgctggccgagaaaggtatcaaaggtgccgaggccggacggatgttgcgtaacgtgatccttgttctcgagcgttccgccgataagtcactgaggccgtcagttgtcgggctgggtgtggcgctggataacctggacaaaaagaactactcaaccacagcgtcagtgaagcttttcggcagagcaaacgtgagtgccgcagttaacctgcgtgaaaacacggacaaactgaaagaactgaccgcggcactgaccggcactgacaccgcgtatgagcaggcaaatatcagggcgaataacctgaacggggatctggaattactggcaacctcatttgagggactggcactctctgtgggtcatagcactgacgggccgataagatcaggcattcagaatgtcaccgctgctgtgaatggactgacggataatttctcaacattagccagtattgttacatatgccgttttgccggtcatggcatccagaatgacgctgggtttacagggacaggttaaagcctggtaccagactggtgctgccgccagagaggcgtcacgccagacacagagaacagcacaggcaacaatagaagcggctcaggcaagccggttacaggctcaggctgaatcaaggaaactggcgcaacagtcagttataaacagacagcacggcataaatatcagttatcaaaaagaatatgcagccataagcagaaggatcagagaggcaaatttagcggagtcggccgcaaaggataagctcaacgcggcaaataaccgcctggctttatctacccgcgcattgtctgttgctggggcaggtgcccgtggtgcccttaatctgcttggtggaccaatgggggcagcattacttgccggatctgcgctgtatggtctgtacaccaacagtgtacaggcgcgggaggggctgcgaagccttaaggatgaaactgtcctgacagttgcggagctgcaaaagctttctaaagtgaaagtgcaactgaaacttgatgagtatgaagagaatttagaaaaactttataccgaaaaaagacagttggaaagccagctgggaagatattcagatacagctattaatatagcgaaatcgcgtgaaaaaagtgcattcggtagtcttttttggaactcgaaagacatggaaaaggagaaaaccgctctcttaagtcagcttgaggataccaatacttcaatttcaaggatgcaggaaggtcaaaagaacacccgaagtacgctggcagaaggacagtttgaagtaaaacccaaagaagaaaccccgaaagaagaacctgtcgtatcaacaggtactaatgagctacccggaacaagaacaggtaaaaaagagcttaatcagtaccagcaactccgccgccagatcgaatctgaacacgcaaccagcctgcaaaaaatcaccctgaatgaatcagatatgctggataagctgaaagaactacaccactcagggggtatgtcacaagcagaaatgaaccggttgtcactgatcagcgccgaaaatcatcagcggcagcgcgttgctttggcagaaaaatattcaccatctgcagaaatccttcgccaggagcgcgaggctacactggaactgaaggaactatttggttccaggctgcttactgattcggaatatcagagagccagattgcaattgtcgcaaaccagccagcgtgatcggttgtcacaacaggcaaaagatttagccttaccgaatatctcactcgcaggtgaggttgatcccgttgtacagctgcgcaatcaactggaagaacaaaaggcactgtaccaggcgtattaccgtgatggtgttatcaacaaagagcggtatgaagcgctggtggcacaggcatccgagaaatcaaaagaggcgcagattcaggcagctaaggagttgtattccgctcagggtaactggcagagaatgcagattaaccttattgatgctgtagagcaaaaaacagcgggttcactggccggaatgctgacaggaacaaaaggattttcagaaggcctgcgcgagctatcagcatcgctggctgaatccatcattcaggatctgataaaaattgcgattcagggtcagataacaaatgccattaccggtttgttcggtgggtttggtggcggtactgccaatggatctacagtaccgatgccgccaaaaaacatttcagtcatgccacacgccaaaggtggggtacataattctccgggattaagtcagtacagtaatcaggttgtcagcagcccgacactgttcgcattcgccaaaggcggagcaccgaatgccgggctgatgggcgaagccggaccggaagctattatgccgctgaagcgcggcccggacggaaatctcggcgttagaatgtatggcggaaatggcgacaccgccgcgccagtggtccatatccatattgacggtgaagggaatcagcaggttcaggcatccggtggttatgagcagttcggcagggaagtggggcaatttgtcgaccagcgctttcgcaaactgatggacaaggaaacgcgaccatctggttcagtctggaatctggttaaggggggcagatga

SEQ ID NO: 277638 - DNA, 228 bp, Morganella morganii
ttgcttttctttgctcaccaactcgcggaagagctcaaagaaattgacccctaccgcgtactcagcctgccggcatccacgcttcttggctggcaggcatacttctcactgaaagcagaacagaccggaacagcggatacctcacaggataatccgtcagcaccggaaacgccgccgtcaccggtggaacagcaatgtgctgatatcatgaaaattatcggaggatag

SEQ ID NO: 277639 - DNA, 351 bp, Morganella morganii
atgaaaggcctgaaagcatcactgctggcggcaaagccggaaatccgtgaagtggaaatcctctgcggggttaaggtaaatatccgccgtatgaccgccaatgagctgattaccctggagcaggaagttgccgatctgaacatggacggtaaagtgcgcgaagcttctctgatgaacgtcgatatgctgctgaactgcattgttgatgacggcggtaaaccggttgataaatcactgctgccgaccgctgatgaaatggtgaatgttcatgacaacgccattctgatcgatgccattaatatcgtgaaacgccactctgtcggtacacttgaagaggcaaaaaaaaactga

SEQ ID NO: 277640 - DNA, 483 bp, Morganella morganii
atggctgacaataaaacctcaccggaatacgcgaagttacccgccggtaccgtggtgaaatacgggaaacccggcgataccgtggaagcaatgaaaccactgattaactgtaaggcgctgggcgctaccgggcagtccggcagctttgtggacgtcaccactctgatcgacacatccaagcagtttatttctgacctgccggaagggcctgagaaatccctggggtttattgatgacccggaaaatgaagatttcgcagcgttcctgaacgcagcggaaaaacgcgaaacggtgcaattttactttgctctgccgaacaaacgcacggcaaccatgctgttatcgctgtcaggttgggagatgaatgacgtttctgccccggcaaacgaagccattcagatcacggtaaaaggcaaacagaataacctgacatggggtgttgcaggtgctgcgggtgatcagaccaaaggagcaacgaaataa

SEQ ID NO: 277641 - DNA, 402 bp, Morganella morganii
gtgataaccagaatcgaagtttcggggctggaagagcttggccgccggttacagcaggtggaaactgcgctgaaaaccaaaatactacgctctgccggccgtgaggcaatgcaggttgtgaaagaggatatggagcagcatgccggatttgacccgaaggggaaaggaaagcatatgcgggaaaatatcaccctgagaacaacagaagttaagggcactaacggtggtgtgatggtcaccgtcggcccggcaaaagaccactacatgaaagccagggcacaggagttcggcacagtgaaacaggtagcgaaaccgtttatccgtccggcgctggattacaacaaacgcgcggttctgaaagtgctgacacagcagatccgcaatgcactctctgagtattaa

SEQ ID NO: 277642 - DNA, 390 bp, Morganella morganii
atgatcgaaagtgacattaagtcgtctctttccgctatcaccgcaatgcccgtttttcccctgttattaccgaaagatgcacaggaaggtatcacctttcagcgtatcagtgatccgcggtattccgctggtatggtcaccactcatcttattgtggcgcgttttcaaatcagtattcacgtgctgaatgattacgaaaaagccctgctgctggataaagctatccgtgatgcctgggagtcaatccagcatggttacatcggtaattacccggtgcagaccgtgcagcgtggtggctttcaacaggaacgggaagagctgacaaaaaacactgtccgctggtcagttatacgggattttatcatcacttatccggaggatgccgtgtga

SEQ ID NO: 277643 - DNA, 327 bp, Morganella morganii
atgaaaaccggtgaactcaacaaacgcatcaccctgtaccggccggaggtagtgaccggtgatctcggtgatccccgtactgaactgacgaaagtcatcacggtatgggccaaagccgaggcgatatccaaccgtaaaatccggacggcagagcaggagcaggtcatcgaaaccatgcagtttactgtgcggccgcgcgcagatattcaaatcgactgggtgattgaataccaaagccggttttttaccgtccgtgcctgtgaccgtaacgatccggcgaaactgattattaccacggaggcagacacacgacatgatcgaaagtga

SEQ ID NO: 277644 - DNA, 303 bp, Morganella morganii
atgtcgttaccgacactcgaaaaactgagaatgcagtgccgtatcgatgaggataatgatcaggaagatgaattactcctgacctatcttcaggcggcaaaaaagcacgcggaaaattacatcaaccgcaatttgtatgacagtgacattccggaaagcgatcccgatggcctgattgtttccgctgatattgagctggccctgatgctggctgttacccatttttacgaaaaccgggatccgtcagtcatgccgaacgggtttaaggccatcctggaaccataccggcatattaatctgtag

SEQ ID NO: 277645 - DNA, 1221 bp, Morganella morganii
atgaaacttcatgaattaaaacaaaaacgtaatactatcgccaccgaaatgcgcgctatccatgaaaaagtcggtgacggtgtcatgaccgaagagcagcgcggcgagtggaatcaggccaaaactgagtttgaccgcctgaatgagcagatcacccgcgaagaggaactgcgctcggcagatcagaccttcgtggatgacaaagagccggaacagcgcggaaaacagaacggtaatccggaaagtgaagccgcagagcgccgtaccgctgcatttgaccgttttctccgtcatggtttcggtgaactgacagctgaagaacgccaggcggttaaagagctgcgtgcgcaggggacatccccggatgaaaaagggggctacactgtacccactcagatgctgaataaagtcgttgatcagatgaaagcctatggcggcattgcaggcatttcgcagattctgacaacttcaaacgggcaggatattacctggtcaacatcagacggcacagcggaagagggtgaactgctgggtgaaaacaccgcagccagcgaacaggatgtggaattcgggaccgccattctcggcgccaaaaaattgtcttccaaaattatccgtgtatccaatgagttgctgcaggacagcgggattgatattgaatcctacctcgcagcacggattgcgcagcgtatcggacgcggtgaggcgaaatatctggtgaaaggtaccggcgcaggcactccggtgcagccgaaggggctggatgcatccgttaccggcacggtcgatgcctctgccgtattcacctggaaagatattaatgccctgaaacacgccattgacccggcttaccgtaacaacccgaaattccgactggcttttaatgacagcaccctgaaactgatgacagaaatggaagacggtaacaagcgtccgctgtggctgcctgaaatcaccggcgtggcaccttcgaccattctgggtatgcagtatgctgtggatcaggctatcgacagcatggaaaccggcaagaagtttatcttctgtggtgacttcgatcgcttcattgtccgccgtgtcacctatatgacactgaagcgtctggtggagcgttatgcagaatatgaccagactgcattcctcgcgtttcatcgctttgactgctgcctggaagacacctccgcgattaaggcgctggtggccaaagctgcgacaaagtaa

SEQ ID NO: 277646 - DNA, 609 bp, Morganella morganii
atgagcagtaatgaaagagaaacccgcagctatgtcggagaggtacgggccgcgccgggcgaagaggacaagccgacccacattatcggcctggcctcggtgtttaattccttgtcagagccgatgtggggattccgtgaaattatcaaacccggcgcatttgacgatgtgctgaatgatgatgtgcgcgggctgtttaaccatgaccgcaattatatcctcggccggtcctcttccgggacgttatccctgagtgtcacagagcaggggctggtttatgacattaccgcgccggatacacagactatccgcgatctggttattgcccctatgctgcgcggggatgtcaatcagagttcattcgcgttcagtgtggcggtgaatggtgatgactggtaccaggatgatgacggcatggttgtccgggaaattcacaaaatatcccgtctgtatgatgtcagtccggtgacttatccggcttatcaggccgcgaattcaaccgtgcggtcaatggaagcgtggaaagaagcacgcgacagcggcggtttagccaaagctatcaatgaaaaactggcgcgtgagcgtcttcttacattaatgaatgcataa

SEQ ID NO: 277647 - DNA, 1224 bp, Morganella morganii
gtgcttcttgatgcattattccgcgatacaccgaccagtattgagaatccggcggtacccatcagtgcagattctgttgatacagacggtctgttcaaagccgatgtgtatgtcagcccggaaacctcgatgaaactggctgctgtatatgcctgtatttatgttctttcttcctcaatagcacagatgccgctgcatgtgatgcgcaaaaccggcgataaggttgagactgcccgcgatcatcccgtgttccaccttgttcacgatgagccgaacgaatggcagaccagctataaatggcgggaaaccaaagagcgccacattctcggctggggaaacggctacacacaggtgatccgtaacagtcgcggtgaggtgaccaacctggaagcctgtatgccgtgggaaaccgcactgcttaacaccggcggccggtatacctacggagtttataacgaacagggtaattttgcggtcagcccggatgacatgatccatatccgggcgctgggtaataaccagcggatggggatcagcccgatagtgcagcatgcggaaaccatcggcatggggatgtccggtcagaaatacaccagttctttcttcggcggtaacgcccgtcctgccggtatcgtctcggtgaaaggggatttacagaaagatggctgggccagactgaaagacatgtggcagaaagcgtctgcggcactgcgcagccaggaaaacaaaaccatgctgttgcctgctgaccttgattacaaagccctgaccgtttccccggtggatgcccaactgattgacatgctgaaactcaaccgctccatgattgccggaatttttaatgtgccggcacacatgatcaatgacctggaaaaagcgacattctccaacatttccgaacaatctattcagtttgtccggcacacagttatgccgtgggttgtgaactgggagcaggagcttaacaggcggttgttcacccggcaggagcgccgcgccggattttatgcccggtttaatctggccgggctgttgcgcggaaccccgaaagagcgtgctgaattttatcattacgccattactgacggctggatgagccggaatgaggcgcgggcatttgaggatatgaacccggttagcgggctggatgaaatgctggtcagcgttaacgccgcacaacctgtcggcagtaaatcaaaaggtggtgaaaaagatgagcagtaa

SEQ ID NO: 277648 - DNA, 162 bp, Morganella morganii
atgaaaaatatacttcttgatctcactgccctgacaggtttcggcgcggtgctggcaggctgttacctgaaatacggcctgccggattccctggtgattggcgggtcagcaatggttatctattcactggctgtggccatgagggggaaacgtgcttcttga

SEQ ID NO: 277649 - DNA, 1731 bp, Morganella morganii
atgagtcgcaagtcttacccgaacgtaaacgcggccagtcagtatgcccgcgacgtggttcgcggcaagattgtggcctgtcagtacgtgaaagatgcctgccagcgtcatctggatgatctgagtgaagaaaaaagccgtaaattccggtaccggtttgataaagacctggcggaacaggccgcaaaatttatccagctgctgccgcacactaaaggtgaatgggcatttaagcgcatgccgataacactggagccgtggcagctatttattgtctgcagtgcatttggctgggttcacaagggcagcaggctgcggcggttccgtgaagtttatacggagatcccccgtaagaatggtaaatcagctatttcagccggtgttgctctgtattgttttacctgtgataacgagtttggtgctgaaatctactccggtgcaaccacggaaaagcaggcatgggaagtgttccgtcctgcaaaactgatgtgtaagcgtaccccgctgctgacggaggcattcggtatcgaggtcaatgcgaaaaacatgaaccggccggaagacggggcgcggtttgagccgcttatcgggtcccccggtgatggtcagtccccgcactgcgctatcgttgatgaataccatgagcacgacacggatgccctgtacacgaccatgattaccggtatgggggccaggaggcagccgctgatgtgggctatcaccactgccggatataacattgaaggcccgtgttacgacaagcggcgtgaagtgattgaaatgctcaacggcacggtgccgaatcctgagcttttcggcattatttataccgttgacgatggtgatgactggacggatccggccactttgcgtaaagcaaatccgaatatgggggtttctgtttacagtgacttcctgatcagccagcagaacagagccaaaaacaatgcccgtctggcgggtatatttaaaacaaagcacctgaatatctgggtttccgcccgggcggcctatttcaacatggtgtcctggcgggaatgtgaggataaaacactcaccctggaaatgttcgaggggcaatcctgtgttcaggctctggatttagccagaaaactcgacatgaactcacgggtaaggctttttcaccgggttattgacggcaagcgccattactactgtatttcacctgatttttatgttccgtatgacgccgtattcagcgttgatgttgaaaacagacgtacagcagagcgttttatgaaatgggtggaaacagggcaccttaagctgaccgaaggggcagaaattgattaccgcgttattctggaggatgcgaaggccggaaacctgataaatccggttgatgagacagctatcgacccgcatggcgcaacaaacatctcccatgaactggctgacgaggggatgaatccgatcaccatagtacaaaactacaccaacatgtccgacccgatgaaggagctggaagctgctgtagcggccggacggttccaccatgacggcaatccgatcatgacatggtgtatcggtaacgtggtcggcagatatctgccgggcaatgatgatgttgtccgcccaaccaaagagcagaacgaaaacaaaattgacggtgcaacagcgctgattatggctataggcagagcgatgctgaatggtcccggtgacttcctttcctctctggatcctgacgaagaaattctattcctatga

SEQ ID NO: 277650 - DNA, 495 bp, Morganella morganii
atggctggcactccgggcaaatctggtcgccgcccgaagccgacagccagaaaagaactggctggcaatcccggcaaacgggcactgaataaagatgagcccgtttttaccccgctgaccggtgttgacccgccggactggtttgcggaaaacgatttgcaccttgctgtcacaatgtgggaaatgaccgttaaagagttgtgcggacagggaattatctgcctgactgatttggccgttcttgagcgctggtgtgttgcttatcatttttggcgggagctggttatcgcaatagccagagacggtacccggctgaaaggtgcaaccggcggaccgataaagaaccccgatttaaccgcgaaaaaagagcaggaaagcgaaatggatcgcaccggtgcaatgctcggtctggatccgggaagccgtcagcgtctgatcgggttggcgggacagaaaaaacaggataatccgtttatgaggttaatcacatcatga

SEQ ID NO: 277651 - DNA, 204 bp, Morganella morganii
atgaaaaagaagcaggttaagctatcccggatgtttaaaggcgggaggtttgtcgggtattgcctcagtgttgatggtgagatgttatcccaccagaccgacataaagatagaaacaacatcgccgccgcattcatctatatctgttagttttctctggcatccgtctgtggttgatgatgctccggatattcaccttgaatag

SEQ ID NO: 277652 - DNA, 351 bp, Morganella morganii
atgccaccacgtataccccgcgcgtgccgcaaacgcggctgcgcaaagacaaccaccgaccgcagcggatactgcgaagaacatcgcaatacagggtgggagaaccaccagcagggcaagagccgtcacgaacgcggctatggtaccaagtgggacaggttgcgtgctgtggtgctgagcagggataaacacctatgccaagagtgcctgcgtgaaggccgggcaactgaagcaaagacagttgaccacatcacacctaaagcacatgggggaaccgatgcggaaagcaatctgcagagtctgtgctggccatgtcactaccggaagactgcaacggagagaacacgatga

SEQ ID NO: 277653 - DNA, 297 bp, Morganella morganii
atgtcaacgttaaaactgttatcaaaactgttttcaaagacagtgaatgcgctgttgctcctgttcccgctgatgctgtcagtgagttgcgcagatacgcgaccggaattaatacccgcgccagtggtgccgcttccgccgcaactgaccgccgattgtgagcaggtagagataccggatgatctgacgtttggtggtgcagttgagctgctggctgatgccatgaaatacattgccaactgcaatcacgataagagggcaatacgagagattgaacaacaacgccgcgctaaatag

SEQ ID NO: 277654 - DNA, 159 bp, Morganella morganii
atgccacggaaccctttaacgctgatcatcattgctatcattctgctgactactgctctgttggcgggttgttatctgtattcactaccgaatcactgtagtccgctgccgggtaacccgctggacggtgtgatccattatgagtgtgaagcgccatga

SEQ ID NO: 277655 - DNA, 1179 bp, Morganella morganii
atgagtgtcagtgaggaaactcaggctgtccagccccctgtccgtaacaaaaaacgacaacgccgtaatgcgctgatgttactgacattactgtttgtattactgggtgcggcttacaccgtttactggtttatggtgctccgccatcatgaatcgaccgataacgcctatgtcaccggcaaccaggtgattgtgatgtcacaggtatccggcagtgtcaccactgtcagtgtggataataccgattatgtgaccgccggaacactgctggtgcagctcgataaacgggatgccggactggcgctggaaaaagcacaggttgcgctggcaaacagtgtccgtcagacacatcagcagatgatcaacagccgtcagttgctggccggtattgaagtccgccgttcagaactgacccgcctgcagaatgacctgcgccgtcgtgaagtactgggcgcacagaatgtgatcggcaaagaagaacttcagcacgcccgtgaagccgtggtgagcgccaaagcgcagctggatgttgccaccgagcagtttaatgccaacaaagccgtgatcctcgataccccgctgagcgaacagccggcagtgaaacaggcggccactgaagtgcgtaacgcctggctggcactggagcggaccgatatccgcagcccggtggacggttatgtctcccggcgcagtgtgcaggtcggtgcacaaatcacccctgctaccccgctgatggccgtggttccggccaccggtatgtggattgacgccaactttaaagaaacccagctgagcgccatgcgtatcgggcagccggccaaagtggttactgatttctacggcgacaaagtggtcttcaccggtaccgttaccgggctggacatgggcaccggcagcgccttctccctgctgcctgcgcagaatgccagcggtaactggatcaaagtagtacagcgtctgccggtgcgtatcgcgctggatccggcacagctggagaaatacccgctgcgtatcggtctttccggtgatgtcacggtggacacgcagaatactgacggcccggtgctgtcgaaaagcgtgcgcaccgatccggcctatcataccagtgccctgagcattgatatgcaaccggcggatcagatgatcgctgagattatcagccgcaatgccggtcagtaa

SEQ ID NO: 277656 - DNA, 723 bp, Morganella morganii
gtgcagaatttcgcgccgcgctacattaatgcgccgaatgccgttaataatgtgttcagtgcctggctcagccgtgaagtggtggtaacggccgcgtttgtcggtgcgctcggtgtcagttttctctggctgtggaagacaggaaaattctcttttctgttatacggtggcgccatggctgtcgggctggctgatattttttgtatggcatcgatttaccgttacacctcgattctgacctggaatgacatcaacacctatctgatgttttacggcacaacactgacactcggtgccgtcctgtttgtgccggtggtgatggtgatccggaaagccggacaccgggccgggattacactgcccgcagacacattatcattatcacagctgtggctgctgtggggagtgatggcggtaagtctgatcgggcgcctgctgtatcagccgttttatgcgcattacctgacccgtacacagctgacacacaaatcaatcacattcccgctgtcacccattgaagcgtatgacagtattgccgggctgcggattggtgtctggggtgcggcggtgattggtgtggcactctgcggtatctctctggtgcgggcacagaaaaaagcacgcagcggtttaccggtctgcgccgggtttatcagcggctgtctgctgaccatcgcggcagagtttatgctgcgttatgtgttctattacattcatatctga

SEQ ID NO: 277657 - DNA, 573 bp, Morganella morganii
atgagtaaaacagctcactatgcggccgcgtttaacgtactggggatctgctatctgttcccgccggatgatgacagcaaccgggccgctatgcgcctgtttaccctgccgggatttgcacagcagtggccgtgtgaggtggacaatacactgtgttcacagctgagccgcacggctgcagagggcacagaggtactgaaatccgcatggcagtctctgtttgccgggccgggagcgttaccggctccgccctggggctcagtgtatctggatgcggagggattactgcagggggattcgacccttgcactgagcgcattcttaaaacaggagcggctgaaactgaagacgccgtatccggaaccggctgatcatatcgggctgattttattccaggcggcggtactggcatctgaaatgcggagcgcggcggttaacacactgcttagtcagcatctgatgaactggctgccgcgttatgcgcagcgtctggatacacacggacacagtccgttttattccgcgctgacccggctggcgctgaccaccgtgcaatcatttataaaagcataa

SEQ ID NO: 277658 - DNA, 1350 bp, Morganella morganii
atgatttacccgctgacagaacagaccccggttttacagcataatgcggcgttgcagcggtatgtccggcgttatgccgatattgaaaaacagacacagcaggccatcgcacagtacggattgtcttttgaatcgccgtaccggcgtcaggccgaaacggacgcgctgcgccttgaggtgaaagcactgggtgcggtttttgccaacaacggtaaaagcatccacagccgctggctgtcatccgcctgtgtgcagtgccgcaccggcgagggtagttacaccacgtttttatccctgaaatgtcaccgtgactgctatttctgcttcaatccgaatcaggaaaattacgacggttttcagaatgagatgcgggatgccattggtgaggtgaatgcgattgccgcagaagggtatccgctcacccatattgccctgaccggcggcgagccgttgttgtttcgtcaggagagtatccgcttttttgaaacagtgcaggcgaaactgcccggcgttcatacccggctgtacaccgccggtgatccgctggatcgcaatactgcgctggcactggcgaaagccggtctgaaagaggtgcgtttcagtatcaaaattgatgatccgccggagaaaattgaaaaggttctcagccggatagcgctggcacgggagattttcccggatgtgatggtggaaatgccggtgatcccgggtagcgaggagcagatgtatgacctgctgctgaagctggatgctatcggcgtggacggcatcaatctgctggaattctgtttcccgctgaccaacagccctgcctatcaggaacggggctttgccctgaaaaatcccccttatgaagtctattacaactactggtacgcaggcggtctggcggtggcagacagtgagctggcctgtctgcgggtgctgaaatttgccctcggaaatcagctttccgttggtgtgcattactgctcgctggagaacaaacacaccggccaggtgtatcagagtaatgcatttatcagcgcggagccgtattacctgttttcttcccgtgattactttttcaaaagcgccaaggtgttcggtgaggactgtgctgccgtcgcggcagcattgcgtaaggcgggtgtcccgttccgtgaggatctcctgcacggttttttacaattcagtcctgaatcgattatgcgcctgacagacatccctgaactgcctgttctgctgacatcccacattgcggaagccgatgaacagggcaatcccctgattaaagaagtgcgggtggaattcaccacacccgctgaattttcgcccgacgatatccacggaggtatgtgtgaacagtga

SEQ ID NO: 277659 - DNA, 687 bp, Morganella morganii
gtgaacagtgataaccgggatccggattatctgtatgcgcgtcagtttgcttatgacgtcctgcgccgtctgctgacggacgaaccgacagcggaactgctggtttatctgcgtgatgaggggctgtcactgtttccggcagatgacgcactgcccgccatgcagagtgcgctcgatgccatgcaggatgatctgaatacccgcatgcttaaacgcggtgccgccgattttgaggcgctgcactgggatttcacacgcctgtttatcgggccggaatcgccgcctgcaccgccgtgggagtcagtttatgtctcccgcgacaaactgctgtttcaggaaagtaccctgaatgtgaaaaccttttatcagcagaacggttttcatctgccggaaaaggagtatgaggcggcggatcatatcggctatgagcttgatttcctctggaaactgagtgaacaggcgtcacaggagctcgaccgggaacaggcgatgtgtgagcgcattactgcgccgctggccgtttcctctgactttatgcaggcacatctgctggcgtttatcacgccgttttgccgtgaactgaataatcacgcggagaccgcgttttatcgtcagctcagcacacttctggaagtctttgtccggagtgattataagaaaatcaatgaattaataaacttacaataa

SEQ ID NO: 277660 - DNA, 600 bp, Morganella morganii
atgtcagacagacagaaaaccggcgtaacccgccgttcatttctgaaatggacgtcggcggcatccgccatggcggcactgccgttaagcagacaacttcacgcggccaccccggcaccggcacagaccaccccggcggcggcacctgccgccaaagggcagtggaaacctgtcgcctgctggcataactgcggcgggcgctgtgttaacaaagcattggtggccgatggtgtggtggtcagacaaaaaactgatgatgtggtggcggattcccctgacttcccgcagcagcgcgggtgtctgcgcgggcgttcccagcgtaaacaggtgttcgggaccgaccgcctgaaatacccgatgaaacgcaaaaactgggcgccgggcggcggggacaaaaccctgcgcggacgtgaccagtgggtgcgtatcagctgggatgaggcactggatattgtggcctccgaaaccaaacgcatcaccggacaatacggcaatgaatccctctgggttaccggcggtaacggtacggatttccagagtgtgttctccgccgccgggggctttaccggtgactggggcaccacctcctggggcgcatga

SEQ ID NO: 277661 - DNA, 1911 bp, Morganella morganii
atgcgcaactcacaactgattgtgatgtggggcgcaaacccggcgtggtccagcccgggcagcccgacttataactattatcaggcgaaaaaagccggggcacgttttatcagtattgacccgagttataccgccaccgcagagctgatggatgcggactggtatccgatcaacccgggtacagaccacgcgctggcgctggggattatgcatgcactgctggagatggacagcccggagaatccgctgatcgactgggaattcctgcgacgctgcactgtcggttttgatgagagcaatatgccggcaggggcggatccgaagaaaaactttaaggattatctgctcggcacctacaccggcaagccaaccacgccggaatgggcggcggacatctgcggtatttctgcatcggagatccgctcgctggcgcgtcagatcggcggcacacagcgtgtggcgctgttaaccggctgggcaccggcacgtattcataacggggagggatgggttcaggcattctcaacactcggatttatgaccgggcatatgggccgtccgggccgcatgaccggcgcgtgttgtcactatgccgccgggaacaatggtacccgtctggtgatggccggtgcgaatggcttaccggcagtgaaaaacccggtcactctgaaaatcaaccacaacgaactgaaccgtgccctgctggagaaaaaattccgtcagcgtggcgtgggggatgtggatgccaatattcagatgattttccacccgtttaacgtcaccttacagacccgcgccaacattatgcagggaatcgaggcttaccgcagcggcgtggaatttatcgcgaccgcagcgtatgtcccgcatacctgcgcgaaatattccgatgtgatcctgccggtgacaaccgaatgggagcgcgagggaaccattcttaacccgagtaaccgtgaagtcatcattgctgcggtgaatgtgactcagccgctgtatgaagcgaaaagcgaccagtggatcgccaaagagctgggtaaacgtctgggtctcaatgtggatgagatcttcccgatctccgaaaaacagcagttcttcaataaactcaacggtgcaaccatcattactgaggatggtgtcaccaaagcgccgctgtttaccatcactcaggcggatattgatgagtggcaggtgaccggtacgccgcaggaagggcgcatcacgctgaatgaattcctgaccaaagggaagtatcaggtggagcgcacgccggatgataattacggctatatcgcgtatgaggactttatccgcgatccggcggcgaatccgcgtccgacgccaagcggtaagtttgaaatctactgcgaaaccctggtggagaaagcgaaagagtgcggctggacagaattaccgccgatcgccgaatacatcccgtcagcgagcggctatgaagccagctttaaagatttcagcaaaaaagagaaaggggattatccgttccaggtttataacccgcactatctgcgccgttcacacagtaccctggataacgtgccgtggctgcgcgaacagtggccgagcccgatctacattaatacctctgatgcgaaacgtctggatattaaacagggcgaaaccgttctggtgaccagcccgcagggtaaaattctgcgtccggcgctggtgacccagacgatgaaaccgggtgtggttgcactgccgcacggcagttggaccaatgtggatgaaaccaccgggattgatatggccggggcggataacaccctgaccattcaggtaccgaccggactgggtacctccgggtggaacacgatgctgtgtaacatcgaaaaatggcacggtgagcaattaactgacgatgcgcgtctgccgcagcggattatcggataa

SEQ ID NO: 277662 - DNA, 408 bp, Morganella morganii
atgaatctgtttaatttcagcggcaccatcagtaccctctattccgatgatgttgatcgctatgttaatgatctgcgcgaccggattgctcattatggtattgattttaataccgtgatcgacgtgcagattaaactgaaccgcgaacatccggaaaacccgctgccggtctttgatcactatctcaaccgggttatgggatcgctcaatccgctgacctacagtgaccagtcgctgctgccggcgatgatgattgacggattactgcagggtaaggcgatcaaagagatcaccaccattctgcgtgagcgctatcaggcgcgggatattgattttgtgctgttccgggcgaaaaacggcggcctgctgaaagacaatatcttaggggatgtgattctgacccgctga

SEQ ID NO: 277663 - DNA, 354 bp, Morganella morganii
atgcgcgcgcctatgaagctttatgcaaagaaaataggtgccggccagttatcagtgactgatgaacacggccataaaattattaatttcccgacccggaataaatgggattcaccttccggttatgaatttatcgaaagtggtctgcgtgaactgaaagctctgattaaaaaacaggggctgaaatccgtggcaattccggcactcggctgcggcagcggcggactggagtggcgtcaggtggataatctgatccagacgcacctcggtgaattaagtgatacagaaataatgatctatccgccggtcaaatatattgatgacagcatcagcccgcatcatgtgctggtctga

SEQ ID NO: 277664 - DNA, 186 bp, Morganella morganii
atgattaaatacctcaaaggtgatttactgagatctgatgctcaggcgctggtaaatgccgttaattgtcagggcgttatgggaaaaggaattgcctatcagttcagactggattatccggtaaatgcgcgcgcctatgaagctttatgcaaagaaaataggtgccggccagttatcagtgactga

SEQ ID NO: 277665 - DNA, 1047 bp, Morganella morganii
atgttgaaaaaaatgttttttttatgtaataagactcgtttgattacgttggcatcatcgcttatggttacctgtgcattaccagcgatggcaaaagattccctcactttatataccacacgtgaaccgggcttaattcagcctcttctcgatgcctttacgaaagaaactgccattgatgtaaatactgtctatatcaaagatggtatgttagaacgagtaaaagccgaaggtaaaaactctccggctgacttattaatgacagttgatgcaggtaacctcatcgatttagttgaagcaggtgtaactcaacctgttcaatccgaagtattaacagaagttattccggcttctttacgtgataaagacaaccaatggtttggtttgtcaatgcgtgcacgtgtgttgtatgcagaaaaatccataccattaaacagcatcacgtatgaaaacctggcagacccgcaatggaaaggcaaaatctgtattcgtgcgggacaacacccctataacacagcattagtagccgcaatgattgctcatgatggtgaagcgaaaacagaagcgtggttacgtggcgtgaaaaataacttagcccgtaaagctgctggtggcgatcgtgatgttgcccgtgacatcctcggtggtatctgtgatgttggcttagcgaactcctactatgttggtcatatgaaaaatgcgaaagaaggcactgatgcccgtcagtggggggatgccattaaagtcgttcagccaacctttaccagtggcgaaacgcacgtcaatatcactggtgctgcagttgcccgcaatgcgccacataaagaacaagctgtgaaattgatggagtatttagtttcagttcctgctcagcagctgtatgcgcaagctaactacgaatatccaatccgtaaaggggttcctttggatgcgacgatcaacagtgcgattggtgaaatcaatgttgataacattccactggctgaaatcgttaaacaccgtaaacaagccagccagttggtagataaagttggattcgatcaataa

SEQ ID NO: 277666 - DNA, 1590 bp, Morganella morganii
atgacccctttgttattcctgttatggctcgcggtaagctcaggtgtcagtcattgggaacatttactgaagtatgtgttgcctgatgcgatactcaataccctgattttattacttggtgtcggcgtactggtcatgcttattggtgcgggttgcgcctggttagtcactgcattcgatttcccgggaaagcggctatttagttgggcattgctgcttcccctcgccatgccaacctacatagtggcatttgcctggcttgatttactgcatcccatcgggccggttcaggaagtcattcgcagcctgttgggctatagcaacccccgtgagttcaggcttccggatcttcgctccatgaccggcgcgattttgttattgggtctggtgttatatccgtatgtttatctcaccatgcgggcgatgtttatgagccagccggcgcatttactggaagcagcccgcacacttggtttaagttcaaccggctcatttttccgggtggcgctgccaatggcacgtcccgcactggtggtaggaacaagcttagcattactggaaacactgaatgatattggcgcatccgaattccttggcgtgaatactctgacagtcacagtgtataccacgtgggtgacgcgttctgatttggcggcagcagcgcaaattgcgtgctccatgttgacggtaattattctgttgctggccctggaatattatgggcgcaagaatcagcgttataattccggccggcaaatgcgggggattttaccggcacgattaacgggaattcacgcatgcctggcgactttattgacttctctgcctgttttactgggctttgttgcccctgcactatttctgggttgggaaagtatcaggcgttttagtgatagtatggaaatttctgccagcctcctgcaatcattacaaaactcattattattagcggcaggagttacccttgtggtgacttttgtcagcctgattgtggcgtggtatgcgagatcaagtgcgatttcggggggggctccggaggccagacgtacattgatgaaagttgcctcattgggctatgcggtgccgggaacggtattggccatcgggttattaacaccgggtatgtcgttggataatatactggccgaattgttcaattatcgcggtttaccgctgctctcttcgggggttttattagttatctgttgttctatccgctttatggcgatttcagtcggggcgattgatgccgggttaacccgtattccgccgggcatggaacaggcctcaagattacttggtgaaagtgagtcgggaacctttttccgcgtacatttaccgttattgcgtccggcattagtgacaggtgctttgctggtttttgctgatgtgatgaaagagttaccggctactttattacttcgtccggttaactttgaaacattagcaacatctttgtatgcagaagcggcgagaggtacctatgaggagggggctgttgcagcattactgattgtattggccggaacgctcccggtaatactattagcacgtagtcaattatcttcatccgggccaaaacaacgataa

SEQ ID NO: 277667 - DNA, 699 bp, Morganella morganii
gtgtcagacacaacgttagttcttgataatgtgcatgtctcttacgggagtaaacatcaacgtaatcatgttctgaaaggcttttctttgcacattaatgcaggggagatcggctgtcttctcggtacttccggctgcggaaaaagcactgcattacgtgctattgcagggtttgaacgtacagagcagggaaccatccatgttggtggccgctgtgttgcaggagagggccttcatcttccgccggaacaacgcaatgtgggaatggtatttcaggattacgcgctgttcccccatttaaccgcagcgcaaaatattgctttcggtctgagaaaacaaccgaaaggatatcagcaaacacgagttcaaacactgctggatttagtagaattaaaagaacttgccgggcgttatccacatgaaatgtctggtgggcaacagcaacgtattgctttagcacgtgcattggcgacacagccggcagtattgttgttagatgagcccttgtcgagcttagatccggatagccgtaaacgtttagggctggaagtgagagatattttacgggaagccgggcaaacagcactgttagtgactcacagcgaagatgaagcacaattgatggctgacaaaattaactacctgaaaaatggcagattaattcagaatgatgagaaaaccaaaatcagaaatacttaa

SEQ ID NO: 277668 - DNA, 534 bp, Morganella morganii
ttggttgctatagctgataatattcacgtgacggtgaattcccctgtgtactcttaccctgataatcgggagtttaaagaaagtgtatatgtatgtgtattaaccccatttaacaagatgtatgccggtgttgatgtgaaaaaaacacaagcacaattcaacgccagtcagtcttgtcaaaataaagagggtagtaatagtattttttgtacgccaaaagatgccatgtgtactacagcaacggtgatactgagtaatggagatagtcgtcaccaggggctctctgctattgtattatttaatggatttgatcaaacaggtcagcatttgctggtcaatgaaagtattgatgattttagtacatataattttgataacaagatcatgtcgtttgatattccggatggatggacagtgcggtttttcaaagaaaaaaactttcagggtgactattatacccgctcttcaggaaagggaaatgcagatgattttccacacagtattagctcaatgaaaatacttcgaaagaaataa

SEQ ID NO: 277669 - DNA, 660 bp, Morganella morganii
atgtcattgaacacaaacgatggttctaaagtatatacacctctctctttgtctctatatgactggtgggtgctaaagatatctaataactatgcatggcattgtaatactgataaatttttaattcctcactttaaatttcatcttggtaacaaccatatggatattggtgttggaactggtttttatttaaagaaatccgcagataaaattaataaaataacgctttccgatcttaatgttcatagtttggaatgtgctaaaaaatatatttctgatgaaaaattaaattcttgtttatgtcatgatatcttcaatagatttactggtcagttgaggggggtatttgattcagtatccatattttatttattacattgtttgccggggaaaatgagtgataagaaacaagcgataataaatatcactgaaacacttaaagatgatggcattttatatggcgcgactattcttggagagggggttaagcataaccgttttggaagtaagctaatgtcagtctataacaaaaaagggatttttagcaacgtttatgactctgcggattcacttgaaactatgctttcgtctttgtttgaagatgtttcagttaatattcagggtacggttgcattattcactgctaaaaataaaaaataa

SEQ ID NO: 277670 - DNA, 891 bp, Morganella morganii
atgaaaaaactctctgggttaatcgctgcacctcatacaccttttgctgccgatggcagtgttaattatcctgtcattgataaaattgcagaacatcttattgctactggtgttacaggtgcttacgtattaggaacaacaggagaaggtatccattgttctgtcgaagaacgcaaaaaagtcgctgaatactgggctgctgccagtcagggacaattagatataattgttcatacaggtgctctcagtattgcagacactatagagctatcccgtcatgctgaaacattagatattcaagctacatcagtgattggcccttgtttctttaaaccgggcaatgtagatgacttagttgaatattgtcgtttagcagcgatgaactcgccttctaaaggcttttattactaccactctactatgtcgggactaaacattgacatggaaaaatttttacaagcggcaggaaaaacaattccgaatttatccggaatgaaatttaattctcctgatatgtacgaatttcaacgttgcttacgtgttgatggcggtaaatacgacattccatttggtgtagatgaatttataccggcagggttagcgtgtggggcattaagcgctgtaggaagcacctataactatgctgctcctttatatcttgaaataattgataaatttaacaatggtgattacaaggggatcactgcgtgtatggataaagtaattgcaattattcgtgtgctggtagaatacggtggtgttgctgcaggtaaagttgcaatgcaattacatggcattgatgttggtgacccccgccgtccactacgcccattaactgcagcacaaaaaacggatgcactggcaaaatttaaagcagctggtttcctataa

SEQ ID NO: 277671 - DNA, 888 bp, Morganella morganii
atgacaaaacagtcagttaccagactgaagccaggtaaaatactcgacacactgggggcaatgaaaaatagcctgacgcgagtatcacagcgtattgctgaatatatcctgtttcatcctgttgaagtcactcagctttccatcgcacaactttcccgggcgactaaagctggcgaagcaactgtagtacgtttttgccgcactctgggctataagggctttcaggactttaaaatggatttagccattgaaatggcgacatcggatagtgaagaatcaccaatccttgatgctgaagttaaccatcaggatgatatccatactataggtttaaaattacaagcaaccatcaataatgtgttatcagaaacattaaatttacttgatatgacgcaagttaaaggcgctgtaaatgcgttgctatcatcgaattatgtttttatctgcggcgtgggttcctcggggatcacagcagaggatctaaaaaataaactgatgcgtattggatatcgggtggatgctgttaccaataaccattttatgtatatgcaggcttccttattgaaaccgggtgatatcgcgatcggtatcagccattccggaaattcaccggaaacagttcatgcactgaaacttgcaaaagaagcaggggctaccacaattgtgctaacgcataatttaggttcacacattatggaatatgccaattattatctgattaatggtaatcgccaggggaaattacaaggtgattctattggtacaaaaacagcacaactgtttgttttagatttactgtataccctacttgtccaggctcagcctgaaatggtcaaagagcaaaaactgcgtacactaaatgcattgaaaagtaccaattcagcatga

SEQ ID NO: 277672 - DNA, 474 bp, Morganella morganii
atgttatttggtcatatatctgacgtggcaataatgcctgaaatgaatttggtattacgtaatataattgaaaaggcactcgcactcgatccattatctttagaacccggaagctatcctattgatgataatgatgtatttatgaacgtaatgtcatttgaaacacaatcccgggaacaaaaatgtgcagaattacatcatcgctacattgatatacaaatattactatccggtgaagaagttatagattatggcgttcgtcattcagctaaaaatgccactgtttatcataaagatgatgactatcaactcactgatactattgaaaatagtcaaacattatctttaaccccctctatgtttgctgtttttatgccttacgagccccatagacccggaatagcttcagaacaaggaaatagtatcctaaaaaaagccgtgattaaggtaaaccctgccctgctggaaaattaa

SEQ ID NO: 277673 - DNA, 870 bp, Morganella morganii
atgaatatattagcaattgatattggaggaacaaagatttcggctgcattaatcagccgggataatcaacttacacagcatactcaaattacaacccctgcaagtgcatcaccaactcagctctatgaagcgctggccgcgataacaacaccactaaaagcacatgcagatggtgtcgccgtagcctctacagggatcatctgtgatggtgtattaacggcattaaaccccgataatctggggggattaaaaaatttcccgttgaaaaaaatactctctgcattaacggatctgccttgctggttactcaatgatgctcaggctgctgcatgggctgaatatgattaccgccatgaaaatatctctgatatggcatttgttacagtatcgacaggtgttggtggcggcttgattcagcaaggacaattacaggcaggaaaacgaggtattgcaggccatcttggccataccattgctgatcctcatggccctctttgcggctgtggtcgttatggatgtgtcgaagctatcgcttccggccgtgccattgcttcacaagctgtaaatgaacttgcagggaaagatgcgaaagctatttttgctgcctatcaccagggaagccttcaggcgaagacaataattgaaaactcagcaaatactatagctaatttagttgctgatattaaagcaacaatagatgccgactgtgttgttcttggtggaagtatcgggttagcaaacggatatattgagctcgttcaaacagctatcagacaacaaccggaggcattacaggtgcctattttagcagctcactatcatcatgatgccggactttggggtgcggctctctgggccagagtaaactaa

SEQ ID NO: 277674 - DNA, 168 bp, Morganella morganii
atggcaggagaggagcgtctggtagatttgagattttatttttccaatattgatatgctgattctttgttttcatactgttttttatcttgtaaataattataaaagtcatagtgttcatctaactgaggcagtacttctccgctcaataataaacaaagttcagtaa

SEQ ID NO: 277675 - DNA, 738 bp, Morganella morganii
atggatagctatgaagattattatactcagtctgctgaaatgtatgatattttaagcgaacctcattgggaaactcgtaaagatacatttataaaatccttgaagtttatgggagtaaaaacaggcaactggttaaatataggttccggcactggccaagaattaagtataattgcgcaaatgtttccagacatacatatttttgcaattgaaccgtctgcatctatgcgtattggcctaatgacaagaattatgatgttgcctgaaatacaacaccaagtaactgtgattgctgatacatttcaaaataccattctaccaaaatcattttctgccgctattatatgtggctgtataggatattttaatcagaatgatagaaaaatattatggaataagcttgcaaatgggctagaaaaaaaaggtgctattttggtagatacaatgccgtttaatacgccttgtaacatttctaagatactactaaatagcaaaaaaatagggaaccatatctatgaaatttatttaagtggcaaacctatagatcaagaagttattcgttggaatatgaattttaaaatcatagaagacgataaagtcatacgaaattttaatatagaaagagattggtatacttttggaattgaacaagtaattaaggaggcatcaagagaaggattggtccatgaaaacattagctcaagtactgtaccaatgacaatcctccgccataaataa

SEQ ID NO: 277676 - DNA, 1230 bp, Morganella morganii
atggctataggtggggtttatatcacccaaacccttatatcaatgattatcatgcaatctgtaccaaccttactaagaagtgaaggattttctctctctttaattggattgacttcactttttatgcttccttggacacttaaatttttatggtctccatttattgaacgcctgagattaccttttggaaaaaaatttcgccgttcacgtaacttgattcttattggtcaatcattggttgctcttttagtttttttacttattctaataaaccctaacgataatataagcaaactgaataatctttggatttttggaatatttatcctatgtgcattcttaacatcgactattgacattgcatgtgatggcatggcggtagaacagattaaggcaagtaatagagggtggggaaatattgctcaagttggcggaggagaaataggagcattattaggcactagtggttttttattaatttccagttattttagcttaaatactgcatttgctatatcagctctaaccatcatattacttacaattccaacactctactttaaagaatcagatagactaaccacatctgaaacttaccatataccaaaattatcatatgcatttaatcgaaaagaggtaagaattggtattttattagtagttttattagaaggaggtaacagaatcacagatatgattaccggacctctattaatagatataaatattacattaaataatattgcactattaataggaagcttcaatttttgtgcaagcctatttggaacacttttaggtggtatattaataaaagtatttggcatatggaaatcaattttcattacctatggtttacaaggtttaatttttgctttcatatccatggctataggaataaaatatatcccacatgaaatactttttttacttatagggttaaaatatattcttttttctgcaggactagtttctttttacactggtttaatgagcttatcttcattgaaacaagctggtattgatttcactattttccaatgtacaaatgcttttacagcaatcattgctactctattaggtacttggacagcggagaactggtcttatcattttgtttttgcaatatcatctatttatacttttatcgcagtactaatttccattaaattaataaaaaaacgccttaaactaaatatttcatcaaacaattttgagcaatatgtataa

SEQ ID NO: 277677 - DNA, 1938 bp, Morganella morganii
atggtaacagtaagctctgtagctgccacagaacagcatgataatacaataactgttactgcaactaagcgcattcaaagtagttttgatgtaattggtaatgtgaatgttcaaactgatgaacagttaaaaaaatctttagttaatcaaactgatgatttgagcgcagtttttcctgagttgttatctgcaaaccgaagttcgcgtatttataacaatatgactcttcggggccaatcttcggccgatttcttttctccgagtttgggactgtttgttgatggtgctccccagctttctcaatcgtatgctcaatctcttcaaggggttgagcaagttgagctacttaaaggcccacaaggagttatttatgggcgtggcacattgggggggattatcagtgttattaccaaaaaacccagtagtcacgctgaagcatggttaggggggcgatattttggtcaaggggaaagaatcaatacaggaggaagcactggctacatggaaaacggctgggcttttcaggggaatgttagtctcgatagaaataatggttctttgaacaatccagcatgggataaaaaaaatgttgatagcagagatataaaagctggatggttgtctgctaattatatttcccctgatacattatttgagtctaatttaaaagtaggtggagaaaattaccattctcatgaggaatattttgttcctttttcacctctttcacgttcaaaaattgatactgaatggttatatgaaacacctaatcttaaacgtaaattaaaaaacatttcctggaatactggttatgattttaatgatgaatggaagtttaaaacgatactttcttatcaaaatatggatatagatagattgtttatggacgggacgttacaagatgattctcaggatattttgtattcagaagcaagagctaattatgaggggggggatctaagtggaattatagggatatcatttcaaaagatgggttatagacatgataatttatctgtagggaaagtcggaatgggaggaaaaaaatctgataatgatatttataattactctggatattttgatggtgcatacaggataaatgacaattgggagttaggtgcaggggctcgtttttctcacgaaaaagcaaaaactcgaatgattattttagaaaaaggaaaaggtgagtctaattataataataatgcagtttttaatgcctttattccacgagcaagtatcgcctggcttccaaatgagcagaatcgtatatggtttggagttggccgcggttttaaacctggtggttttaacaaagaaggggctgataaactagctctgacttcttataaatcggaaactgccacggaaatggaattaggttggaaatggcacagtgttaatgataaccatatggccgaaattactttatatcaaatagatagtaaagatgttcaaggatatgtaggtgttattggttatcaggcattatctaatatgggagattcaagaagtcgagggatagaatatctttggaaatcaaagcttacccctaatcatagtatttcactgggtggcatgttcaatcaatcagagtttaccagtggagaacataaaaataaaagacctgcttatactcctagttatagttcattaatttcatgggatggcttatatggcaaggagcaaaagtggtcttctcgcattgcagtcagatttaatggaccattttactttaatgagcaaaataatttagaacaagggcattatactgttgttgatgcatcaatatcatggcaccctacaaagcaatatgaacttggtgtctatgcgaaaaatattggtgatactttatatcgaacgtatgcatttggtaataaagcacagctaggtaacccgagagagatcggggttcagggaagtattaacttttag

SEQ ID NO: 277678 - DNA, 1269 bp, Morganella morganii
atgttaactgacagcaagattcgctcagcaaaatctattgcaaaatcatataaactcaccgactcgcaaggcctgtacctgatggtatctgcctgcggtactaagctatggtatttccgctatcgcctcaacggtaaagaaagtcgtctggccctcggcccttaccctcagactacgctggcggaagcccgtgaaaagcgcgatgcagtgcggaagctactggcgtccggtatcaacccttctcagcttcgcaaggcacataacaataccgttgatgaatctcgcacatttcagtatgccgcgacaacatggcactccagcagacttaagctctggtctgaaacccacgctgataaaattctcacctgcctgaaacgctacgtttttcccactattggcgcgatggatatcacccaaattgaaacccaccatctggcacagttggttaaggtaattgacgataaaggcgtgcatgacgttgccgggagggttcgccagcatctgaagaaaatcatgcgccatgccgtacagcagggagtgatcaaatacaatcctgcttacgatttagatggtatcgtaacccccgtagtgttccaacatcaccccgccttactcctgaaacacctgccagaattgctggaaaagattagtaattacaaaggcaggaaactaacccgcctagcactggagcttaatcttcatgtcttcctgcgctccagtgagctacgcctcgctcgctgggatgagtttaacctgaaagcacatatctggacggtgcctgcaaagcgtgagaccgtaaaaggcgtgagattctcggagcgtggtgcaaaaatgaaggatgaacatctggtgccattatcacgacaggttgcttccctgcttgagcaaattaaggaaatcacaggggagtcaatgtttgtctttgcaggcgcgcattcaatggataagccaatgagtgaaaacactatcaataaagcactgcgcgtaattggctacaacaccaaaaccgatgtctgcggccatggtttccgcacaatggcctgtagtgccctgaatgaatcagggctgtggtcaaaagatgccattgaacggcaaatgagccataaggaacgcaatggcgtaagagctgcttacgtgtataaagcggaacatttagaagcccgcatagaaatgatgcaatggtggtctgattatttagacgccagccgtatagaatatattgcgccatatatttatgcccgacaatataaatccataggtgccgcttga

SEQ ID NO: 277679 - DNA, 705 bp, Morganella morganii
atgcacatatcatcagaaatcttatcagctaaatttcatgtgattgaatcatctgtaaaatcagcagttaaaaacctgtttgcttcattacattctgtttctgatattaaaatgaccagccataaaccagctgaacccacatttaagcaggttaacctatgtcttgatgaggatgtgaatcaggatcaaagcatcacgttccggggttactgcaataacttccgtggcaataaagaagatgccattctgctgcatggacactggaaagacggactcatacaggttggtggtaaggctgccgccgttatagaaaataacaggctggttaaaataaacgggcaagttcagctaaaaacggatctgagtgaagcacaatgtctgaatgcacaagaactggtggcttacataaataaaaaatccggaggctcagttgatctactcaggaataacggtcctatccatttagttagttgttttgcaaaacgtcaggctgcgcaagaccttgctgatgtgacaggtcgtccggtcattgcttactccaatcagcaaacaattactgccggttataactatattcataacaaagaatttaatattgaatccaaactcaaacatgcatgggatccgcgagctgtcattatgaaaaaggtatctcatcaggcagtaccaaaaaccttctacccttcgggaaatggtgtgaaataa

SEQ ID NO: 277680 - DNA, 336 bp, Morganella morganii
atgacactccccgttttcaggccgttaattatatctgccacttttgtattatgcagcgcattcgccggtaactgccgggcggagactgatctgccatgcactatgaccctgcaacacagagccatcatgctggatggcgcgacgtgcatcagcaaaaagcggttaccgggctgccctgtgctatgccagccgtcagaggtgcaggaaaaaaacgttcaggttacctgttttcgtcccggagagcctttaccttttgacagaactgcagatgtcactgtcccggtggtctgtgaaatcatactccctgtagatatttcaccggacaccacaccataa

SEQ ID NO: 277681 - DNA, 471 bp, Morganella morganii
atgagtatcgaaacggttcgtgcctggttcggcacgcatgccccggatgttacgattattgagaccacacagccgactgccactgtcactcaggcagcagaagttcatggtgtccgccccggtcagatctgcaaaacactctcttttaagctgacggatgacagcgcgattctgattgtgatggcaggggacgcccggctggataataaaaaattcaaaacacagttcggctgcaaggccaaaatgctgaatgcagaggaagtggtgcatttcaccggccatccggtcgggggagtctgtccgttcgggctgccggtaccgctgaccgtttatgcggatcattcactccgtgagtatgacacggtattacctgcggcggggtcggctaattccgctgtccggctgacacctgcgcggctggcggaactgacaaacgcacagtggctggatgtaaccactcagccggtataa

SEQ ID NO: 277682 - DNA, 1047 bp, Morganella morganii
atgcaccaaaacacaccaacagaaaaaaccactgaaaaccagcagttacgcactactggcggctataagaaccttaaccgtttctccgttgcgcccatgctggactggactgatcgccattgccgttattttcaccgtaaactcagccgccacgcgctgctgtataccgaaatggtgaccaccggggcgattctgttcgggaaaggggattatctggcgtataacgaagcggagcacccggttgcattgcaactcggcggcagtgacccggcggcactggctcagtgtgcgaaaatcgcacaggaacgcggttatgatgaaatcaacctgaatgtcggctgtccgtctgaccgtgtgcagaacgggatgttcggtgcctgtctgatgggcaatgcgtcactggtggcggattgtgtcgcagcaatgcggaatgtgacagatattcctgttaccgttaaaacccggatcgggattgatgatcaggacagttacgaatttttgtgtgattttgtcggtaccgtggcggagcgcggcggttgtgagatgtttgtcatccatgcccgtaaagcctggctctccggtctgagcccgaaagagaaccgtgagattccgccgctggattatcctcgtgtatatcaattgaaaaaagattttccgcatctgactatggcgcttaacggcgggataaaaacattggaagaggcgaaaacccatctgcagtatatggatggcgtgatggtcgggcgtgaggcatatcagaatccgtcaatcctggcacaggtggataatgccctgtttgatgcggcactgccggtgaccgatacggtcgcggcggtggaagcgatgtatccttatattgaggcggaactggcgacagggacttatctcggccatatcacccgccatatgctggggattttccaggggatcccgggggcgcgtcagtggcgtcgtcatctgagtgaaaatgcccataaagccggggcagatctgcgtgtgattgaagcggcactggaatttgttacccgaaaaaatataactgaataa

SEQ ID NO: 277683 - DNA, 315 bp, Morganella morganii
atgaataatacggaaataaaccatcttgttgatttcatctatcaggatgacagaatcacaaacgctgaattccagatgattcgtgatgaagcggataaacgctttgatgccattcttgaatgttacggtaaaaacaatagcttatctgcatttcaaaaatctgcagatgtcactgtacaattaatgcaggaaagcttttttattctgaaaaagaaagctgaaacaccggaacagaaagacgaaatcaaagacgcattcaatgcacaaatcagttatatcatcgcatgctataaccgtttctttgattcattataa

SEQ ID NO: 277684 - DNA, 609 bp, Morganella morganii
atgttattacagttttctgccgctcacggcccggaagagtgctgtctggcggtgaagcacgcgctgcgcctctttttgcaggaggctgcacagtcgtcggtcacagtgatctttgcggaggaaatgccgtcacagcacggcctgcattccgccctgctgtcactggacggagaacatgcggatgctctggcggatcgctggtgcgggacattgcagtggcagtgtgccagcccgctccgcccgaaacaccggcgtaaaaactggtttatcggcatccgtcgttttactgcaccgcaggcagtatcagacagtgagattgtctttgaacgtctgaaatcacaggggccgggcggccagcatgtgaataagacagaatccgctgtccgtgccacgcacattgccaccggtatctcggttaaagtgcagtctgaacgcagccagcacgccaacaaaaaactggcctgccgcctgattgaatggcatctgagccaatatcagcaacagcagtccgcatcactgaacggcgagcgccaccggtcacatcaccagatcgagcgcggccgggcgacacgctgcttcagcgggccggatttccgtccggtcagctga

SEQ ID NO: 277685 - DNA, 1137 bp, Morganella morganii
atgggcaattatatgcattttgtcgcgccgggcgtctcttatatcgcctcggatgcgacgtggatcgaaagtaacgcgatccaacaactgatcaccaccgcacaattaccgggtatgacggctgttgccggtatgccggatctgcatcccggcagaggctatccggtgggtgcggcatttttctctgaaggccgtttttatcccgcgctggtcggtaacgacatcggctgcggtatggcgctgtatcagactgagctgaaagtcagcaaactcaacgcggacaaagctgaaaagcaactgcgcagcatgcatgaccatgcggacgcagactggctggcagagcatgtgagcgatcacttcgcatcacatccgtttgccgcttctctgtcttctgtcggcggcgggaatcattttgctgagtttcagcaaatcgataaggtctgtgatgacggcctgtttgccgcgtccgggctggataaacagcgtgtgatactgctggttcacagcggttcacgcgggctggggcagatggttctgcgtcatcatgttgagcagttcagccacgacgggctgacagagaacacgccggaagcggcggaatatctggcagcacaccagcaggcgctggattttgcacagcacaaccgggcgctgattgcactgcggatgatgcagcagttgcgtaccaacggtgaggcaatactcgatatcaatcacaacctggtggaagcctgcacggtgaacggccgtaacggctggctgcaccggaaaggggcaaccccagtggatcatgattatgtggtgatccccggctcacgcggtgattacagttatctggtgaaaccacatgcaaccgctgacagcctttactctctcgcgcacggcgcgggacgtaaatggatgcgcaccgagtgcaaaggacgcctttctcaccgctataccccggcgcagttatcccgtaccgatctcggcagccgggtgatctgcgctaataagcagctgatttatgaggaagcaccgcagtcctataaatccattgagactgtgattgaaagcctgtcaggtgccgggctgattaccgtggtggcgcggctgaaaccgttgctgacctacaaaacgagcggggagtgctgctga

SEQ ID NO: 277686 - DNA, 1533 bp, Morganella morganii
atgtcatttgctattgtttatacccgtgccatgatcgggacagaagcaccgctggtcaccgttgaggcacatatcagcgccggactgcccggattaacactggtgggattaccggaaaccgctgtcaaagagtcgagagacagggtccgcagtgccctgatcaacagcggatttgaatttccggcaaagcgggtcactatcaatcttgccccggcggatttgcccaaagaaggcgggcgatatgacttgcctatcgctgttgccatactctcagcttctgagcaaatagacgcaaaattagcagaaaattatgagttttcgggggaattaggtctttcgggagaactccggttctgccgcggaatattaccggcagtgctggctgcccgtcagtcaggaaggcaggctgtggtatcaaaacagcataatgatgaattatgtattctgcctgccggttcggcgctgatggcggataatttactgcaggttgctgctttttttcatcagcagcaggaactgaatgaaaacagccacctggcgggaaaaacagaaaatgataacggtacaagtattgatgatattaccggccagaaacacgccaaacgggttctggaaataagtgcagccggcgggcacaatttgctcctgctcggcccgcccggtaccggaaaaaccatgctggccagccggctgggaactctgctcccgccgttaaccgcgcaggaagctcttgacgtggcgataatccggagcctgacccaaacctcatcagaacaaaataaatggccccagcgtccgttcagggcaccacatcataccgcatcctctgcggcactcaccggtggcggcagtattccgctgccgggagaaatatcgctggcacatcacggcatcctttttcttgatgaactccctgaattctcccgtaaatcactggattctctgcgtgaaccgcttgaatccggagaaatcattatttccagagctaaagcaaaagtgtgttttcctgcccgtatacagcttattgctgcgatgaatcccagcccgacaggccactatcagggcatacataaccgcagcggccctcagcagcttctgcgttatctttcccgcatctccggaccgtttctggaccggtttgatttatcaattgaagtaccgatgctgccaccaggaacattgagccggacagaaaaagatctgccggttcatgagcagataaaagcacgggtacagtccgcacgacaacaacaataccgccgtaacgggcagggaaaactgaatgcgggactgtcaggcaaagaaacagaggaggtgtgtgcactatcagcacaggatgcccgttttcttgaggatgcactgacgcaacttaatctgtctgtgcgggcatggcaccgtatactgcgcgtcagcagaactattgccgatctgcgggatgaaggaggacaggtatcacgaaaagatatactggaagcactcagttaccgggtaatggacagattaatccataaactgcagcaggcggtctcttaa

SEQ ID NO: 277687 - DNA, 1509 bp, Morganella morganii
atgctgagatcgtcctcgctttatgctgccatcgatctgggttccaacagctttcatatgctggtggtacgggagattgcgggcagtattcaggtactgtcacggataaaacgcaaggttcgtctggcggccggtctggataaagagaatatcctgtctccggcagccatggcccgcggctggcagtgtctgcgtctgttttccgaacatctgcaggatatcccggactcccagatccgcgtggtggcgacagccaccctgcgcctggccagaaatgccggtgaatttctggaaacagcagcggagatcctcggtcatccggtcacagttatccggggtgaggaagaagcacgtctgatttatcagggcgttgcccacaccaccggcgggtcagacaaacgcctggtggtcgatatcggcggcggcagtaccgaactggtgaccggcagcggcacccggaccaccgccctcttcagcctggaaatgggctgcgtcacctggctggagcgctattttaccgatcgttccctgaccacagagaatttcgccggtgccgaacaggctgcccgcgatattatcgccccggtcgctcccgcacttctggagcagggctggcaggtgtgtgtcggcgcatccggcaccgttcaggcacttcaggaaatcatgattgctcagggcatggatgaacaaatcaccctgccgaaactgcagcagctcaaacgcaaagcgattgagtgcggcaaactggaagagctggagattgaagggctgacgctggaacgggcactggtattcccgagcgggctggccattcttatcgcgatttttgaaacgctcggcattgacggcatgacactcgccgggggtgcactgcgtgaagggctggtctacggcatgctggaattgccggtagagcaggacatccgcacccggacactgaaaaatattcagaagcgttttcagatagatgccgaccagggtaaacgtgtccgtcagttagcggatcacttttttcagcaggtggcgaccgcctggcagctggatatccgctgccgtgaactgctcagcagcgcctctctgatccatgaaatcgggctgagtgttgatttccgcaaaggcccggaacatgccggttatctggtcagtaatctggatttacccggtttcacaccggcacaacgccgcctgttagcggtgctgttgcgcaatcagagcggcccgctggatatccattctctcaatcagcaaaatgcgctgacaccgcgtgaagccggttgcctgtgtcgtctgctgcgtctggcgattatttttgccagccgccgccgtgatgacacgctgccgtcactgcgcatccgggcgtctgcggaagggctgattatcacactgccggtcggctggcagcaattgcatccgctgcgcgcggaagcattacagcaggaaattcagtggcagagttatgtgcagtggtcactgatgctggaagaacagaagccgtccactctcggctga

SEQ ID NO: 277688 - DNA, 438 bp, Morganella morganii
atgagtgataacgacgacatcctgaattcaattagaagctcattccagagcgcattagatattgtagagataaaaaaagatattgagtctaaaacattcgatttgcttaatttagttaaagaatcaacaaacaatatcgtgtatccggaaattaaaaatattgataataataaactaatcagtatgctctcagcacaaacaatatatgacaaagccatatatctgaaaagtgaaaccaacccagaaataaaacatcttttatgtgaatattcgttaaataaatcaaccggatttccggtaactgttcgatataaaaaagaagagttttcatgtaatacaatggatattttaaagtcaacattaacagatattttaaccacgcccgaaacagcaatggctatggccaacttattttatggtaaagaagctgattattaa

SEQ ID NO: 277689 - DNA, 894 bp, Morganella morganii
atgaatacaagcaagttaaatttgggatggtggaatattggtatatccccgccaatacgctccaataaggcgaaaaaaactgatgctattactttagccggtaattatataacgcagttcattcagcagcgggatcttgattttttcgcactttgtgaagtatctgaagatgaatcctgttttcttaatgatttagctaaaaaagaaaatcttacatttatagatttaaccagctctgttggtcgcattcttatcgacatctctgttatttataatcctgaaaaattatcctatgtagaacatactcatctgacagaagtccagcccgatgggaagtcattacgggcaggtgtaaaagttatatttaaagaactgaaaaacaatgacgagatcgttttttatttatcacactggccatcaaaactcagaaataatgaatctgtccgcgaaagcattgctacttatataagaaatgatattaataatattctggataaaaatatagatactaaaataatttgtatgggtgattataatgcccaaccttactcctatgcattacgtaaaaaactctttgcaacccgggattttcatctgatagaaaaaagaaaaaaactactctttaacccgttctggaaaattctgtctgatggtttgtacaataatatcggtacctattactacagcgctccttccgctaaccggtggtatgtgtttgatcaaatgattttttcatcctctttcgtaacacgaaacaaggataatcttaagcttattctcaatagtacagattgccataaagtgatcaatgacattgacaatgcagtctcagacgtggtgtatttagataactttgaccatttacctattttttgcggattacattatgagtga

SEQ ID NO: 277690 - DNA, 384 bp, Morganella morganii
gtgctgtggtggctgggtaaaagcgataatgcccggagtgagatcattaacagcgaaaaagctattgatctgccggatgcgctgacccgcctgagttcgtttgcttcagaattctgtgaagaacgagtgcaggtgtggggtaacggaagtaatttcgataatgtgatcctgcgtactgcatacgaaaattgcgcaatcactccattctggaaacactggaatgaccgggatgtgcgcaccattgtcgagcttggccgcaatgccggcatcgacccgaaaaaagatttcccgtttgttggtgaagcacacaatgcactggatgatgcattgcaccaggtgaattacgtggtcgcaatccaccagcatttatttaaaaacctctaa

SEQ ID NO: 277691 - DNA, 291 bp, Morganella morganii
atgattcagttaataactattaccccaaacgattggttaacagaggaaaagctggcggatatcactggctattcaaccagaaaaattcgcagttttcgggaaagatcatgggtccacggcagacaatggatttttgtggccacagatggaaccccgaaagaaaacagcgaaattctctataacctcccgaacataaataaatggtttgaatcacagattaaaaatcagccccggtataaaaaaccgaaaccggctgattacgcaaacctcaaaggagaaagccgtgtctaa

SEQ ID NO: 277692 - DNA, 1302 bp, Morganella morganii
gtgtctaaatctatcgtataccctgcaggcgttgaaaatcatggcggttcgctccgcatctggttcatgtttcagggtaagcggtacagagagtcactaaaactgccggacacacccaaaaacaggaaatacgcgagtgatgtccggcaatcggtactttatgagataagaactggaacatttgattattaccggcggtttccggaatcaaagaatgcactgaaattcagaaccgatgaaataaaagaaataaccgtgaagggtattattcagaagtggctggctctgaaaaccccggagatatcactgaatacccttcgcaggtatgcgtgcaagctggaaacgtgctggacaatccttggtgaagaccggcacttagagtcattaacccgtgaagacatcctggatctgagaaatacacttttaaacggcctccaccggccggccaggggaagaaaatttatttccagaggtcgcacggtggcgacagtgaacgattaccttgtctgctgtaaaggtgtattaaaatttgcgtatgaaaacggatacctcggtacagatcttacactgggtgtcagtaagctgaaaaaatcacggacaatcccggacccattttcacaggatgagtttaaaagactcattaatgcatgtacaaatcagcaatcagttaacctgtggacggttgctttttataccgggatacgccacggtgagctatcagcactcgcctgggaagatgtagatctcgaagccggaactatcacagtgagaagaaactggaccagtgttaaactgttcaccctgccaaaaacagatgcaggtactgatcgggttatatctctgcttgatccggccaaaaatgcgctacaatcgcagcgggagctgacgctgctgcgtccgccggtaaaaattagcgtacatctccgtgagcatggaaaaacacgaacggataaatgtacattcgttttcgatcctaatctgtatgctcgcgggaaaaccgaaaaaacaaactgttactcaggtacatccatcagtgatatatggagcagagcaatacgtaaagcagggctgaggcaccgcaatgcctatcagacacggcatacttatgcgtgctggatgctggcagccggggcaaacccatcctttattgcttcgcagatgggccacacatcagcacaaatgatttttagtgtttacgggaactggatgcagggcaacaatgaaactcaggtggctttactaaatgagaaacttagtcataatgccccacagatgccccataaactaaaagctgttaaataa

SEQ ID NO: 277693 - DNA, 1647 bp, Morganella morganii
atgcaccgtgtcggcaaaattgtgccgccgaagcgtcatatactgaaagatatctctctgagtttcttcccgggcgccaaaatcggtgttctcggcctgaatggtgccggtaaatcaaccctgctgcgcatcatggcaggtgtggataccgatattgagggcgaagcacgtccgcagcccggcctgaacatcggctatctgccgcaggaaccgaaactgaatccggaacacactgtccgtgaagcggttgaagaagcggttgcggaagtgaaaaatgccctgacccgtctggatgaagtgtacgcgctgtacgccgatccggatgcggattttgacaaactcgccaaagagcagggtgagctggaagcgattatccagtctcatgacggtcataatctggataaccagctggaacgtgcggcagatgccctgcgtttaccggcctgggatgccaaaatcggtaatctgtccgggggtgagcgccgccgtgtggctatctgccgcctgctgctggaaaaaccggatatgttgctgctcgacgaaccgaccaaccacctggatgcggaatctgtcgcttggctggaacgcttcctgcacgactacgagggcaccgttgtggcgatcacccacgaccgttacttccttgataacgtcgccggctggatcctcgagcttgaccgcggtgaaggtattccgtgggaaggaaactactccagctggctggagcagaaagatgcccgtctggcacaggaagcgtcttctgaagctgcccgccgcaagtctatcgagaaagagctggagtggatccgtcagaatccgaagggccgtcaatccaaaggcaaggcccgtctggcccgctttgaggaactgaacagcgtcgagtaccagaaacgtaatgagaccaacgaactctttattccgcctggtccgcgtctgggtgacaaagttctggaagtggaaaacctgaccaaatcctatgatggccgtaccctgatcgataacctgagtttctcgctgccgaaaggggcgattgtcgggattatcgggccgaacggcgcgggtaaatccaccctgttccgtatgatcagcggcaaagaacagccggattccggtactatcactctcggtgataccgtgactatcgcgtctgttgatcagttccgtgatgccatggatgataagaaaaccgtctgggaagaagtgtccggcgggcaggatatcatgcgtatcggcaccactgagatcccgagccgtgcttatgtcggacgctttaacttcaaaggcgttgaccagggcaaacgtgtcggtgagttatccggtggtgagcgcggccgtctgcatctggccaaactgctgcaggtcggcggcaacatgctgctgctcgatgaaccaaccaacgacctggatatcgaaaccctgcgggcactggaaaacgccctgctggaattcccgggctgcgctatggtcatttcccatgaccgctggttccttgaccgtatcgccacccatatcatcgactatcaggatgagggcaaagtggagttcttcgaaggtaacttcagtgaatatgaagattacaagaaacgaactctcggcgaggccgcactggagccgcaccgcatcaagtacaaacgtatgaccaaatag

SEQ ID NO: 277694 - DNA, 2787 bp, Morganella morganii
atgacacttccggaaatgataaaaatgacaataaaaccatcaccattcagcatcagggcggccagttctgccattgtgctggcactcgggctgacagcggcaccggccggagccgcagatctcacgcttgatctgcccgaacaggcactgagccgttcactgaacaccatcgcacagaagggacaaatccagttactgtatgatgccggacaactcggcgcactgcgggcaccggctctgcacggcagctattccgcacagaccgccatccggacactgctggcaggctccggcctgacgctggtgcagcagggcagcagctatgttatccgcccgctgacaaccgaagcggaaaccattttaatcccggaaacccgggttcagggcgaactggcttaccatccggccacggatgtcatgtctgccccgcaatacattactgcggaggagatccgccagcgcaataccggcgacggcaacgtcacggaactgctgcgcaccaacccggctgtacagttcgccggtaatgacagttcgtccctcaaccagggcgaaatcaaaccatcacggatttccattcacggcgcatccagtttccagaacgcctataaactcgacggcatcagttttaacaacgatttcgacccggcaaaagataccctgggtgaaacctccacccgtctggacagcggcgaccagggcatgtatatagacagccgtctgatcgacagcgtgacggtttacgataacaacatcccggtggaattcggcggctttaccggcggcagtgtggatgtcaccagccgccgctggaacggcgaaaacagcggccatatgtattaccgcaccacccgctcctcctggaatcatctgtttgaggattcctcacagccgattgattcatcaaaaaatgatatcagtcacccggcccgtttccagaatgaatataacaaacacgatttcggcggctggtttgaagtcggtgtaacagaaaacagcggcctgacggtatccgcctcccgccgtacctccaccatcccggccaatacctcggtactgatggcagtgatggaaggtgaagaactggtcggttatgagtttgataagcgcaaacgcaaccagaaacgtacctcagacaacctgtttgtgaagtatgcaatggatctctcgccggtcaccacggcggatatttccctgaattattctgactacaaggcgcgtttattcgcctccaatattgccaactccggttatgacaataaccacaaagggttaggtgtgaccggtgttctgaaacaccagaccagcctggctgatctggaattcaccctgggttatcagaaactgaaagataaccgcgtgaatgacgagcagaatttctatgaaatgaagaaccggtcaccggacggaaaaacgattgttaacaccaaaatgggcggactgggtgatctgcggaccgagcaggacaatgtcaccaccaaagccgtcgcccgtttcctgccgtcagaaggcttcgggatcacacaccgcccgacactcgggatggaatccacccataccaaaggccgctatatccgcgataagtcgcactatcacaccagcgaggactatgtcagctatgcggaatgggggtttgaggatccggtagtcaacaagcaccgcttcctgccgggaaccgcctctgtcagttataacaactactccctgtttgccgatgacaatattgaaatcggccgcctgacactgcgtccgggtgtccgtgttgaccgggatgattttgtccggcaaaccaatatcgcgccgcgcctggccgccacttacgacctgttcggtaataaagaaacattgctgatcgccggtgccaaccgttattacggccgctccatgctgacttatgccctgtacggcgcgcagaatgccgggctggaaaaatgctatatgtgcggctttatgggcatggatccgacctgggataaaaccaatgattatgaaggcctggattcactgaaaaccccgtataacgatgagatttccctcggcctgcaacaggaaatcctcagcaccacctggcgtctgacctatgtccaccgtgaaggttacgatgaagtccgcagccgcaccaaatacaacaacctgaccgggtcagataaatactccgataaaggaaaaatccgtacctttgataatgccggacgcagcaaacatgactccgttaccctggctgtcagcaacagtcagccgtgggaatggggacaggcaacccatgtctttacctcctcaatcgtctggcaggataccaaaaccaacttcccgtctgaccagggctatgccttctttgaaccgggcactgccattaactccgacaaagtgatgtacggcggcaaagtgatcgatgtcagtgatctgcctgccagtaactttaactcgccgctgaagctgaacgttgagctgaccagtgactgggataactacaacatttcctggtacaaccgcctgcaatggtggggcgcgcgtaatcaggctgtccgtcatgacaacgaagtggtccgtgatccgcagtacggcgagttacgtgtctatcagaaagagcatttcgcatccaaattcacctgggatacccgcgtgaactggaaaccggagtttgcttacggtgcgtctgtctcactggaagtgaataacgtcctgaataacaaaaatgtcgcggatacctttatctacgccggtaacaaggtgattgcctatgatccgggccgtcagttctggttacagctgaattacgatttttaa

SEQ ID NO: 277695 - DNA, 207 bp, Morganella morganii
atgatgctgaggggggagaaatccccccgtttctctctgttgcaggtaacggttaatcaggcaccttattttactttattattaacattaattttatccataacctacgctaaaattctcaataaaacctgtgactttagttttaaaattacgataggaaatggtgtttcagaaattcataccagacctgataacagtaaaaaataa

SEQ ID NO: 277696 - DNA, 1581 bp, Morganella morganii
gtgaaaaaaactctgctttgctgcgcggcattttctgcattttccgcgcaggcctcttcttcctgtcagtcactttccgttccggatgaaaaacagacgatgacgattaccggcacatttgatcacaacggacaggcctgtgtgcagttgccgttgtcagaaaaacaggtagtgattgcggaaagtgagaatatccgtgatttgtcactctatgacagtcagatgacaccccgccggacgctgcttaccgacaatcctgtcacagaaatgcaatctgtgacattcacattaccgtttgatgacacctggacactgacctcacaggggataccgggctctgaatggaagttggcgcttactaactatccgtatcagccggtagctgaaaacatctccctgccggtggacagtgtgcgcctgcaacagctgataacgctggttaacgggggcgatacctcggctttctggcaggcggtgacagaaaccccgttggttgaggagtatgacgagcaccacaagcggatcacatttctctggcgtggtgcgaaagtgaatgcttacatacttggtgcgccttccggacagcatgatccgatggccagactgaatgataccgatatctggtatcgctcctacattgttcccgcagagactgtcagtcagtataaaattgccccggatattccgcagcttgacagttccgttgaaggtgcccgccgtaaagcgctgctgagcacggcacaggcggatccgcgtaacccgctgagtgcgggtgccgacggggcagatgaatttaatcgccatgccattattgcgttagataacaacagagtgtgtgatttccgggcgcccggacaacaaccggtttttggtacggtgacgctgcatcagctgcacagcgatatcctgaataatcagcgggaaattgcggtgtataccccgccggagccgggtgcggagccctggttgctggtgctgtttgacgggcagatataccgcaaaaactatcatatcgtcacatttattgatcagtgggtgaagcgcggggaaattccgccgctgtatgtggtgatggtggacagtatcagcagtgagcagcgcggcaaagagttgccgccgaatgagcaattcccgcagtttctggacaaagagttgatgccgtggctggcacagcagggtattaatatcccggcggggcggaccattgtttccggcagcagttacggtggccttgcgtcttcctggaatgcgatgaaattacctcaccgtttcggcaatgtgctgagtatgtccggttcttactggtggtcaccggagggagagccgccggaatggctgattcgcgagtttgcaggtactcacaaacttccgctgcggttttttcttgaggccggtgtgtttgaaacccgtgccggtgccggcgggattttgcataacaaccgggcgctgtatcaggttttacaggaaaaaggttacgaggttacccgtgaggagcgcccgggtgggcatgactatgtctcatggtgcgaaaccctgcattccgggctgatgcatctgactgacacaaagaggtcacaatag

SEQ ID NO: 277697 - DNA, 816 bp, Morganella morganii
atgttataccaagtgacttgcacgggttcacacagtgccatttcttcgccggtgtcggtgtctggtcatattctttgcgtctggccggatggccggataacaaaccggtatggacaggaagttgtccgtgccagcctttcagcgcggcaggtaaaggaactgcatttactgatgagcggcacctttggccggcattcttccacctcatcagcgagtgcaagcctggcattatctttggcgaacaggttgcaagtaaagacggcctcgcttggctcgaccttgttcaaactgacctggaagcagcgggttacaccatcggggcgcaggatttatgcgctgcgggcttcggtgcgccgcatcaaagacagcgattattctgggtggccgacaccattagcgggcagttaccggggggcggggatatccgggagacagggaggaatgaatctacagacagctgcgcaactggctggatggccaacaccaaaggcgagcgacacaaaaggggcatatcaggatccgcagaagataattgccagaaaaaatgcgggtcggcaatcgaacttgcaggatttcgccaaattggccggttggacaacgccgagtgcatcggacggcagacggggaggaacaggaataacgccgggaatgacgggcagcagcttagcccagcagtcaaaaatgactttaccagtccgacgaacggctactggcgagatgctgattggttgttctgccgggatggattctggcggccagttgagcccggaacattcccgttggctaatggggttacctccagagtgggaaaaataa

SEQ ID NO: 277698 - DNA, 222 bp, Morganella morganii
atgtctgacgagatcgaccgtgccaatgaccacgctgcgcttgtgcttgaaagtcagatagccgccgcccgtattactgctgcgggtgtgtcagcatttgaatgtgaggggtgcggtaagccaatccctgaaccacgccgccgcgctgtggtcggctgcaccatgtgcattgattgccaggcaattgatgaactgaaaaataaacattaccggagcgtgtga

SEQ ID NO: 277699 - DNA, 252 bp, Morganella morganii
atgaccagacctgtacctgttttcataccagccgaacaatcagaaacagataacgcagtaattatcgaatgtgtaattaaacaaaaccgcatggatgaacgtcgtactgttgctgatcgctacgcatcacgtatgcgcacatttgccgcaatagccgtacgggacaaattggattgctatcaaatggctcagttacttgaaagcgaagccagtgaatcagaacgccagattcaggagtggaaccatgtctga

SEQ ID NO: 277700 - DNA, 348 bp, Morganella morganii
atggaacaggcttatgatatcggtgaaccacgtgcatttcctattccaatcagtaagcgtgttgaaggtttaaaccatatagcaaaattacgttctgagcgtttcggaattgaaaataaagaactggaatcattctttaaagaaatgcgcgaccgttttgacccgatgcatcaggaaaataaaaaattccttggcgtcattttatatatggcaaatatcgaaaaagaaagacacgattgtgattacaatgatttcagcagtaaagaaatttttaatattgtaaaagcgattaatcatatcagagcaatcagcgcgatattaccgaaacacctagttttaccacagtaa

SEQ ID NO: 277701 - DNA, 132 bp, Morganella morganii
atgaatatccaatttcagcacaaattaactggcgagtcagtcatgcgccattcacgcaaaaaacatacctgcgcagataaagtggcgctgattgtttctttaattgcgttggttcttatcatcgttaagtga

SEQ ID NO: 277702 - DNA, 222 bp, Morganella morganii
atgaaaggttgtttcagccaaagaaatattaaacaagcacggcgttatgcggttgcattgggtaagaaaaggaaaaaggaagataaagtaacaaaagaaattaaccgctcgatagagtttgctatttgtacaggacttaccgtaccagaaatacaaacactattagccaatgcaataaaaaatattggtgacatctacgagttagaagaaatcccattctga

SEQ ID NO: 277703 - DNA, 198 bp, Morganella morganii
atggttaagcaaataagcacacacagccaggcatatcgcggatttattattatcaccttaccgcgtaacgcgacacggaaaataacgcagtatcacgtcaccctgtctgatggggctgatagctgtcattcgttcgggaagtttgacgcactggcgcaggcgacgggttttatagattcattgttcgataagaaataa

SEQ ID NO: 277704 - DNA, 369 bp, Morganella morganii
atgtcaacatcaaaagaggaactattgttcctaatcggtcagcggataagaagagaacgagagaattcaggctttagccaagaagaaatagcgaaaaatatcggagtgtccacaaggacatggggcaagtatgagcgcggtgaaacggttcccgatgcaacagttttggctatgctatctggtttatatggttttgacaccaactttattttaaccggacgggcatctataccaacggatataactcaagaagagcaaattttaatagaaaattaccgcaacatgaatgatgcggcacgtttaaatatgcagacggttagctctgcgttcgcgcaatctgaattagtcggaaaaaaaagcgcaaaatag

SEQ ID NO: 277705 - DNA, 342 bp, Morganella morganii
atgaagaaaatattactttcatgcatcttgttaatggtaacttctactgtttccgctatgccccttaaagcaatttcaaaagatgattatggcgataagtgggcttttacaagtgatgaagtccagttgcagtgtattgatggtggtgcttttgttatggactatgacacaaataatgtttacgccatgacaggactggccaatcaattagcgaaaaaaggaaagtatcctgctgatgacattaacggctcttctttctggaaagaaaatccggatatgcctggtgcaaaaataagtttggctccgtttatttctgatgctctcgcgttgtgtgacaaataa

SEQ ID NO: 277706 - DNA, 1014 bp, Morganella morganii
gtggccgtaagtaaattacctaatggaaaatggttgtgtcagtgtttcccggaaggcagggacggaaagcgtatacgaaagacttttgccaccaaaggcgaagctcttggttatgaacgccgcattatgcaggaagcggaagaaagcaacctgtattctgttaatgactctaatgctgttctgctcagtgacttaattaaccgctggtatgatatgcatggtaaaacgctgagcgacggtgaagcacgcaaaggtaaacttgacgctatatgcgaacggctcggcgatccgctagcctctgactttgataaaaacctttttgcccaataccgagaacatcggttaaaaggcaaatggaatgcgaagggcagaggatcaccaaaacaatcaaccgtcaaccgtgagcaatcgtatcttcacgccgtattttcagagctccggcgcttgggcgaatggactggcgataacccgcttgatggtgttcgccagtttaaagaatccgatcaggagctggcattcttatacgcagatgatataaaaaggctgctggcagcatgtgatgaatccagtaataaagatttaggcattgttgtccggatttgcctggcaaccggtgcacgctggggtgaagcgcaaggcttaacgcaatcacacgtaatgccttgcaaagtgacttatacacaaaccaaatccaagaagaaccgaaccgttccgatatcaagaaccttatttgataaattacccaaacggcgaggggctttattttctaactgctacgatgcttttgaacgtgcattaaaaaaagccaatatttcattaccggaaggacagagaactcacgttctaaggcatacatttgccagtcactttatgatgaatggcggaaatatattagttttgcaacagatattgggtcatagctcaataatgatgacgatgcggtatgcacatttttccccggatcatcttgacgccgctgtaaccttaaatccgcttgatgaaatagaaaaataa

SEQ ID NO: 277707 - DNA, 525 bp, Morganella morganii
atgaaacagttattttcggtgttatttctgtggagcatctccctttctgcttcagctgataccgatccggctgtactgcgctctccaccggatgcagcaaatgcaaaattggtaatttccagcctcagacaggcaaagatcacgccggataacccgttgttttcagagtttaacgatctggcatttgatgccatgcataataaaaattacacatccgctatcaaattcttttctgagaatatgcttcgttatccgtcacctcagatgattataaattataccgatgcaaatcttatgatgctgacggataataagaataccccgggcagctgcgccccttcaggtgaggatttacaaacagcattgcgttattaccattccgctctgctcactgataatactgttaatttattatcctgtgatgaaagaaaaaatctgactgagaaaatcacctgccttgaggcatttcagaaaacaccggcacctgcagaattcaggtgccggatattacatccggggtcataa

SEQ ID NO: 277708 - DNA, 426 bp, Morganella morganii
atggataattcatcaccggataatgttcagatccgggagtttgtggaacgcttaaaaacggtgacagggtcgcgtttttttcattatctgaatgataagcaagttaaaaccacgtgtctgatgtgcgggcataatggcaggcaggttatagatgaaacaaactatacgacagcgcaggaccggctggataacaaacctccgcgtacgttcgtcacattttattaccacactccggggattccggcagacagtataaaccattattattatcgtcttatctgtgataactgtggttttgttactcagcacagcgccagatatgtcataaactggctggatgaagaagcactccgggaacagcatctgtcggatgctgaatgggtaaatatgccggaaccggctactgcagaaccggacgaagaataa

SEQ ID NO: 277709 - DNA, 261 bp, Morganella morganii
atgttctgtccggatattttttcatttcccctcccgtttttccggcggaaagcaaatgttccccggacagttctcgtctgtattgtcagcggagtaacccgtgaatccggatgctgtgatgttccggaaaaaataccgtcagaggggatcagtttttttgaaaatgataaaacagacggtatattcctgagtccggtcattttctcttttccgttaatcgtgttttccctgctgacacagataaaggttctcgtcaggtaa

SEQ ID NO: 277710 - DNA, 783 bp, Morganella morganii
atgctggaagctgaacaaaatgtaatcatatttagcttctcactgaaaattaccggtgggctgaaatatcctgctgcctgtaataatgaaatattccgtcagcgctatcaggcggtaataacggattatctggaaagagagcattgccgtgagcctgcgcggcgatatgcacataatattgcctgcggacgttttttgtggcggaacctggttggcgcagagcatattgaggtggttgtggataatctcagcgcggaaaaaaaacagcagtgggtatttgatgcacgcaaatacagccttcgtcattttgagcagacggataatatagccggcgacctggggagacatattgccgcagcactgagttgcgatgatggtgcattattactggctgtttcagccagagtgataaccggaaaagggcaggaaatttatcccagttgtgaatttgtgatgaataaaagaaagggggggagcagccggatactctgccatattgacggcactgcgggaatgcattcacaaaaaatcggcaatgctttgcgctcagtggatacctggtatccggccttttctgatttaaccgcaggggcgggcgttatcgcggccgatccctatggcgcggtcacacatctgggggcagtattccgtccgccggggtcagggcaggatttttatacactctttgaaaaatgggtcagcggaaaaaaactcgctgaacatgaagaaaattatgtcgtggcagtgttaattcgcggcggtgttttcggtggcggagggtaa

SEQ ID NO: 277711 - DNA, 735 bp, Morganella morganii
atgtctcagaatatttatgataatcctgatttctttgccggttatgccacgctgccccgctcagcagaaggactggacggcgcgccggagtggactgccatgcagacattgctgccgtcactggccgggaagtcagtgatcgacctggggtgcgggtatggctggttctgccgctgggcaaaagagcagggcgctgcccgggtgaccggttttgatctgtcagagaaaatgctggcgaaagccgcatcgatgaccacggatccggatattacctggctgcgtgctgatctcgagacactgcaattaccggcggcacaaagtgatgtgatttacagctcactggcactgcattatctgcgtgatatcccggcactgtttgccacgctgtttcaggcgctggtcgcgggcggcagtctgattttttccgcagaacacccgatctacacagctcccgtcattcagaactggtgtacggatagtgcaggtaataaagcctggccggtcaatcagtatcagcaggaaggcgtcaggatcagcaactggtttgccgacggtgtggaaaagcagcaccggaaattatccacctggataaatgcactgattacagccggttttgaaatcaccgccatgaatgagtgggggccgtcagcggcacagattgccgccaacccggcactggatgaagaaaaagaacggccgatgatctttctgctcagcgcccgcaagccggaatag

SEQ ID NO: 277712 - DNA, 309 bp, Morganella morganii
atgatcattaaaaatgagagtcagttgctgccgcaccgggttgatcctttcaccgttctgacagaagtcacccggaaagataacgtgattatcctgaattatcaggttactggtctgccgccggaattattcagagaagaaaaatcggtaaataaaatgcagggcattctgacagggaaatattgtcaggactcggccatcatgcggttatggcaactggcgttcccgtcggggttacagcataactatttttcggacggcacccgggtgatgcagataaatattaaaccatcagattacggggcgtaa

SEQ ID NO: 277713 - DNA, 243 bp, Morganella morganii
ttgctgagatattccctgcttttgcttttaataacgatgtctgccgcacaggcaaaaattgatattacagctatcgaacagtgtaaatacagcgggcagttaacccctgaagatattgccggacagcccggcgacggtgaaattcatcttatttaccggacagacaccacgggaagagcctatccggtaaaaataaccaaaaatacagaaaacacactgacaaatttacgccccgtaatctga

SEQ ID NO: 277714 - DNA, 630 bp, Morganella morganii
atgaaaacagtactctctttactggaaaactatctgaacggactggataatgaagaacaaataattgaggcactcaaccggataaaactttttttacatcagcgcagcccgtttaaagatgaaccggtcgattgtgtgctgtgggtaaagcgggcacaggtgaccgcaaatgattataatccgaacgtgatgtcgccttcggagaaaaaattgctggaaacgtctctgaccaaagacggttatacccagccggttgttgtgctgccatctccgcacgaccgctcagacttgcaggtggttgatggctatcatcgttatttattaagccggaaaaatgcactgaaaaaacgacttaacggatacctgccggtaacgctgctcgatacggaaaatcacggagttgctgaacagatggccgttactatccgccataaccgggcccgcggacagcatcaggttaccgcgatgtcagatattgtccgggacttatcacgactgggctggagcgatgaaagaatcggagaggaactgggaatgtcgccggatgaagtattacggcttaagcaaatcagcggtctggctgaactattttctgagcgggaattttctgaagcctggacagtaaaataa

SEQ ID NO: 277715 - DNA, 1227 bp, Morganella morganii
atgtcctgcaaacgtaaaattccgctcggagaaaacgtgctggatgcagcacaaaagcggattgaatggctgtttgatacttttgaacaaatcaccctttccttttccggcggcaaagactccaccgttctttttcatctggttgcagcagaggccagaagacggcaccggaaattcaatgtcatgtttctcgactgggaagtacagtattccgctactatcagccatgttgctgccatgaaatcactctatgccgactgtactcagcggttttactggatagcgctgcctgtcaccaccgaaagtggtatttcccagtatgaaccggcctggacggcctgggaacccggtaaaaaatgggtccggcaaccaccggaagatgccattactgaccctgatttctttcccttctatcatccggggattatttttgaagattttactccctcatttaatcagtggatcaccggagatcatcacagctctgtcatactgctggggatccgcgccgatgaatcattaaaccggtttctcgccatcagtaataaccggaaactgcgttatgccgatgatatcccgtggacaaccgcatcaccggaaggattctattatatgggttacccgatttatgactggcatgtgaaagatatctggacttatatttcccgcagcagacttccttacaatacgatttatgatctgatgcatcaggccggtgtcagtctcagtaaaatgcggatctgtgaacccttcggcccggaacagcgcagagggttgtggctgtatcatgtcctggagccggaaacatggagccttgcctgtgcgcgggtcagtggtgcggatgccggtatgttgtacacacgacccggaaataaagccggttttttcggttcccgccaaatcagcaagcctgccggtcatacctggaaatcctacgcccattttttactggccagcctgccggaaaaaaccgcagaacactaccggaacaaaattgcggtctatctgcactggtatgcagagcgggattatccggacgggatcccggatgaacaatccggtgatacaggcagtaaagatattccgtcctggcgacgggtctgcaaaacccttttacgtaatgatttctggtgccgctcactggcattcagcccgaccaaatctcattgctacgacaagtattgcaggcgcatacaggcaaaacgcaaagactggcaactgatatag

SEQ ID NO: 277716 - DNA, 693 bp, Morganella morganii
atgttaattaataaagatcccctttgtgtacgcagagaagttaactcgtttaaaaacaaattaaacgagttaattccacatgaaagcttagctagcaagaactcactagttagtgtgtttaaacacgctgcattctacaatacattaacattgcttaatgattcagtaaatcataaaaactacattaacggtatgacttatgacgccttaaactgcattatagcgctactcaatcaaagagagagaaccttacaattaaatatacgctcaattattgagcacatcgctaggattgcactaaataaatcccatgctggaaatgattttgatggaacggttagaaggcgaaactttgactatcttaagcaaaataaaccagaagataattggaaatatttacatgattcttatattagagcatgccaatacattcattcatccccagcagccaacttaaatatagcagccacatttacagagctacttgaaggcgattttacgtcaaaaatacataagcaaattaatattacccagcgtattattagtgaagcaacaaaaatacttattcgatatttagaaccagatatatcaaactcatttttaagaacacaaagagaactggaatttttaatcggaaaatctgcctttgttctttataaaaccttaaaagaaactagggtatcaaggtggtaa

SEQ ID NO: 277717 - DNA, 384 bp, Morganella morganii
atggataatgtatttttattgttacgaaaattaaagcatggcaatgtagccaaagaaaatttcataggcattatcaatatattggtactatccaatgagttattcaaaaggaatgctgatgtcgcagactacgtcagacaaacttttgatataaaattgttaccatatgctgttaggtctagaaccattattattgctaaactatgccgagttctcgtacagatcactgacatggaatcaagaaaattatctaagaaaacatatgattatatagcctctaactttgaaatagataataataaaatttctttgacaaaaaataaaaattcaaatgcactagccaatatggaaaagtggattgatggtattttaagtaaaaaataa

SEQ ID NO: 277718 - DNA, 846 bp, Morganella morganii
atggctgcgccagttataagttttattaatatgaaaggtggtgttggaaaaaccacattatgtgttggtatggctgagtatctagctaactacatgggaaaaaaaattttagttattgacgtagacccacaattcaacgcaacacaatcactaatggggaagtatgggaaagttgatgactatatggaaaaccatttatcaaatggcaatactatcagaaagatttttgagaccccctcaaatgttatggagagatcaaaaatagccagtccggaagatgtaattacaaaaatagatgataacttagatatcatacttggtgatattaacataatatttgatacatcacaggaatcagtgagagttaataaaataaataattttattaataaaaataatcttaaaaatcattatgacttcatatttatagacagtcctcctactatctctctttttactgatgccgcattaattgcctctaattattatcttgtcccggtaaaaatagaccattactcagttcttggagccaccagtttaataagtgccattgatacacttcaagataatcataataaaacccttatacatattgggttcatatacacaaatactgatgatgatttcactcaaaaaaccacgaaaataaaagaacaatttgaagaaaaatcaccatttgatagtatgtacttttttaataatagactatcctatgttagaaatctaatggttggtgctcagggtaatatcccatctcattatgaaagatctcgtaatgacattgctaatatctgtgatgaattcctatcaagaatgaaccaaattgctgaggacacaaatggataa

SEQ ID NO: 277719 - DNA, 1173 bp, Morganella morganii
atggcacgacctcgcaagcgggaattccggcatctgccggacttcctttactatgataagtcagcaaaatgttaccgcttcatacttgtaaacggtgtccgtaaaagtgttggtactgacaaggcaaaagctatagccattgcccgtgaatacaacaatattatgcgtcaggaacgtacaatcagcgttacctcgctgatcactgactctggtggtgttaatggggagtcactaccactcgctgagcattttgatcggctgttcgaacggattattcgtgacgaacaaccgtctaaaagtacccagtctgactggataaaagatgccgaacgtgtgaaagaattttttaaagatatcccgtctgccgagatcaccctggagcatgtgaacggatttatcgctgaataccatgctgacgcatcagcaaacgttcagaaccggaaagtcggatttttgaagaagattttcagttacgcaatggatgaatcgctgatgctggataacccggcagaacgcaaaaaaatgaagcgtgtcgacagtaaacgccggcggcgattgtcgtatgatgatttcctgaaaatcagagcggctgctgaaccatggctccgtactgctatggatctggccctgcagacaacacaggcacggcttgaagtgtcgcgcataaaatataacattaaagcaccgaaggaaaacacctgcggatgcgtctggttcccagaggaaagaaacgggatctacgggatgctgtacattcaccggcagaaagtacaacacaaggaagctgcccatgtggcaataccgatcggtaaagttataaaggaaattattgataacagccgcgataacgttgccagtccgtacattgttcaccgcgttcctgagcggttaccaaacaaaataagccagtatgtaaaccaccccacacaggtggcaccggattatgtcagccggggattctcaaaagtcagagataaagttggggttggcgcacaccttgaaccagatgagaggccaacttttcatgagatcagagcgctggccgcatttatgtttaaacaacgcggatttgatccacaagccaggatggcacacagtgacgcggaatcaacaaaaatatacactgaaaatcatgtagaatgggttgaagtaccacactgtgaaatcgcttaa

SEQ ID NO: 277720 - DNA, 216 bp, Morganella morganii
atggctatcggaaaacttatgaaagccagcgcatgggcaaaaagagaatttgagacaggatcaatacccgataacagaaccgtccggcgctggatagaaatcggatcgctgaaaggccgaattgttgacggaactattcttgttcattcatctgaacgatggggggttgagtctgaggtttcctcatgcgtaagcgatctgattaaggcttcataa

SEQ ID NO: 277721 - DNA, 2814 bp, Morganella morganii
atgagcagaaacctccgtttacaggtcgtgttaaatgccgtcgataaattaacccggccgttccgcagtgcgcaggaatccaacaaacgactggcgggcgctgtccgccagtcccgcgatgcactgaaagacctgaaccgtcaggccggacaaattgacggcttccgtaaaacaaaacagcaactcaccgaaacacagcaggcctatcaggcggcaacacaacgcgccgccgccctcgcccgcgaaatgaacgcctccggcaatccgacacggcaacaggccgaagcgcttaaacgcgcgcagcgtgaagccggtcaactgaaaaaccggtttgaacaactacagcgatccacccagcaacagcgcaccgccttacaggctaacggcatctcgacaacccaactcggacaggcacagcgccgcctgaacagcgacattgcccgcaccactcagcaactgcagcggcaggagcagcagctgcgccgcagcgccgaacaggagcgccggatggcggcggccaaaggcagctatcagaaaacgatggatgtcaggaataaaatggccggtaccggcgcggcagcgatggcgaccggcggtgcggcgttatatgccgggaagaaatttatggcgccgggctatgagtttgaggtcgggatgtcaaaggtgcaggcgctgacccggcttgataagaactcagaagagtataaagcactgcgcgaacaggcgcgacagctgggagcgaccacggcatttacagcaaacgaagttgcgcaggggcaatcgttctatgctatggccggatttaaaccggagcagatacagaacgccatgaaaggcaccctgtcgatgtcccttgccggtgatatcgacctcgccactacagccgatatcggatccaatatcctgaccgggttcaaactgaactctgacgaaatgaaccgcgtcagtgatacgctcgttgccacctttacccggtcaaacaccaacctgaatatgctgggcgacacgatgaaatatgtcgcgccggtcgcgtccgggctgggcgttgatctggaaaccgccgctgttgccgccggtaaactgggcgatgccggtatacagggcagtatggcaggtaccagtctgcgatctattcttggtcgcctcgctgaaccgccaaaacaggctgctgacgcactggaagaactgaacatcaagacccgtgatgccaagggcaacttacgcggcctgccggaaatccttgctgatctggataaaaagacaaagaaaatgggtaccgcgcagcgcgccgggtacttcaaacacattgcgggtgaggaagcattctccgctctgtcagtgctgacagaccaggcaggcagcggcgagctgcagaaaatgatcgccgaagtcaaagcggccaaaggtgaggcgcagaaagtcgctgacaccatgaccaacaaccttgacggcgatttaaaaaacctgacctctgcatgggaagatgtcggtattcagatattcggcggtgttgacagcccgctgcgcgatatcgcgaagtccattaccgatattatcagtaaggtcggggagtgggcgaaacgcaatccggagctggcgaacacgctgacgaaaattgcactggcgctgggcgtgatcctcgccgtgggcggcgcgattgttctgatgctggccgcgatgctcggcccggtcgcaatgctgaaactgagcctgtcggtgctgggtatcaagggtgccggtgcttttggtctgctggctaaaggattaaaagctgtcggactggccttattcggtataggaaaagctctgctgacgaacccgttatttcttgcggcagcggcgattgccgccatagcctacgcaatatacaaaaactgggacactattgtcgctttctttaaaaaagtatgggcggaagtggttcgtatcttttcctctgcgtgggactcaatatccgcttatttcagcggcatgtggacaagcatcagtaacgcctgttctgccgcatggaactggatcaccaatattgtcaccggggcatgggcgacgattaaaaactttttcctgcaatattctctgccggagattatttaccgcaactgggacggtataaaaaaatacatgtctgagctgtgggaaaccgtgaaaaccaccatcaaaaccaagtgggatcaaatcatcacggatattcagaacctaccggcaaccatgaagcaggccgcatctgacatgatagacagcgtcattaacggcattaacgaaaagtgggaagacctgaagaataaatttgccgaaataaagcaaatggcaaaagacgctcttacgccggactggctgaaggaagcgaaacaggatccgaagttcgtggcggcagtagaggctacaaaacagagcacaacaaccggcggcatccgcaatgccaactggacgataccggataagaaatttgccggggcctatgattccggcgggcatattccgcgcggccagtggggtattgtcggtgaaaacgggccggaagtagtggacggcccggcaaatgtgaccggccggaaaaatactgcagcactggcaatgctggcactgagtacgctgtcccagccgatagccgcagcaccggcacaaaccgccggcggttctgtcagcagcgcgtattcatcacagcagaacgccgcgccggtcatcaacatctacccgacaccggcgcattccgcacaggatatcgcccgcgaagttgcccgccagctggacgcgcacgcacgccgacagcaggcaagccgccgcagcgggtacagtgacactgaggagttttaa

SEQ ID NO: 277722 - DNA, 1173 bp, Morganella morganii
atggcacaagattatcatcacggcgtgcgggtcattgaaattaatgacggtacacgccctatccgcacggtcagtacggcaattgtcggcatggtctgtaccgctgacgatgcggatgcaaaacaattcccgctgaataaaccagtactggtgacggatatccgttccgcactcggcaaagccggtgataccggaacactggcgcactcactccaggcaatcagcgaccagaccaaaccggtaacggttgttgtccgcgttgaacagggtgaaagtgaagctgaaaccacatcaaatattatcggcggcacgactgacgacggacacaaaaccggcatgcaggcgctgctcgtcgcaaaagcacataccggcgttaagccccgcattattggtgttcccgggcatgacacgcaggcggtcacatcaaaactggtcacaattgctcagacgctgagagcatttgcctatgccagcgcctacggctgccagaccattccggacgtactggactaccgcaaaaacttcagtcagcgtgaactgatgctgatttaccctgattttatgtcgtgggattccgtcaaaaatgcagaggccaatgcttacgccgtcgcgcgggcgctggggctgcgtgcaaaaattgacgaagaaatcggctggcataaaactctgtcaaacatcggtgtgaatggtgtaaccggtatttccgcagatatatcgtgggaattgcaggacccggcaaccgatgccggtctgctgaatgaaaatgacatcaccaccttgatccgtgaagacggtttccgtttctggggttcccgcacctgttccgatgatccgctgtttgcctttgaaaactacacccgcaccgcgcaggtactggccgacaccatggcagaggcgcacatgtgggcggttgataagccgatgaccccgacactcgtcaaagacatgatcgacggtatcaacgccaaaatgcgcagcctgacgactcagggttatctgctcggcggtgagtgctggtttgatccggatgccaacagcaaagaagaactgaaagacgggcaggtggcgatcgattatgactacacaccggtgccaccggctgaaaatatcaaactgcgtcagcgtatcaccgacagatacctgatggatttcgcatcaaagattaaggggtaa

SEQ ID NO: 277723 - DNA, 351 bp, Morganella morganii
atgaaatattacaaaacgaaaaataatgaagtttatgcgcttgaagataatgatttagccaaagattggataaaagaaaaagtgactgaaatcaacaaagaggaggccgataacatcacgaatccgcctccaactaaagaacaactgatcgcaaaagcagaatacgataagcaggcactgattgcagaggttcagtctgaaacgcaactgctgcaaacaaaacatgctatgaaacgcatcaagccagacgaagaagccctgttaatcgcctggctggattatctggacgaactggaggcagtggacaccaccacagcgccggatatcgactggccgcagaaaccacaataa

SEQ ID NO: 277724 - DNA, 1311 bp, Morganella morganii
atgacagcaaagtatttcgctatcctgacgaactacggcgcggcacagctggcgaacgctgtcgcgctgggtacgcagatgaacatttcaaaaatggcggtcggtgacggcggcggcacactgccggttccggatccggcacagacaaaattagtccgcgaaacccgccgggcggcagtcgatcaggtatctattgacgagaaaaacccgaatttcatcattgccgaacaggtgatccctgaaaatgagggcggctggttcatccgtgaaatcggcctgtttgatgataacggaggtctgatcgcggtcggtaatgccccggaaacctacaaaccgaatttacaggaagggtcgggacggacacaggttattcagatggtgctgatggttagcagcacccaggctatcaccctgaaagtggatccgtccgtggtgctggcaacgcgggagtatgtgacaaaaagtattgatgccgcaattcaggtatcagaggctaaatctgcaaaaatttacgccactaaaactgaattaagttcaggattatcaggtaaacagccgacaggcgattacgcaaccaggacggaattaaataacggcctgtcaggtaagcagccaaccggcgactatgccacaaaaacagaagtaaacagcaaactcgccaaagacaagaacggcgcagacatcccagatacagaggcttttattaaaaaccttggtttatcggaattgctggataataagtttgataagaccggcgggaagatcacaggacagacggatattgaggcgccgggcggtcgcacccagacactgaaagcaaaagctggtacatcggtatatcaggaattgtaccttcaggatgtatttgcagcatggtgggggattatcagcgggaatcagttatgcctggagaacagaattactcggaatacgctgactatcggatctgatggtttcaaggttgatggtaaagatattgcaactgccgatcagcttttcggcgctggccagacctacaaaaacctgactgggagccgtcaaaataaagtctggtacaccaataccgacagcaagccgcgtatcgttcatattgagacaaacagaacaggtactcaatatccattcagtattgatattcagatcattcataacggagtgcagcatcgtgcggattatcgctggactacagctgatgaagtcatttgccttactgccttaataccacctggcgcacgatttagtgttaacggtgggtgggctcagcctgcggagtgggaagttttaaaattttggttggagtactcgctatga

SEQ ID NO: 277725 - DNA, 390 bp, Morganella morganii
atgttcgttcacaagcataagggcaccatcggggcgctgcggcgtgttgtggagccgctgggttatctgatcagcgttactgagtggtggaaaaccggcgaccggaacgggacattccgcctgacggtcggtgtgtcggaaaccggtattaccgaagaaacctattatgagctggagcgcctgatttttgatgcaaaacccgtcagccgtcacttgctggggttgtctatcaacctgagcacatccggacatttttactgcggtgccgccaccaacaccggtgacacgctgactgtttatccgtatatcccagaaaccgtccgggtggaaagcgcagactattttggcgcagccctgataaccattgataaagtgagagtaaacccatga

SEQ ID NO: 277726 - DNA, 534 bp, Morganella morganii
atgactaaaaatgagattattgaaaaaactggcggcataaaggaaataggattcagagacggtattaagcaatttttggtaaacaataaagataataaagttgatggattagagttgtacagtattggtattgataaaaagtacggactcacaagtgtcgaaatgatgttttatatagataatgatagtaacggtaataaggctgttgaaaaatataatgttttgaaggaggttttagtttcaaagtacggtgagcaatactcagatgagtatctgtggcgtaattataataaaggctcgatgtcatttgcagcatgtattggtaatgagcaatgtggaaaatatttttcatcatttgaagatgatataggcggcaatgctgggttgatgctgactaccgattcatctggtgaaaacgcgaatgtattcttattatataaatctcctgcaattaaaaaaataaaagaagaagccaaagccagttctgaaagcgaagtacagaaaaaagcgcaagcattatctgattcgctatag

SEQ ID NO: 277727 - DNA, 330 bp, Morganella morganii
atggaaatattcacctggaaagtaaaacccggcatgaacatagagagcgaaccccgtgttcgctctgttcgtttcggtgatggctatgagcagcgccgccctgacggcttcaatactaatcttgaaaaatacagcgttacattatcaccaaagaatgctgaggctcaggttgtcagggcttttctggaaaaacatgcgggcgtaaccgcgtttctctggaaacctcctcatcaaatgaacgcaatcaaggtattatgccgtaaatggtcattttcagtgggggcgcttagaaccgatgttaccgctgaatttgaagaggttttggcataa

SEQ ID NO: 277728 - DNA, 2874 bp, Morganella morganii
atgagccagcagatagctgatctggtcattaatctcagtgcggacagcaccacattcactgagcaggttggacgcgtcgagcgtcagttgctgcaggccgccgccagtgcggatgcgtcagctgagcgtatgcgtaaatttgccgaagggcagtcagcagcggttaaccaggcagcgaacagcacacaggccacactgaaaacgctggatgagtctcagatattcagtgctgataagtttgttcagaaatggaaagccgcggcgcgtgaaattgacagcatgcaccgccggatgaatgaacagatcaataacagcaggcagaaagattcggccggtcgggatctggcgcggcagcaggatgccatgaccgaaagctttttccgtcagattgatgcggtaaagaagaccggcagcgggcttgaacaactggccgtcattcagtcgaaactgaaccaggcgcagcgtgccggaaccatatcacagcaggattatctgaccctgatctcatccgtcacgcagcgcacaacagagttacgccgtgcggatgaaaacctgacgcagcagaaaacccggtttattcagcgcctgaaagaacaggtggccacacagaacctgtcccgcaaagaaatgctgcgttatcaggcggcgcaactgggcgtcagttcatcagcggatatctatatcaataaactccgtgacagcaacaaagaaacggagaagtttaagaataacagcaaactacttagtaacgggcttaacagtcttgccagtcagttcgggatgtcagggttactgcgcggcggtatatggggtgggatcatatccggcatcgtgggtgcaggtaaggctgcatacgatgcggaatcagagtttaccaacttcaataaacagctgatcctgaccggtaattatgccaataaaaccgcatctcagcttaatgaaatggcacggacactgtccggcggcggcataacccgccataaaatggcagaaacattgtcagaggtagtcggcacaggcctgttccgggataacgaattaacccgcgtatcgaaagcggctgcacagatgaactatatcaccggccagtcagtggaaaccacgatcagccagttcaaacgcctgcaggacgagccgttacaggcctcactggaactggaaaaggccaatcatcacctgaccgccgcacagcttgagcagatccgcacactggaattacagggtgataaaaccgccgctgcccgcctggcggtggatgcttacgctcaggccattaatgatggcgccacggatataagtaataacctcgggtatcttgaatctgcgtgggttaccttgcgggatgcggcaggaaaggcctgggacaccatgctcgggcttggcagaaaacagacacttgatgaagaaatccgtgatattgaagattcgcttaagcggatgtcggactctccatggtcggttaacagctcggttaactcagagcaccttaaaagcaagctttcctcgctgaaagagcaaaagtttaaagaagacttagataaagctcgtgcgcaggccgacaaaaataatgaacagatagaagttaacaggatcagaataaggcaggaaaattttttaaaaaatgccacctgggaggaaaaacaaaaagctgacctggctaaactggaaaaagacagatgggcattatcggaagacgaatatgaaaatgctaagcgaatgatcgcttggcgaaatagaccaagggataaaccgcgagaaagaaaggggaaggggtaccaggtaggcgaaggtaccaaagccgaagagcaggccattaaagagcaggtagccctggagtcaaagctccgcgtcctgaaagagcacaaatcagtcactgatgtgatcagcgctgagcgtaaaaaactatgggaaatggaagcgcagatcgccattaccgaagaggccaggggtaagcggcagttaaccaaacaggaacaggcacttctggctaataaagcggcggtactggctcaacatgagaaactggctctgctgggtgatgaagttgttgcacaggaacgcctgaataaacttcaggatcaggcagataaatacgttaagcagcagactgaaaagcaaaatgcgatccgtgatgctatcggtaaatcctcgcgtgaggcacagcaggcgcttgaacggtcgcagattctatccgcacatcaggataatccgcgattgaatgacatgcttgagtctcaggcggcaacatatgcagcggaagaggaaaaacgcgctaactggctggctggggcacagactgcatggggtgattaccgtgatgccgcactggattcaaatgctcaaatccagaatgcaactatggctgcactgaacggattctcaactgagctgacatccgttctgacaaccggtaaggctaatttccgtgagttcactacatcgatactgaaaatgctgacagaaatttttgttaaaaagtcgattgtcatggggatggatgcaatgggatttaacttcacggcgaacgcaaacggcggcgtttataactctccgtcactgagcgcatacagcggacaagtggttcgtacgccaacgatgtttgcttttgcgcatggcgctggtgttatgggggaagccggaccagaaggaatcttcccgttacggcgcggtgttgacggaaaattaggcgtggtggctaaactggctggtggaggtggggaacctcttattcagaataattatttcactatcaataatgacggcagcaatggacagatgggcccgcaggcaactcagcagatcctgaagttagttgaacaaaaaaccaaacaggtattagcatcagaacgccgtccgggcggagcgatggggtaa

SEQ ID NO: 277729 - DNA, 255 bp, Morganella morganii
atgacggcaacagagctgggggactggtacacctatttcggggtaacgccattcacccatcagctgattgatctggagttcgccgcactcagtaacaccgtggtgtcgctggtgggcggcagcaaagacctgtcgctgaatgattttctgttactgaaacacagcgaagaaaccggtgagactgacgactcactgttaatgacagcaggcgaggggatcgccgggggagtacgttatgagccagcagatagctga

SEQ ID NO: 277730 - DNA, 402 bp, Morganella morganii
atgatgaattttctgaaacagaaagaattcacgtacaacggcgaatcactgatgctgagcgagttgtcagccctgcaacgtgtggaatatttcgatcacctggtgacacagaccgaaaaagaagcgccggcagaggatgtgcagagcctgaaacgcactgctgtttatgtgcgtatgaatatcgaatcaaatgcgtttctggtagcccgttctctgttcaatgtgggtaatacaccgggtaaacaggttgatgagatccgcgctgatattctcagcacctggccgccggtcgcgctggagcaggcggcaaaactggtacttgaactcagtgatatgcaggtcaaaaccacagacggtgaaagtgctgaaccggtcgcagatccggaaccggcagaaaagtaa

SEQ ID NO: 277731 - DNA, 516 bp, Morganella morganii
atgcctttacctcctaacccgctggctcctgtcaaaggcgccggcacaacgctgtggatttataccggcaaagacgacccgaccaaaaacccgctggcagacgaaggctggacgcgcctggcaaaaatcaaagagcttcagccgggtgaaatcagcgcggacagttacgacgatacctatctggatgatgaggacgccgactggaaagcaaccgctcagggtgaaaagtcagccggtgaagccaatatcacactggcctggaaacccggcgagcagggacagaaagacctggtcagctggtttgataccggtgatgtccgttattacaaaatccgctatccgaacggcgcggttgatctgttcaaaggatgggtcagcagcctggggaaatcggtaccggcaaaagaggtgatcacccgtaccatcaaaatcaccaactccggccgcccggcgctggcggaagaaatgaaaccggctgaaggtgaaacccgttcagcccccaaagccacggaataa

SEQ ID NO: 277732 - DNA, 399 bp, Morganella morganii
atgcataaacattctgctatccggctggcggtggctgatgccctgcgggcacacctcggggaaactcaggtgtatgacgggcgcccggtattccttgaggagtctgaactgccggttgtcgcggtgtatctcactgacgcttcgccgacggatgatgttgtggatgaagaccagtggcaggccgttctgcatattgaggttttcctgaaagcgagtaatccggactcaaaactggacgaatggatggaagacaaaatttatcctgccatgcagtccgtaccggcactggccgggcttatcgaaaccatgtcagcggcaggctacgactatcagcgcgatgatgaaatgtgcctgtggggctcagccgatctgacatatcacctgacgtattcaatgtaa

SEQ ID NO: 277733 - DNA, 564 bp, Morganella morganii
atggatggtattcagcaggcgattaataacctgaacacaatcagcggcacggcggtaccggtcgccacagctcaggccgtaaaccgggttgcagtccgtgcgatagggcgcagtgtcaaaagggtatcaggcgaaacgcaactgcagcagaagctgatccgtcagcgtgtccgtctgcgcagggcaagcagtaaacagtctgtgccccgtgcgcggttacttgtgaacagaggtaatctcccggccattgcactcggcacagctaaggttcagttgtcacgcaaacggcgtgataaacacggacgcggcagtgtactgaaaatcgggcggtttaagtttgaggatgcatttattcagcaactggcaaacggtcgctggcatgttatgcagcgcaccggtaactcacgttatccgattgatgtggtgaagatccccctggtaatcccgctgacacaggcatttacggatgaaacagaatcacttctgaaatccgatatgccgaaagaactcgggcaggcactgaaaaatcagctccggctgtatatcaaagcgaggctcccctga

SEQ ID NO: 277734 - DNA, 279 bp, Morganella morganii
atgaccccgtttcagcagatgaagtcccggatggatgcactgacagcggaaaaaatgggggaagtcatttatctgaatgatcagcctgtctgtgctgttgagtttcattttcttccggaaatgggaccggtcagcggtgacggggtcagttatgtgattttcacaccgggggtcacgccgcgccggaaagatcggattgttaccggcagcactgagttcatcatcaccagagtacagcgctataacggtaaaccccatatttttatcgagagtgaataa

SEQ ID NO: 277735 - DNA, 342 bp, Morganella morganii
atggctaagaattatcagcagcagggaatgaccatcgcgattgttaacagcggaaccaaatccgttaccagcggttcactggtacaggttggctcactggccgcggtggcaattacagacattgccgccggtgcaaccggtgacggatttgccgaaggggttttccggctgcctaaaaaaaacgggctggtgcttaaagcgggggcggcggcttccgttaaagacggtcagctggtggataccggcggcgtggtgatcggcgtagcctgggaggatgcggctgccggtgacgcagatgccgctgtgaagattaacgtcttcccgccggcggcacagggataa

SEQ ID NO: 277736 - DNA, 2037 bp, Morganella morganii
atgccaaatcccgggacgatgacgagtaacccgaaagcatccgcaccggttaaaagctggttccgcatgaaagccgcggcggatacccaatcggcggacatttatatctatgacgagatcggcggctgggggatctcagcaaagcagttttcaaaagagctgctggcgctgggggatgtcagtcagattaacctgcatattcactcccccggcggcgaagtgtttgacgggatcgccatttataaccagctgaaaggccatgatgcaaagatcaccgtttatatcgacgggctggcggcctcaatggcctctgttattgccatggtcggtgacactgtgattatgccggaaaacgccatgatgatgatccacaaaccgtggggaattgcccggggggatgcggatgaaatgcgggattacgccgacctgctggataagctggaaaatgtgctgatcccggcgtatgtcgccaaaaccggcaaaacggcggaagagattgccgccatgttagaagaggaaacctggatgaacggcgatgaatgtctgtcacacgggtttgctgatcagcttactgacccggtacaggcgatggcctgtatcacatccaaacgtatcgaggactttactgctatgccacaggctattaaaaaccaggtatcaccgaaaaataccgctcagaccacaccggtttccgtgccggacccggcaccggtgacgcagcccgccgcaaccgtgactcagcctcagccggtcgcgcagccggataatgcagatgtacagaatcagatccgcgctcaggaacaagcccgtctgaacggcattaaggacttgttcgccatgttcggcggcaaacataatgatttgatggtggattgcgtgactgacacgcagtgctcactggaagacgcccgtgcgaaactgctggaaaaactgggggcagaatccacaccaagcaacaaaaataatgctcatatctacgcaggtaacggtaatttcaccggtgacggcatccgtgcatcggtcatgacccgtgccgggcacgaagaagcacagccggataacccgtataacagcatgacactgcgtgaactggcgcgtatgtcgctgacggagcgcggtattggtatcagcaccctgaacccgatgcagatggtcgctgcggcattcacacacagcacttcggatttcggcaatatcctgatggatgtggcttataaatccctgctgacgggctgggaagaggcggaagaaacctatgataagtggacgaagaaaggtcagctcagcgactttaaaaccgctcaccgtgtcggcctcggtggttttccgtcactgcgtcaggtgcgcgaaggggcagaatataaatacgtcaccacaggtgacaaggggcagaccattgcgctggcaacgtacggggaactattcagtatcacccgccaggccatcatcaacgatgatatgaatgcgctgaccgatatcccgaacaaactcggccgggccgcaaaagccaccattggtgacctggtgtatgccgtgctgacagataacgggaaactgagtgacggcaaagccctgttcagtgctgatcataaaaatacgctgtccggcggcatggatgtggaaaccatcagcaaaggccgcacgctgatgcgccagcagaaagagggcgaacgtacgctgaatatccgcccggcctttatgctggtaccggcggcactggaaacacacgcacttcaggttgtcggttccggcagcgtgaaaggggctgatgtgaatgccaatatcattaacccgatccgcaatattgcggaaattatcactgagccgcgtctggatgataacagtgaaaaagactggtacatggccgcttctcagggcagtgacaccatcgaagttgcctacctgaacggtatcgataccccgtacatcgatcagcaggaagggttcacctccgacggcgtgaccacgaaaatccgtattgatgccggcgtggcaccgctggattatcgcggaatgatccaggtgaaaggccggtaa

SEQ ID NO: 277737 - DNA, 1476 bp, Morganella morganii
atgaagctgatcgacagtgctatcggcctgattgcgccgggctggcaggcgtcccggatgcggtcccgcctccagataaaagcctacgaggccgcaatgccaacccgaactcaccgggcgcggcgggaatcccgtaacgcgaatcagctggtgaaatccggcggccggtcactgcgcgagcaggcacggtttctggatgacaaccacgaccttgtgatcggtctgctggataagctggaagagcgggtgattggtgcgaaaggcattattgtggagccgcagccgctgctgcgcggcggtgaactggctgatgacctggcaaaacagatccgtgcggcctggtcggaatggtctgtcagtcccgatgtgaccggtcagtatacccgtccggtacttgaacggctgatggcgcgtacctggctgcgtgacggagaggtattcggtcagatggtgtccggacgggccaaaggtctgaggcgggaaaacggggtgcatttctggattgaggcgctggagccggactttgtgccgctgaatctggatgtgccgggcagcaatatctgccagggtgtgaaactcaatgagtgggggcggcctgtcagttacaacgtgtataaaaatatgccgtcagccctgtaccggtcgcaggatctgaaaaccatcgacgctgaaaacatgctgcacctgaagtttacccgccgcctgcatcagctgcgcgggcacagtctgttgtccggtattctgatccgcctgagtgccctgaaagattatgaggacgcggaactcaccgctgcccgtatcgctgcatcactcgggatgtacatcaaaaaaggggatatctataacggcgatgatgcatcagaggacagggaactgaacatcgagccgggcattatcttcgatgaactggcacccggtgaggatatcggcatggtcaaatctgaccgcccgaacccgaacctgcaatccttccgtaatggtcagctgcgtgcagtagccgccggcagccgcggcagttattccagtatttcacgtgattatgacggcacttacagcgcccagcgccaggagctggtggagtcttttgagggctacggcattttacaggatgcgtttgtggccgcagtgacccgcccgatgtaccgcagctggctgacaatggccgtggcggagggggtgattgatgtaccgccggatgttgatcccgcttctttaatgaatgcggtttacagcggcccggtgatgccgtggattgacccgctgaaagaggccaaagcctggcaggtgctgctgcgcggcggaggggcaaccgaaggggaatgggttcgggccagaggctccagccctgctgatacaaaacgccgccgtaaagcggaaattgatgaaaacagaaagctggggctggtgtttgacaccgatccggcgaatgacaaaggagcacctgacgatgccaaatcccgggacgatgacgagtaa

SEQ ID NO: 277738 - DNA, 219 bp, Morganella morganii
atgaccatagaagagattgacgacatgatccggcagtacgcggaagcggaacgcgctgtattgcagggcagaagcatcacgatgaacggtcagagcatgtcgatggaaagcctgagcgaaatccgcaaagggcgggaatactgggagcgccgccgcagcggtttgttatcgtcccgctccggcaggccgggttataaactggcgaggtttccgcgatga

SEQ ID NO: 277739 - DNA, 2115 bp, Morganella morganii
atgagtacaggttatgcatcggcagcggaaatgcgccgggatgtctctgtgctgctgcgtccgccgcgccggatgccggtggcggaggccgttaaaaaatacatgcgggtgccgatgggcggcggcagtgcggtgcagtgggaagacaccctgacgccgtacattattgagcctatgaactgcctgacatcccggaaatatgatgcggtgatctttgtcggtccggcgcgtaccggtaaaaccgtggggcttatcgacggctggattgtctacacgatagtctgtgatccggctgattttctgctgattcagatgacggaagaaaaagcccgtgagcattcgaaaaagcgcctcgaccggacattccgtgcgagtccggaagtagctaaacggctgagcccgcgcaccaatgacaataacgtgcatgacaaaacattccgcgccggtaactacctgaaaatcggctggccgtccgtcaatatcatgtcctcatcggattaccggtttgtggcactgacggactatgaccggtttccggaagatatcgacggcgagggggatgcattctctctggcatcaaaacgtaccacaacatttatgtccgccgggatgacgctggtggaaagttcacccggacgggaaattactgatcagaaatggacgccgtcatcaccccatgaagcaccgccgaccaccggtattttatcgctgtacaaccgtggcgacaggcagcgctggtactggccgtgtccgcactgcggagaatactttcagccggcgtttgatgcggtggccggttaccgggatgacccggatccggtgacagccagtgaggcggcttatattgagtgcccgcactgcaccggacacatttccggcagcgaaaagcggaagctgaataatcgcggtgtctggctgaaagacggccaggatattgaccggtacggcaacattaccggcgatgcccgccgctcccgtatcgcgtcattctggatggagggaccggctgccgcctatcagacgctgtcccagctcgtttataaatatctcaccgccgaacaggaatatgagctcaccctgagcgaagaaaccctgaaaacggtgatcaatacggactgggggctgccgtaccggccgaaacatactcaggatcagcgcagggcagaagaactgctggcgcgggctgaggatctcgggatccgctgtgtgccggaaggtgtccgctttctggtggcaaccgtcgacgtgcaggccgggaaaaaccgccggtttgtggttcaggtcaccggctacggtgaaaaaggtgaacgctggattgtggacaggtttgatatcacccaatccctgcggacggacggcaacggcgagtgtgtccgtattcatcccggtgcctatccggaggactggaagctgctgataacagatgtgctggataaaacatatccgttgtccggacatccggcgatcagaatgcccgtcatgatgctgggggtggataccggcggtgaaagcggtgttactgataacgcgtatgctttctggcggcagtgccgccgtgacggcatcagccgcaaagtgtttctgttcaaggggggcagctgtaccggcgcaaaactgatcaccaaatcctatccggataacaccggacgctctgaccggcaggcgaaagccgccggggatgtgccgttatatctgctgcagactgacaacctgaaagaccgggtggctgctgcactgagccgtgatatgccgggcccgaattatgtgcattttccggactggctggatgactctttctatgacgaactgacctatgaggagcggctgaccagcggtaaatgggaaaagcccgggcggggcgcaaacgaagcctttgacctgatggtgtacgcccatgcactggtgatcataaaggggtacgagaaaatcaaatgggataaaccgccgccctgggcacggttacccgatattcctgttattccgcctgaaaacactgactcccccgacaatatcacccttatttcaacaaccggatccacgaaaccgaagaaaccgaaaaaacggaaagcatcggcgtgggcccctgtttcatcatccggaggtggctggatatga

SEQ ID NO: 277740 - DNA, 504 bp, Morganella morganii
atgtctaatatcagcaatctcggggacgcgtatcactggagtgttgcaaagattgctgaagcgttcggactgaaccggggtacggttaaaaagcggctgctcgatgcaaatgtggcgatagcgggaacagtacgaggcaatccggtgtatgccctccgcgatgtcggtccggtcatattcggtgctgacacagagaaagatccgtccggtattcaggatccggacaaaatgttcccgaaagaccgtaaagactggttccggtctgaaaacgaacgcatcaaacttgaaacctcgctgcgccagctgatacctgctgaagaatctcaccgtgagatggcgaccatcatcaaagcgatagcccaggtgctggacacctggcctgaccgactggagcgtgaccacggctggcagcctgagcaaatcacacaggcacaggatgtggtggatgaactccgcgatctgctggcgatggaggtggaaaacgcagaggaagaaaacggatga

SEQ ID NO: 277741 - DNA, 186 bp, Morganella morganii
atgtttaaacatgaattaggtcaggttgtgcaggtcaccatcagcggcgaagaaggtcatgtgaaagcccgtgctgaatatcataacggtccgaatcagtatctcattcattatctggcagcggatggccgtgggactgatggctggtttgaggaaggtgagttgtccccggcagaaccacaataa

SEQ ID NO: 277742 - DNA, 294 bp, Morganella morganii
atgtcaacgttaaaactgttatcaaaactgttttcaaagacagtgaatgtgctgctgctcctgttcccgctgatgctgttagtgagttgcggaaatacgcggacggaatacgttcccgcaccggtggttcctattccggctcaactgaccgttgattgtccgctgccggttattccggatgaactgacatacggcggcgcaatcctgttgttggccgatgcaatgaagtcgatagcagactgtaatcacgataagcgggcaatacgggagatagaagcggagagggtgaagtaa

SEQ ID NO: 277743 - DNA, 159 bp, Morganella morganii
atgccacggaaccctttaacactgatcatcattgctatcatcctgctgactactgctctgttggcgggttgttatctgtattcactcccgaatcactgcaaaccgctgccgggtaatactctggacggtgtgatccattatgagtgtgaagcgccatga

SEQ ID NO: 277744 - DNA, 2112 bp, Morganella morganii
atggatgtaacgccggagcacaacagcgacgtattcgcatcaatgcgccgccaggtcgaagaatatcagccggggttgtcgaaagacgcaactctggctgaacgcgttatgtatgaggcaaacccggatgatctggattttcagcgccagttcacggcagacatgccaaattcactggcgtattacttcgccactcagtatgccaaaagattccgcgaagaaaaaaacggccgcagagctgctaacacatatctgcgcgaacgttgcgccgatgttcttccccgctacagaatggtcaccgctgagtaccacatcgaccatgacacccgaaactttgacgcattcccggtaaaaatcgttgaccgcctgaatgacctgcaccggatggggaaacaggccatcaaagaactggcgctgagtatggctaatcacatcattatgattttccgtgaatactgcgaaattcaggaaaacatatcgccgctggaagccaccaaacgtatttttaaacgtatcggagcggtagtctgccaggccggtaccgttgcgccatattggcagcaattcactgctggccgtaaaaaaccgactgaaaaccagatgatatccggcatgctgcggatgatgtctgaaaagtggtgggccgggcgtttaaaacggatgcgtgatatccgtgcagagcatcttgctattgcggtaggacaggttcagagcaaagcgtccccatatgtttcccgccgggccctgaaagagtggaaggaacaaaaacagcgtaaccgcgagtttatcaaaaactttgatctgcaaaatgacctcggggaaaaagtctcgctggaaagcatggtgattggcagcgtgtccaatccggcacagcgccgccgtgaattaatggtgcgtatgcgtggatttgaaaatctggctgatgaaatgggctatgtcggtgagttctacacgctgacagcaccgtcaaagtatcacaacgcatacagtacgggtggttttgtaaatcagtggaacggctgcaatccacgggatgtacaaaaatatctgtgcggtgtctgggcaaaggtcagggctgattatgcacgtaaagggatccgtccgttcgggttccgtgttgtagagcctcaccacgattcaacccctcactggcacctgttgctgtttgttcaccctgatcatgcggaagacctgcgcaccactttcgcgaaatacgccagggaagaagatgctgacgaactgggcagcgatgaagctaaagaagccagatttaaagccattccgattgataaagaaaaaggcagcgcaacgggctatatcgcgaaatatatctcaaagaatatcgacggctttgccatggacgacgagacagacgaggaatccggcaagagttgcaaagagattgcgaaaaacgtttccgcctgggcttcacgctggcgcatccggcagtttcagcaaatcggcggtgcaccggtcagtgtctggcgcgagctgcgccgcctgccgggagaggaagaaatactggctactgaagatatggacaacgtccgctttgccgcagatatcggcgattggttcgcctacaccgaattacagggcggcgcaaccgtcgcccgtaaagatttaaccgtgcgcatgtcctatgaaatcactgaaatgggaaacgagtacggcgaagacgttcagcgtatcagtggtgtttattccccgatcgccggtgatgcatctgagtacctcacccgcacaaccaaatggcagctggttgctaaagaaaagccggctgctgcgggcggtggtttggattttgatcccccttggagttctgtcaataactgtacggaggcacggaggacgattaacgggaatgagaaaaaagtccggtctgtgatggcagatttgcggtcaaccggcagagaaataagcccggaacaggccggaaaattgataagtggatcaggaattgtgatagacggccgggaaattactctgctgccggatggccagttgcggtaccgggccggtacaacggaaaaatatgatcggtaccgggagaaatctgcgtcgatattggcgcgtgttgagaaaatgaggcaaaaagacaatggcaattaa

SEQ ID NO: 277745 - DNA, 684 bp, Morganella morganii
atggcaattaaaattgaagtaacgacagatttaattctgagtttgtacaatcggctgaatagtttatttccgtggcaaaagcgttggtatgagcaacgttttcagcgtgcccgtgatttgcataaaggccgtgagattggcgcagattattattttgcacttgaagcggtgcttgacgcctgccttaccgggcgaaataaaatatttatagagtataagtcgccagatcctgaagatgattttatttcaaatgttgctcaatatatcagcctgtttttagggcgcaaaatagcattagaaaccggaataattatgctgagcaatggagctgagattagatttttaccagaagataataaaacatgggctggtttatgtggcgatgcgtatttatcagaatgggcttatttttctgacccgtggtgcgcaattcatgtagcatatgcggtgacggcaaatgaaaaatggcggttaacattctattcatctattgatgagcatgctccgggaaaaggtgttaaattcaccgggaatagctggtatcacgattcagtaccatttctgccgcatgagtgttcatcgcagcactgtagaaaaattgacgatctgcgcacgtattattcggatagttattttcggcaggcgtttttgtgtcagttgccggaaggaagtagctcactatga

SEQ ID NO: 277746 - DNA, 315 bp, Morganella morganii
atgacaatattcagtgaattgcatcagtggttgcttgaagataaaacaagatggttaattgtgtatttttcaggcgcagtactgatgtttttatttgtttcaattgtgacccgctatgtcgaaacagagaaaaaaatcccgtttcacgaggaatttatcacatcgctgttttggttgccgtttatggccgtgtttattgtcagcgcggtatggtatctgctggaaattgtttataaccagtttacccggtggcaggaaaagccgacagtaaaaataactgttattcagccaaacccgccaccaaagaaaccataa

SEQ ID NO: 277747 - DNA, 204 bp, Morganella morganii
atgaaagtctttgcgttacagggggaaacccttgatgccctgtgcttccgggtgctcgggcaaacggccggtgtggttgagcggacactggaactgaacccggggattgccggtcacggtgcggtgttaccgcacggaacactggttgaactgccggatgtggcggaacagccgcaaaaaacaatgatccagctttgggattaa

SEQ ID NO: 277748 - DNA, 435 bp, Morganella morganii
atgtcacgaggtatccgaaataataatccgggcaatattgattacagtccgaaaaataaatggcttggtgaattaccgtttgatccggcgattgagtcacggcactgccgctttaccaaacctgaatacggtatccgggcattgtttaaactgctgcggtcatactcaaaatatccgggtaagccgggtgtgggctgcggaaatattgacaccgtagaagaaattattgagcgctgggcaccaccgaaagaccgtaataataccgaagggtatattacccgggtctgtaaggaaaccggtctgggtcgccgtgactgccaggatgtttacgataaacaaaccgcgttcagactggcaaaggctattattcaggtcgaaaatgcctcacaaccatacgccgatgctgtatttgaacaggcatggtctctgttatga

SEQ ID NO: 277749 - DNA, 567 bp, Morganella morganii
atggctgttatcggctatatccgcgtatcaacaattgaccaaaacagtgatttgcagcgtaatgcactcacaagcgcaaattgtgaccgcatttttgaagaccgcatgagcggaaaagtggccagccgtccgggccttaaacgtgctttaaagtgcattaatagtggcgatactcttgttgtgtggaagctggacagactcgggcgcagtgtcaaaaacctcataaccctgatatctgatttgcacgaacggggcgcacacttccgatcactgacggacagtatcgataccagcactgctatgggccgttttttctttcatgtcatgtcagcactggcagaaatggagcgcgagttgatagtggaacggacattggccggactggccgctgcgagagtacagggacgtataggtggaaggccaaatgcactaaagccccatgagagagagcagattggacgattattagttaaaggatatacacgccatcagttggccattatttacggtgtgggattatcgacactctatcggtactttccggctggtgttcaaaggccggagtga

SEQ ID NO: 277750 - DNA, 1230 bp, Morganella morganii
atgctgttcagcgccgttgccgtcaatctcccgaaagtcggctttaactttagcaccgatcagctgtttatgctgaccgcgctgccgtctgtttccggggcactcctgcgcgttccttactcctttgttattccgattttcggcggccgccgctggactgcgttcagtaccctgatcctgattgtgccgtgtgtgtggctcggattcgcggtgcagaacccgtcaacgccgtatgcggtgtttgtgattatcgccctgctgtgcggcttcgccggggcaaactttgcctccagtatggggaatatcagcttcttcttcccgaaagcgaaacagggcggagctctgggtatcaacggcgggctgggtaacctcggagtgagtgtgatgcagctggtcgcaccatttattgtgacattcggtgtgttcagctttatgggcggcaccggcgtgacccagccggacggctctgagctgtggttacagaatgccgcgtggatctgggtgccgttcctgctgctgtttaccaccgccgcctggctgggaatgaacgacctttctgctaacaaagcctcgttaaaagagcagttaccggttctgaaacgcaaacatctgtggatcctgagcttcctctatctctccacgttcggctcatttatcgggttttccgccgggtttgccatgctgtcgaaaacccagttcccggatatcgttatcctgaaattcgccttcttcggcccgttactgggtgcgctggcccgtccgctgggcggcttcctctccgataaattcggcggtatccgcgtaacctttattaacttcgtggtgatggcggtatttgccttcctgctgttcttcacactgccgggcaaaaatgatgccggttcatttgccgccttcttcggcgtctttatggtgctgtttttcactgccggtctcggcagcggctctactttccagatgattgcggtggtgttccgcaaaatcaccactgagcgcgtactggcacagggcggtaccgaaaaagaagcccagcatgaagccatcaccgaaagtgctgccgcactcggttttatctctgccatcggcgctatcggcgggttctttatcccgaatgcctttggtatttcactgacactgaccggctcgcctgccggtgcaatgaaagtgttcgttgtcttttatgtggtctgcattctgaccacatggctggtatacggccgtaaaaaataa

SEQ ID NO: 277751 - DNA, 3762 bp, Morganella morganii
atgagcaagtttttagacagattccgttattttaagcagcgcggggaaaccttctccggcgaccacggacaagagctgaacgtcaaccgcgactgggaagatggttaccgcagccgctggcagcatgacaaaattgtccgttccacccacggcgtgaactgtaccggttcatgcagctggaaaatctatgtgaaaaacgggctggtgacctgggagacgcagcagacggactacccgcgtacccgtcctgatctgccggatcatgagccgcgcggctgtccgcgcggtgccagctattcctggtatctgtacagcgcaaaccgcgtgaagtatccgatggtgcgcaaacgcctgatcaaactgtggcgtgaggccaaagcacagcacgcggatccggtcgatgcgtgggcatccattattaatgatgaggcaaaagccaaaagctacaaacaggcacgcggccgcggcggttttgtccgctccgactggcaggaagtgaatgaaatgattgcggcagccaatattgtgactgccaaacagttcggccctgaccgtattatcggcttctcgccgatcccggcgatgtcgatggtctcctatgcttccggtgcccgttatttatccctgatcggcggtgcctgcctgagtttctatgactggtactgcgacttaccgccggcctccccgcaaacctggggtgagcagactgacgtgccggaatcagcagactggtataactcctcttatctgattgcctggggttccaacgtcccgcagacccgtaccccggatgcgcacttcttcaccgaagttcgttataaaggtaccaaaactgtcgcgatcacacccgattatgctgaaatcgccaaactgtgtgaccagtggctgaacccgaaacagggaaccgacagtgccgttgcactggcgatgggtcatgtgatcctcaatgagttccacgcgaagcgccaggcggaatacttcaccaattatgtccgcacttatagcgacatgccgatgctggtgatgctggatccgcgtgcggaaggcggctatgtgccgggccgtatgctgcgggcatctgatctggtggattctctcggtgagaaagaaaatgctgagtggaaaactattgccattgatgagaacagtcagcaactggtggcaccacagggctctatcgggttccgctgggacaaatcccgtaaatggaacctggagccgcgtgacggcaagagcggtgatgagatcactatgcagctgagcctgctggataagcatgatgaagttgccgatgtcgcgttcccgtatttcggcggcattgaaaatgaattctttgaaggtgtggcactggatgaagtgctgatgcacaaactgccggtgaaagtggtacgtctggcagacggcagtgaagtccgtgtggcgagtgttttcgatttaaccctcgccaactacggtatcgatcgcggcctggacgatgtgaactgcgcggcggattacagtgaaatcaaggcctataccccagcctgggcagagaaagtgaccggcgtcagccagcatcacatctcccgcattgcccgtgagtttgccgataacgccgagaaaacccacggccgttcaatggtgatcgtcggtgccggtatcaaccactggtatcacatggatatgacctaccgcggcatcatcaatatgctggtgttctgcggctgcgtcggccagagcggcggcggctggtcacactatgtgggccaggaaaaactgcgtccgcagaccggctggttaccgctggcgttcgggctggactggtcacgcccaccgcgtcatatgaacagcacctctttcttctataaccactcaagccagtggcgttatgaaactgttcagccgcaggagcttctctccccgctggcggataaatcccgcttcagcggcagcctgctggacttcaacatccgcgctgagcgcatgggctggctgccgtccgcaccgcagctgaacgtgaacccgctgactatcgcggcgagagcaaaagaagccggtcaggatccgcaggcttacaccgcagaagcactgaagagcggcactatccgctttgcggcggaacagccggataatccgcagaacttcccgcgtaacctgtttatctggcgctccaacctgctcggctccgccggtaaaggccatgagtatctgctgaaatacctgctcggcaccgaaaacggtctgctgggtaaagatctcggcgaacagggcagcgtgaaaccggaagaagcggaatgggtggataatgccccggaaggaaaagtggatctggtggtgacactcgatttccgcatgtccagcacctgtctgttctccgatatcgtgctgccgaccgccacctggtatgaaaaagatgatatgaacacctcggatatgcatccgttcattcatccgctgaccgctgcggtcgatccggcctgggaatccaaaaccgactgggaaatctacaaagggatcgccaaatccttctctgaactctgcccgggccacctgggtaaagagacggatattgttacgctgccaatccagcatgactccgctgccgaaatggcgcagccgtttgatgtgaaggactggaaaaaaggcgaatgtgacctgatcccggggaaaaccgcaccgcacctgatggtggtggagcgcgattatccgaacacctatgcccgctttacctcgctggggccgctgatggataaactcggcaacggcgggaaaggtatcagctggaatactcaggaagaagtcgatttcctgaaaaaactcaaccgcacccgcactgagggcgcagcggaaggtcgcccggcaattgaaaccgcgattgatgcggcagaagtcgtgctgtcactggcaccggaaaccaacggccatgtggcggtgaaagcctgggatgcgctcggtaaagtgaccggccgcgaccatacgcatcttgccatccataaagaagatgaaaaaatccgcttccgcgacatcgtggcgcagccgcgcaaaatcatctccagcccgacctggtccggcctcgaagatgagcatgtctcttataatgcgggttacaccaacgttcacgagatgatcccgtggcgtaccctgagcggccgtcagcagttgtatcaggatcatgaatggatgcgtgcatttggtgagtctctggtggtgtaccgtccaccggtggatacccgtgcggcacaaccgctgctgggcgcaaaaccgaacggttatccggagaaagccctgaacttcctgaccccgcaccagaaatggggtattcactccacctacagcgacaaccagctgatgctgaccctcggccgtggtggcccggtggtatggctgagtgaggacgatgcccgctcgctgggcattgaggataacgactggatcgaagctttcaacagcaacggcgcactgactgcccgtgcgattgtcagccagcgtatcccggacggcatgatctttatgtatcacgcccaggagcgtcagattaacctgccgggatcggaagtgaccggtatgcgcggcggtattcataactccgtcacccgtgtctgcccgaaaccgactcatatgatcggcggctacagccacctggcatacagctttaactattacggcactgtcggctccaaccgcgacgagtttgtggtggtccgcaaaatgaaaaatgtggactggctcgacggtgagcaggatggttatcaacagaccctgagcgggcaggagaaagcataa

SEQ ID NO: 277752 - DNA, 1557 bp, Morganella morganii
atgaagatacgttcccaagtcggcatggtattgaacctggataaatgtatcggttgccatacctgctctgtcacctgtaaaaacgtctggaccagccgcgaaggtgtggaatacgcgtggttcaacaacgtcgaaaccaaacccggcctgggttacccgcataactgggaagaccaggaaaaatggaaaggcggctggatcaaaaacatccgcggcaaactggtgccgcgtatgggtaacaaaatcggcctgctgtcaaaaatcttcgccaaccccgaccagccggagctggatgattattacgagccgttcacttacgactatgatcatctgaaaaacgccccggaaggcaatctgccgaccgcccgtccgcgctcactgatcaccggtcagcgcatgacaaaaatcgaaaacggcccgaactgggaagatgacctcggcggtgagttcagccgccgcagcgcggacaaaaacttcgccgatatgcagaaagagatgtacggccagtttgagcagacttttatgatgtatctgccgcgtctgtgtgagcactgtctgaacccggcctgtgtcgcgacctgtccgagcggcgctatctacaaacgtgcggaagacggcatcgtccttatcgatcaggacaaatgccgcggctggcgtatgtgcctgaccggctgcccgtacaaaaaaatctacttcaactggaagagcggcaaatccgagaaatgtattttctgctatccgcgtatcgaagccggtcagccgaccgtctgttcagaaacctgcgtgggccgtatccgttacctcggtgtgctgctctatgatgcggatcgcattgaagaagcggccagcgcggataacgaaaaagatctgtatgagcgtcagctcgggatcttcctcgacccgaacgaccctgaagtgatccgccaggcgcagaaagacggcattccgctgagtgtgattgacgcggcacagaaatcgccggtctacaaaatggcaatggagtggaaacttgctctgccgctgcacccggaataccgcaccctgcctatggtctggtatgtgccgcctctgtcaccgattcagtctgtcagcgatgcgggtatgctgccgcacagcggcgtactgccggatgtggaaagtctgcgcatcccggttcagtacctcgccaacctgctgaccgctggggataccgcgccggtactgcgtgccctgaaacggatgctggccatgcgtcactacaaacgtgctgaaaccgtggataaaacccgcgatatcagtgcgctggaagaagtcggtctgacagaagcccaggcacaggaaatgtaccgctatctggctatcgccaactatgaggatcgctttgtgatcccgtcatcacaccgcgaactggcccgcgaggcattccctgagcgcaacggctgcggattcagcttcggcgacggctgccacggcagcgataccaaatttaacctgtttaacagccgccgtatcgatgccattgatatcacgcagaaaacaccggcagatgcaccaatctcagagaggcattcatcatga

SEQ ID NO: 277753 - DNA, 735 bp, Morganella morganii
atgatcagcttaaaaattatcggctgcctgctggattacccgaatgaggagctctggggacaccgcgacgaactgattgcagagattgaacaggcgcacgagctgcgcctgactcaggccgccgcactgatgtacttcgtcgctgaactgaccgctgagccgctgctcgacagccaggcacgctacagtgaactgtttgatcgcggcagggccacctctctgctgctgtttgaacacgtttacggtgagtcacgcgatcgcggccaggcaatggtgtccctgctggagcagtatgagcaggccgggatcaccctcagcagccgcgaactgccggattacctgccggtttatctggaatatctctctgttatgccgccggaacaggcctgtcaggggctgaaagacatcgcgccgatcctcgccctgctcggtgagcggctgcgtcagcgcgaaagtcattaccatgaactgttcagcctgctgctggccatggcggacagcgacctgacactcagcgcactgacccgtcaggtggacggtgaagcccgtgatgacactccggctgcactggatgcggtctgggaagaagaacaggtgacattcctggccgataaaggctgtgacaattctgttctgacacagcatgagcgtcgtttttcacagagtgtcgccccgaattacattcaggtgggtgacgcgccggttccccctgcggcgaaaggagtaactccatga

SEQ ID NO: 277754 - DNA, 675 bp, Morganella morganii
atgactgtgaggcctgttatatccgtgaatggcgctgaggtcggcatattatcatcagtcacctatgtacttgaaaaaatactggatatgagtaaggagggcattaaagagcctggcctgtatgattttttacgtgctgagtacaatgttatatatcccgaaatgtgggacagatatattgtttttcatcgggatgcacgaactacgggtattggttctaatatggttcgtcacggatgggataataaaaaactgaggtttctgtcagccgaatcagtgaatatctatatatacagaccaatagtagcctcagatatagatacgaaaactaaagtgaatattttcaatgaagaaaataaactattttactcatcagaaaaatttccgctccggataaaaacaatcatatcagatctgacgtatgccggaacgatactggacccacagaaaccactggattaccgaagtgggcatacgggctgtatggtgctcagttatatctcaacatcatttgaaatcagtttcggcggcttcgtatttggctacggtgtaacccgtgacggttatgtaacgagagcatcaaatctggtcggccttggcggaggtggcgcgtatgcgaatgatataggttgcattgttgcttatgcccctgatgcatatccgcgatggaaatga

SEQ ID NO: 277755 - DNA, 324 bp, Morganella morganii
atggcgaagaaacctgtttttaatgtatatcacgataccggtgagatagataatattatagattctcttgtatttgttattcactcggaaaaagttgatttttcaaaaacaagtatgtcgtttgacagtcgttacctgaagggtggtgaaaagataatagccgttcctatagtgactcatcgttcagaaatgaatggaaattaccctacggtaacaaatgtaaaagtaaacggtaatacagtaacgtgggtatatgagcatgacagcggtatggcaagtgccacggtgccaataattcacgtatttaaactaatggggaaatga

SEQ ID NO: 277756 - DNA, 3159 bp, Morganella morganii
atgggaaagggcggcggcgggcagcgtacaccgtatgaggcaccgaatgatttaagttcacggcagaaaatatccctgattgacctgataagtgaggggccgattgaggggccggaagaaattaacaatgtggtgaatgatttgtcctgcgtgtatctggatgatacgcctgtcattgacggatccggaaacagtacagtaaacggactgacggcgcagtggcgcgcaggaacactggagcagccgggactatacggctttacttcatcagccaatgaggaaccggttggtatcgaggtaaaatacaatgtcccggtcacccggacaatcacctcaccgtatatcgaccgcctgcggctgacgttcgggacacagtccctggtggaatccaaagacaacggcgacagggtgccgacatcggtgcaactggaaattcagatccagcgcggcagtgtctggtcaacggaaaaagtggttaccatcaccggtaagcgcagcaactccccttacctgatggcggtcattctggataacttaccgccgtccccgttcagtgtccggatgcgccggttaacgccggacagcaccacggataaaattcagaacaatacggtctggtcgagttattcagagcttattgatattaaccagacttaccccggctccgcggtcgccggactgacatttgaaagtgagcagttcggtaataaattcccgcgccgtaactatcttattaagggccgtattatccaggtaccgggcaactacaacccggatacacgggtgtattccggtatatgggacggcacctttaaacctgcatggtcggataaccctgcgtgggtgctgtgggatctgctgacacatccgcgctatggcatggggcagcgcctgaaaatagccgaagtggataaattcgcgttgtatatgatcgggcagtactgcgatcaggaggtggatgacggtttcggcggtaaagagccgcgcatccgctgtaatgcctatattaccgatctgcgtaaagcctatgatgtgatcagtgagctgtgttcctcaatgcggattatgccggtgtggaacggtcaggttctgacatttgtgcaggaccgcccgtctgattccgtgtggccatacactaacgctaacgttgcagacggggtgtttgaatacagtttcagtcctgtaaaggcacgtcataacgtggttgaggttcgcttcattgatccggataacggctggaaaaccagtgtggagcaggtgtctgatgatgtttctgtggcaaagaacggccggaatgtactgcgtgtggatgcctttggctgtaccagccgcggccaggcacatcgtcacggcctgtggatactgatgacagaaaaacttgagacacagactgtcgaattcagaattggtgcggaaggattacgccatacgcccggtgatattttcgagattgcggataacgactgggtggatatgcagatcggcggccgcattctgtctgctgacccggaaaagaaaacgctgctgcttgaccgcaacatagaaaaaccggccaaaggtgatgcgcatgttattgtcaccgatggttccggcctgccgaaaaccatcaaagtgaccggctatccggctacgaatcagattaccctcgatgtgatgccggaaggtataccacaacattctgtctggacgctctccctgccgtcactgcgccgccggttattccgggcggtgtcactggcggataacagtgacggaacctttattgttactgcggttcagcatgcgccggaaaaagaagccattgtggataagggggcggtatttgaaccgaagccggatacacctcttggtggttttattcccccggttgaaaatcttactgtggaaataagcagtgataatgaggcatggcaggcagctgcatcatggaactcaccctatgccctgcgcggtgttgaatatctgctgaagctgaccatcggcgaccgtgttgccggaacggcggtaacgaaagaatcgttttaccggttcagtggtatgccgcagggtaattatgtgctgacagtcactccgcagaatgacagagggcagaaaggggaaccggccagtacatcattttccgtcaatccgccgctgccaccgtcttatattgaagttgaacccggctatttcagtctcggtattgttccgcgttccggcggacagaacagcctgcgggcgcaatatgagttttggttttcagataaacaggtagccgatatccgcgacgttgaatctgtggccgcttatctcggaaacggcaccatgtggattgtgcagggacgtaatatgaaagcaggtcaccgctattatgtgtatgtccgcagcgtaaacgtggtcggaaaatcgatatttgttgaggccagtggtattccggaaagtaatgccgatgaaatcctcgacgctgtgcaaaaagagctcgaagactcagccatcatcaaagacctgcagtctcaggctgatgacaactttgaagccatcatcaacaacgccaacaacgcctacggccagtggggctactggcagcgcgaaaacggcgcgatgaaagcagaaattatcgaagtccgcaactacatggtcacggaaacaactgcacttgcagagaaactggacgcggtacaggttaaagctgaagacggtctggcgctggcgcagaactccatccgcgcacagtgggatatggcatctggtcaggcatcggtggtccacgatatgaaagtccggatccgttataacggtgaggattattccgccggtatggtgatcggggctgagctgaaaggtggtcaggtgaacacccttatcggttttaacgctcagcagtttgcgttttataatccggtgaaaaaatcgatggatctgttcatgtacatgaaggacggccaggtctttatgcgtgaggcattcattaatcaggcatggctcaacagcgtggttgtcactgacaaaatgcagtcggagaactatgtgccgggtaaacagggttttattctggatgcaaaaatgaataaatttgaaatgaattcgaatgatggaagtggtggattaacttttgatggttcaggtctttatttacgtgacgaacatggaaatcttaaaatagaaatagctctgaaatag

SEQ ID NO: 277757 - DNA, 579 bp, Morganella morganii
ttgcaacgatttggacgccgttttgatctgagtgtcagaacggctgctgaaggtattcatgggcttctgctccagctcccgcagttacggcagcgtatccgtgacggctggtaccagatacggatcgccggcagtgatgtttccccggatgaaattcaccggcgctttaatgagccgcttccccggaatgcggtcgttcacatcgtcccgcgtatcgggggggctaagaacggaggtgtgtttcagtttatcgccggtgctgctgtgctggcaatcggatggtggaaccccggcggctgggctatcggtggtgcgctgatgtcggccggtgcagccatgatgctgggcggtgtggcacagatgctgacaccggtagcgaaacagccggatatgtcgcggggtgaggaagagaagggtaatacctatttcagtaacctcgaaaataccgtggcacagggcgtggccgtacctgtggcctacgggcggattatgtgcgggtcgcgggtgatttcacagtccattgagattatggatgacagcgacggtactaatattgatgccggtaaacacggcgggtaa

SEQ ID NO: 277758 - DNA, 729 bp, Morganella morganii
atgattaaacacgccattctggcgcacgctcaggcggatgcgccccgggaatcgtgcggcctgattatccgtaatgagcagggggagcagtatctgccgtgccggaatcagtctccggatcctgaacaccattttactgtcgggtttgacgattttatccgtgccggtgagcagggcgaggttgtggctgtggttcacagtcacccgggcggccagccgtatctgagcagtgcggacagggccatgcagataaacagcggactgccgtggctgctggtctgtgacgaaaaaatccaccgctatgaaccggtgccgcctctgctgggccgccagtttgtgcacggcgtgaccgactgctacagcctgttccgggatgcgtatcacctgacaggcatcaacctgccggattttgaacggcatgatgactggtggcggcatggtgaagaactctacctggacaatatggagagcaacggttttgtccgggtgaaaaaagatattcagccgggggatgtgatcctgttctgctacgccagttcccgggcgaatcacgccgccgtttatcttggcgcacagaccattctccaccacatacccaatcaactcagtaagcgcgaggcatataacccacgatggcaacgaatgactcactcgatctggcgttaccgccactggcaaccttccggctttacggggatttgcaacgatttggacgccgttttgatctga

SEQ ID NO: 277759 - DNA, 699 bp, Morganella morganii
atgcagaacatctctccggaaatgcggattgcagttactgagctggcttccgaccccgaaattgaactgtttgaaatcgaccttactcatatcggcggtatccggtaccggttttataacggcatgaatggtcagcgaaagccgcttatctggcaaaaacaggtttatgatccctatcctgtcagtggtgaggggttcacctacagcggaaaaggcccgtcaggacgaccgacgattacactgtccaacctgttcggcctcatcaccggtattgtcagtcagctggatggggccggtggcggttatgtgatccgccgggtggttaaatcccggttcctcgatgcagataactttgagggcggaaatccggatgctgatccgtcacaggaaattatcagccgctgggttattgaacaggtcaccagtctgaataataaaacagcttccttcatgctggccgcacccagtgagacagacggcgcaatgctgccgtgccgggttattttgtcggacgtgtgtccgtgggggtaccggtctgccgaatgtggttacgcgggtccgccggtcgctgatgaatggggtaaaccaaccagtgacccggcaaaggacaaatgcggcaaacgactgccggactgcaaactccgcaacaaccagtcacgtatcggggcatttgtctccacttcccgtctcagcaaatag

SEQ ID NO: 277760 - DNA, 783 bp, Morganella morganii
atgattaaaatcatacccatgaagtatgacgaatccctgatcccgtttaatggtgattgctgggtgaatgcaacagtggcagcaaaatattttgataaaagagctcttgattggctgcgactggattcaaccaaagaatacgcaaaagaaattggtcaggagcttgatattgaagctataaatttaaaaggtgagatttctcaccttttagtgcgtgtggagaggggacgcaatggcggcacctggattcacccggaactggtcattgagtttgcccgctggttatcaccaaagttcgcccgtgcctgtgaccggcatataaaaaatatgctgatggcgcagaatatgacactgacggaagatcaggttatcggcctgctgacatacaaagacgccactgagtgggaaaagcgttttcaggagccctattatcgcgcactgtcaaaaatggccggtgttccttactttggtcatgtcggcgggtgcccgtcactcttcgggatgatcacggcgaagtgggtatacggcgttgcattacctgattatgtatacgaatcggtaaaagaaagtcggtctgcgcgtgagaaaattcaccagtacctcaaggcagatgccttacggaaagttgaagagcaaatggtggcggtgaccaatatcgccaacagctcagcagactataaggattttgatgcccggtgtatggccgcatttgatgttaaagggcagatgcagctgctttatccggtgacgggaaataattcacagattacccggttacagtag

SEQ ID NO: 277761 - DNA, 243 bp, Morganella morganii
atgaaaaccgatgccctgccgaaagagtttgtgccggattacgccagacctgtcagcgatgatgtgattgcggggctgatgctgccggtgcgtgagattgaaaccctgctgaaaaatcagcagaccgccccgcagccgatagaggttcgttccgtggtggaactggacggccatgtgattgcagaaaccgtgaacaatattaacggtaatgatgccggacgaaccaccggaggcggattatga

SEQ ID NO: 277762 - DNA, 1431 bp, Morganella morganii
atgaataccgcatggcgcaatgatttacaggatgcctcttaccgtggtgtgcgttttgatgtggttaatgctcaggacagtgtttcccgcgatacctctgtacatgaatacccgttcgttgatggcggtgacgttattgatctgggccgtaagccgcgtaatttccgttttaatgcgcttttctggggggatgattaccggactcatctggataattttgttgcggcactggaggaacccggctacggggagcttgttcatcctgtctggggttctgttgaaaaagcaaagtgcattgaatatcaggtaaagcacgaagcggaaggtgtcgacacctgcacggttgagctggttttccttgagggcaccaccggcacggttatcgcgcagtcccatccggaacagctcggtgacagtatttttgacaaaatcggtgaactcactgagcgggccgctgatctgtttgaacaggtcatggctccggttaacgaaggtctgcgttaccttgaaaaaggcaaagcggctttatccggcatgaccaataccattaccatcatgcgcggtgatatcagttctgccgtcagtcaggggatcagttatctgacttatccgcgtgcattcatcagtgacatggtggccgtgacggacatccgcaccggcggcatcggtgatttactcgaccttaaatacggtgatgtggtgaatacctcatccggccgctcaggttcgtcaccgctctcctctgcggttccccgcgtccagactaacggttaccttcccgatggtgcgtatgcaccgtcagttgctcagaacggtgtcagcgccaccacactgttgtctgcgtggagtgactgcgtggcggttgctgatgaactggtctcgctgccggtgcagctggttcagggggaacgtgaggggccggtgcctatgcccggtaatgcacagcctgacgatgtccgtgatctgaccaccgccggttatattattgcatccggtacgctggccgccgtggtgacacaggtactgagcgatgatgtccagcctgataatctgtcgccggatgatatcgaaatgctggtcactaccatgcgggaatacacacagaaagccattgatgaagtccgtgaccattatggtgaccggacacagcagctgagtacggacagtcatcctgtggggctgctgtggcataacgtggtgtcacaactgaaaagcatcgcccttgatgtgcaggatttggggttgctggtgattacccgccgcccgccgctgacccgccggacagtggccgcagccgccaatctgcacttactggcacatttctggtacggggattattcccgtgctgccgaactgtaccggctgaatccgcagatacgtgatccgaataacctgagcgcgggagatgttatcaatgcctatgccaaatga

SEQ ID NO: 277763 - DNA, 351 bp, Morganella morganii
atggacagactcttaaatcccctgacaggtgactacaccaacacccggactgattctctcgctaatgcggtttatctgcgcctgatgacgcctctcggcagttactgggcggataaaaccctcggctcccgtctgcacgaactgacgcgggaaaaagatgtgtcccgtgtttaccgccttgcccgccagtatgctgagcaggcactgaagccactgacagatgacggccgcgctgagtccgttgaggtcagtgtacacagtgacggacggcatcacgctctgttgtggatcactgtcacggatgccggaaacaatgtccgtacctttaaacacctggtaaggattgcataa

SEQ ID NO: 277764 - DNA, 1062 bp, Morganella morganii
atgttcatcacacccggctttgaacaaatccgcagtgagattctgcgggatatcaaaaaccagcttccggatgcagataccgggtctgacagtgatttttttatccgcgcctcatccgttgccagcgttgcaacagggatttatcagcatcagtcatggattgtccgccagatttttccggacaccgctgacagcgattttcttgagctgcacgccagaacccgcaatctcatccgcaaaccggcaaccacagcatcaggcccggcagattttaccggcacaccccatgctgttctgcctgccgggcatgaaatccggggtgagactctcagtgtcatcaccacacaggaggtggtgtttggtgaggacggcaaggctttagcccctgtcaatgccacgatacccggtactgcatcaaatatcagtgttattaccccggcagagctggtcagtgccccgatgggcgttaacagccgtgtgctcattcatccgatgaacggcggtacagataaagaaacggatgcggcattactggcccgccttctggatttgatccggcgtccccctgcaggcggtaataaatatgattaccgccgctgggcgcttgaggtgccgggtgtgaccaatgcctttgtttatccgttgcgccgtggtctgggtacggtggatgtggcgatcacctcggctgatggtctgccttctcaggagattatcgatgccgcacaggcgcatatcaatgatgtgcgtccggtcacggccaaaaactcactggtactggctcctgagcagcgtcgtatcgattttgatattgagatccgtattgcaggtatttcgcaggatgatgccgtcagacaggtgaaagcagaaattcaggcggtaatgtccagacttgcccccggcgaaagttttacccgcagtgatgcagaaaccgcagtatccctgattccgggcatccgtgaccgtttgtttatacaacctgcgggtaatgtccccgcgctggttgatgccgatcatctggaatggctgcagcccggtactgtcaccgtgaggatgatggcatga

SEQ ID NO: 277765 - DNA, 564 bp, Morganella morganii
atgaaatccctgctgaagctgttattgccgccggtcagttacggtacggatgctcccgtactggatgcagaactgaaagcagaagctgaccagctgacaaaggcacaaaaacaggctgaacgggtacggaacggggtcaccccgtttttttcggatgcgttactggctgactgggaacgggttctgggactgacaactgattacagtcagacgtatcagcagcgccttgaaatggtgctgtttaagctgtcagaaaccggcggactatccgttccttacttcattcatctggctgagcgtatggggtacagaatcaccatagaagagccacagccttttcaggccggtgtaaaccgtgccggtgaccggctgatgcacaaagatgctttatggctgtgggtcgttaatgtttatggctccaaagtgcagccataccgttttcgtgccggtgtttccgctgccggtgaccggctgactgtctatgcggattccgttcttgaaagcctgttccaggacttaaaacccgcacacacctattgttattttacttatcaggaatcgtga

SEQ ID NO: 277766 - DNA, 1116 bp, Morganella morganii
atgcagaatttaatgccgcctatcgatacaactgaccatgcttttcatgacggtgatccgactaccggtcaactcggcactattgtcaccgctgtatggcttaatgatgttcagggtgcaacccgcgacattcaggctgaaattattgccgtgctgactaaagcagggatgcagccgaatccacaaaaacagaatcagttggcagaggctatcagccagattatcggcagtggtggctatgcaaccagcggtgatttaacgctggggctgagtaaaaagattgataaagcagatatagctcagcaacttggtaacgacacaacaaaagttccgtcactgcatttagtgaccacagaactcggcaaaaaagccagcgttgccgacgtcaacggtaagatgaccaaagataagaacggcgcagacatcccggatacagaggcttttatcaaaaaccttggtttaggagaggcggccaaaagtaacatcacccacactaccggcacatcaaaaacaaacgtaatgagccaggatggttcaactaaagcatttatgcaaataggtgctcatggccttggagtcaggtctgtcggtgatgcaaacgtaccaaaagataattccggtgccggattttatacagtcggtaacctggggttcggagacattccgccaaattcggtgttaatccgtctgcagggggaggcagaccggtttatcgggtgctcaactgacgggaaaggaaaaatatttttcaaagaccatgcgctgggtcagttgctctatttgtatcatgaagcaaataagcccccgagttttggcattggctacagacataaaaatgaaaaaagtaaccgtaaaaacgacacgttatacacaaactcatcagatgaaactatctgggtcagcgtgtcgtcaaccacaacggatgtcaatggtgtattaacggctaccatgtatgtcgacggggaaaatatatcccggatggctattggaggcggcggcagtatttcggtcacaaaagccgtatcagtatcaggcccggtagggccggggcaaacggtaagagtaagagtcgaaaacggtgaaattggctattggacggagtttaaaaaatcatga

SEQ ID NO: 277767 - DNA, 441 bp, Morganella morganii
atgagtgatcattgttacagagatccggaaacaggtgatgtttatgaatatgacaatgagcaaatgactgttattaacagaataaacgcgcctgatttcgacaacgaaaaagaacaaattccggctattttctttgaaattaacgagaaaattaaaagcatgaaaaaaatgacggccaaagaggttgatgcacacatcaacccgccggtaactgaagagcaactgatagcagaggcagaagccaaaaagcaggcattgatcgctgaggccagccagaaaacccaactctggcagactcagcttatgctcggcatcatcacggatgaagataaagccagcctcaaagaatggatgctgtacgtgcaggaggtgcaggcagtagatccatccctcggggctgctgtggtatggcctacacctccggcttcaccggccagataa

SEQ ID NO: 277768 - DNA, 462 bp, Morganella morganii
atgaataacactgtcagccagcacgaactggcacaactggaatctctgctgccggaatcagcccatcagctgattggggtgatcggttatgccgccaccgcgaaactgattacccaccttggcggtgtcaccttatctgcccgtcagggtaaagccgtggcccgtaataatgcggcatttgagaaactgacatcattgttaacggatgaggaatataaaaaactgctggcctgtatgggcggcacaccgttctatatcccgcgttgtgaccgggcgctcataaaattacgcaatgcccgctttattgcggaattaaaagaaatgaccctgcaggggaattcctgtcgttccgcactgaccgttctgtgtcctaaatacggttttgctgaccgttttgcctggcggctgctgagtgaacataatgcggcgtcagaaacgcagcaggacagtttatttgattga

SEQ ID NO: 277769 - DNA, 186 bp, Morganella morganii
atgcctgacactattacgcttacccttgaacaaatccgcgctctggccgacttcgccgcacaggaaggtcagccgtcctacaccatcaccagcggtattattccggcttttgacggtcagcctgaatatcaggggctgatagcgttctccggttcagaagaacacggtgtgctgcagctggattaa

SEQ ID NO: 277770 - DNA, 339 bp, Morganella morganii
atgagtaccgcacctatttatttcggacaaaaacaacaaggtagtcacatgggtggttttttcagtgacatgtatgagcgtgccacttactggcttgccggtatcggttttgttttcagcggtctgtcgttgtacgcgtggggatttttaatcggtgtattcattaactctgtcttcttacttctgaattacctcctgaataaacgggagcagcagaagcgcacacgtctgctggaaatgagcgtgcagcacctgattgatcatcctgcagatgaaagcgcgaaagaagctgtcgccacgctcgtcagggcatcatcccgctctccgaaggatttataa

SEQ ID NO: 277771 - DNA, 531 bp, Morganella morganii
atgagcatcagacggggttttcttactgctgccgtagtggctctgattgccggaggggccagcgagtatgacattcttgaccagttcctgaatgaaaaagaaggtaatttcaccaccgcataccgtgacggcggcggactctggacaatctgccggggtgtgacccgtattgacggccgcgcggtaaaacccggagagaaactgacgcaggcgcaatgtgaccggctgaatgccgctgagcgtgacaaggcggttgcctgggtaaaacgtaacgtgaatgtgccgttaaccgctccccagattgccgggatagcctctttttgtccttacaatatcggtcccggaaaatgcttttcatccacgttctataaaaaactgaatgcggggaatgttgccggtgcctgcaaagagatcccccgctggattttcgacggcggcaaagactgccgcatccgtaccaacaactgttacgggcaggtgttacgccgtgagcaggaagcggaactgctgtgctgggagctgagcaaatga

SEQ ID NO: 277772 - DNA, 558 bp, Morganella morganii
atgacaataccgttgcgttcagaactgttacgtggtgccgggtggccgctcattatcggggctttcctgatttttatcgccggttcggcatcggcatatctggtgatgaagaacacctttgaccgtgatatttcacagctgaaagaaagtcataccaaagacctgaaagccgtgtcagacagagcacaggaagacacacagaaggcattaaaccgcctgtctgaatctcagcgacaggttcaggcactggataaaacctacacggagaagttacgtaatgaggaaatcattaatcagcggctgcgtgctgatcttgcttcaggtaaccgccggttgcagtttgcccgcgccgaccttgcaacctgtcagctcaccgcaggcaaccatcgcaccaccgccggaatggatgatggagccaccgtcagactctctggagaagctggactcattattcacgatatccgcaccggtatcctttccgacagaacaaaactgagcgggttacaggattatgtgcgtgatgtggttcgtgaatgcagacgggagacagtgcaatga

SEQ ID NO: 277773 - DNA, 246 bp, Morganella morganii
atgaaacgctcgcggcataatgcctgtggttacaccctgctgctgacagccgtggctgttgtgctggccatgttttttatctttctggttctgcccggcctgaccggtctgcgctgcgcaaagtatgcggccgtaaccgggcacccggcagaacagaccggggtcatctgccgccgtactgatacgggggaatttattaatacgttcaataacaaggaaatcagtcatgaaaaaacgcacccgtaa

SEQ ID NO: 277774 - DNA, 237 bp, Morganella morganii
atgaaaaaacgcacccgtaacagtagaaagagtgacgttttaatcagtgttaaaggccatttaaaccgcattgaaacgcagatggattcgctgagtgatcagatggatgccatccgtgaggatgcgacacagggagccatgcgccgtggcgcagttgccggtgctgtatccggcggtattaccgcctgtctggtgaccaccgccatgatgttgctgcgtgcgaagatgggactgtaa

SEQ ID NO: 277775 - DNA, 501 bp, Morganella morganii
atggcgtttccgcaggagacccgcgacaagctgcgccgcgcttatatcttcagccagatgtcgctggaggtggccgctgctcaggccggggtttcgttcgtgactgcccggcgctggaagaaagaggcgcaggataagaatgacgactgggacaaaatgcgcgcggctcacatgctggccggtggtggtgttgaggatgccggacgtgcggtactgatgagtctggttgtccagtgtcagacggttactgagcagataaacacgaacccggatatcgcaccgggtgcccgggtggacatgcttgccagtctggcagatgcctttaacaaagcggtatcagccagcaaaaagatattaccggaaaccgataaactcgccacggccatcgatgttatccagcggctggggcagttcatcagtgataaataccctcagcataacgtggtgtttgttgagattctggaatcctttgctggtgtgctggaacgggaatacggttaa

SEQ ID NO: 277776 - DNA, 1632 bp, Morganella morganii
atgtctaaaaaggtttcactcaaagagttcaaagcctccctgcaggaatacattgccggtctgcgtcagaccattgaggcggagtgtctcggctttgatgcagacccggcagcggctgatgcccgccgtctgcaggtgagtgatgcggatgacggctacagcttttttgtggaaacctacttcccgcattatgtccgccatcattcccgcagccagctgcatgattacctgttttcccgtctgccgaaaattgtcgccagtccggccgctgaaagtgatgcgatagccgcgccgcgcggtgaggcaaaatccacgctggtcagtcagctctttgtgctgtggtgtattatccgggggattaaaaagtacccggtcatcattatggacagtatcgaccaggcctatccgatgctggaagccatcaaagccgaactggaatataacccgcgtctgaagaacgattatccggatatctgcggtcagggccgcacctggcagatgggcaccatcgtcacccgtaataatatcaaagtgacggtggcgggcagcggtaaaaaactgcgtggtctgcgtcacggcccgtaccgtcctgatttggtggtgctcgatgatatcgagaacgatgagatggtgcgtaatccggaacagcgggacaagctgcacacctggcttaaaaagaccgtgatgccgctcggtgaggccgggggtaaaactgatattatctacatcgggactattctgcattacgactcggtactctcccgtaccctgaataacgccatgtggcgtactgtccgctttaaagccattctgcagtggccggtcaatatgaaactgtgggatgagtgggaaacccttatccataacagactgccggatgaggctgagcgtttctatactgagaatgaagcggccatgtctgaaggggctattgtgtcatgggccgcccgtccgctgttggcactgatgaaaatccgcgcccgtgacggtcacgatacttttgattctgagtaccagaatgacccggtcagcggtgaggatgcgattttcgccaacagtattaccttctggtctaaccatctggctgactggatttattacggtgcctgtgaccccagcctcggcagactcagcaaaggccgtgacccgtccgccattctggtcggcggctttaaccggatgaccggtattctggatgtggttgaggcggatatccgccgccgtcttcccgataaaattattgaggatgtgatccgctatcagcgtgaatacgggtgtctcatctgggcgtttgagtccgtccagtttcaggagttcctgcgcacggagctggtgaagcgctctgctcagcagggtattccggttcctgccattccggttatcccgcacaccgataaagcgctgcggattgaatccctgcagccgcacatggttaacgggctgatccgtcttcacccgacacagcacaccctgattgaccagctgcgtcatttcccgaaagccgatcatgatgacggcccggactgtttacacatgttgtggtcacttgccgcctcacgcgcgggcagcaccgacatccgcagccgctctgtgcgtgacggcggaaaacgctttggtgcaggtgcctggtaa

SEQ ID NO: 277777 - DNA, 1581 bp, Morganella morganii
atgccgaaaatagttgatatccacggaaacccgatcgaacgggaagtgttaaaaaccccgcagacaggaaaaatagcgcagatgcagcgcatctatccggagcatccgtcacgcgggctgaccatccgtaagctgccgcgcattctgcaggccgctgaacggggtgacctgagtgcgcaggcgtgcctgttctcagacatggttgagcgtgacggtcatatttttgccgaaatggaaaaacggaagaatgttctgctcacgctggactggtcagttgaaccgccgaagaatgccaccgcacaggaacgggatatgacagcaaaagtccaggagtggtttgatgccatgccgggcattgaggacatcatcctcaatggtatggaagcggtcggtcacgggttttcctgtcaggaaattgagtgggaactgattgaaaaggtctggctgccgaaggcacttaacctgcgtccgcattactggttccgcacactgccggaaaaacgggacgagatccgcctcaatgatgatcagttcgagggatccccgttgtggccgttcggctggctggtgcataagcataacgcccgcagcggttttattgcgaccagcggcctgttccgtgtgctggtgtggccgtatctgtttaaaaacttctccctgcgtgaccttgcggagttccttgagatttacggccttccggcccgtatcgccacctatgcacagggcacatcagatgcggatatcgacaagctgctgtatcagctggtgaacctcggacatgatgcggtggccgctatcccgcaggggaatgacatcaagtttgaatctgctgccggtggcggccctgatccgtttatggcaatgattaactgggcggagcgtacccagtcaaaaattattctgggcggcaccctgaccacgcaggcagacggtaaatcctccaccaatgcactgggtaatgtgcataacgaagtccgccacgacctgatgacagcggatgcccgtcagattgagaacatgttccgcagtctcattcagatggtgctggcactgaacggtcatgcggatgtcaacccgcgccggttaccgcagtttgtgtttgataccagtgagaccgtggagctggcaccgttcgcacaggccgtatcaacgctggtgaatgaggccggaatgaccggtattccggtgtcatgggtcaataaaaaagccggtatcccgcaggcaaaagatgatgaaccggtattatcaccccgtcctcagatgccgctgctgaccccgctgagtaacgggctgtcacgtcacggactggcggtactgtcgaagaccacggaatcggaggatgctgacccggcgcagataaaactggataacgcccccccgctgtctgacccggtcagtgaggccatgaatcagttactggcaccgatggtgacggcactgcgggccggacacagtgcggatgaagcgatgaatctggtcgcggccggttatccgctgctggatgataatgcgctcagggagctgctggagcgggcaatttttgtgtctgaggtctggggacgtattcatgccgactcgtga

SEQ ID NO: 277778 - DNA, 813 bp, Morganella morganii
atgcttacttacggatctgtatgctccggcatcgaggccgcttcggtcgcctgggagcctatcggaatgaaacctctctggttcagcgaaattgaaccgttcccgtgtgccgtgctggctgcgcactggccgcaggtggataacctgggcgatatgacaaaacttgctgcagcggttcgcgccggtgatgtgccagcgccggatctgctggtgggcggcacaccgtgccagacattcagcattgccgggctgcgcaaaggcctgaaagacgaacgcgggaaattaactctctcttacattgaattggcggacagtattgatgaaaaaagaaaagaaaacggtgaaaaaccagcaatcattgtctgggaaaacgtccggggagtactcaaccatcctgacaacccattcggatgttttattgccggtctggctggagaagatgaaccatttgaacctggtccgcgacctgaacgcggtaaatcaagccaattctggacatggaataaaaaaccagtcagcacgttgcgatctggccggtctctggttgtgttattggaccaaaaagaactgtcgcgtggcgggtactcgatgctcaatatttcggagtcgcgcagcgacgctgtcgtgtgttcgttgtcgcaagtgctgcaacagacatcaatatctccgaaatactatttgagtacgaaagcgtgtgcggggatattgcgccgggcggagaaacgagggaagaaattaccagcactcttacagcacgcactccagcgggcggcggcgggcctggaaccgatattgagtttaaaggcggattga

SEQ ID NO: 277779 - DNA, 885 bp, Morganella morganii
atgagtatgattttaactgcgcgggctttgcagataaaaaccggtaacgcgctgcgcaaactggtgctggtaaagctggcggataacgctaacgaccagggtgagtcgtggccgtctgtgccgtacatcgcagagcagtgcgaaatgtcagagcgctcggtacagaaccatattaacgccctggtggaaatggggctggttcgcatcgagtcccggaaatcggccaacggtctgaaccagtcaaatatctatcatctgcgcctgaatgctgccgttgtgagtggtgaatctcctgcaccatatggtgcaaatcctgcgggggtgagtggtgcaaatggttccgggactggtgcagcagattcaccaggtggtgcaactggttccgatagtggtgcaggagctgcacccagaatcagtaatgatccagtcatagatccagataataaaaatattaatcctgttcgcggaaaagccaaaagcaaaaccgtgatgcctgaaaacttcgccccgtcaccggaacacactgaacgggcaaaaactgccggactggatgttcaggatgagtttggcaaattcagggactaccacgccagcaagggtacccaatacaccgactggaacgcggggtttaattactggctgagacaggccgaagggtttaagcgcgccgcggactcaaagaacatcgataccaccgagtgcgatgaagtcttcagaaaaatgttctcatcctccgactggaagccagaaaaccgcgtacaggagctggtcgcaaagcataaatcctacattgggcggatgaatgaaattgccggacgagcagcatttcgcgggtactggaaacaggccacagagcaggccgcaaaagaacgggaggcagcgtga

SEQ ID NO: 277780 - DNA, 192 bp, Morganella morganii
atgcctaaagaaacagctgacaatctggatcggtattacaccgacagccgcgggcggaaagttcacgttatccggtttgaccggcaaaacagccgggagattttcatgcgtgacggctatgagcatccgtgctttgaacctctgaaaacctttcaggagcggtatacacgcgtggatgaggtgaaaccatga

SEQ ID NO: 277781 - DNA, 201 bp, Morganella morganii
atgagcagattaactcattcagaaccagaaaagcaatttaaatgcctcgttattggtaatgaaccgtttcgttatgttgaaagcatacctgctggcggcatagcggacaactaccgggaagcaccggaaatggtagagcgggcagagctgaaagaatactggtcaaaatactattaccgcagcggaggacaggatgcctaa

SEQ ID NO: 277782 - DNA, 486 bp, Morganella morganii
atgaagagcaaattaccgaaagaaattccaattgtggatcttaagcaacgggtttctgactttgtggaaagttacccaggcggtcatgaagccctggcggccattctgaatatcagattacccgcgttccgtaatcgctttaacgaaaaaaatggtaccggttatttcacgctgggtcagcttgaaacactggaagacctgtcagaagagaaatttttagctgattacttcaatgagcgtataggccgtgtttcataccaaaagccggatgccggggcactggacagtgttgagctgcatgacctgcgtatgagggtagaccaaagaaaggccgctctgagcatgtgtatcggggaatcaatttcgaatgacgggtatatcgatgaaaaagaagctattgagattatcaggaaacataaccggtgcattgccgcagaaactgaatacaggcattcgcttatcgaaatttaccggaagaaagggtga

SEQ ID NO: 277783 - DNA, 909 bp, Morganella morganii
atgattgtaaataaagcaaaccttaccccgctgtttaccggcatcaaactcgtgtttaacaacgcgctgaaagaagcggaaacaacgtgggaaaaaattgccatgaaagtaccgtccaccggtaaggcggagcagtacaactggctgaataatttcccggcgatgaagcgctgggtcggtgagaaagcggtcaaatccctggcggcccataaatacaccatcgagaacgatgactgggaagccacgattgaggtcgaccgcaacgatatcgaagatgatcagaccggtcagtacgccattcaggcaaaaggtgccggtcgttctgcggcgatgctgcctgatgaaatcgtgtatgacctggtgaatcagggttttgagcgtacctgttatgacggccagtatttctttgatacggatcatcctgtcggcagccgctctgtgtccaacaaaggcacgaaaaaactctctgttgagtcactggcaaaagcacaggcttcatttggtgctgcccgtaccgcgatgcgtaaggtgaccgatgaggaaggccgtccgctgaatatcaaccctggcgtgttgctggtgccgcctgccctggaggatgtcgcccgtgccttaatgacggttgatcgtcttgaggacggtaaagccaatatctacaagggggctgctgaagtcgtggtctccgcgcgtattcagtcggatacacagtggttcctgctggacaccacccagccggtgatgccgttcatttaccaggagcgtaaagcgcctgtgctggttgagcagaccagcctggagaatgatgacgtatttatgcgcaaaaagttcaagttcggtgcggaagcgcgtgctgcaggcggttatgccttctggcagctggcttacggttcaaccggggaggaagcataa

SEQ ID NO: 277784 - DNA, 372 bp, Morganella morganii
atgccggtcactattaccgccaaagttaacggattccgccgctgcggtatcgcccatccggacacggccaccacgtacccggatgaccatttcaccaaagcgcaactggatgagctgcaggcagaaccgatgctggttgtatctcccggaacggccccggagaccggtgctgatacggcggcagagaagcagattgccgccctgaaagcggaagtccgtaccctgagtctgcaggctgaacaactcactgccgaaaacagtgcgctgaaatcggcgctgtctgcagcggaaaaacaggccggtacggctgaatcacccgcaggcaaaccacccgctgccggtgacagcggcaaaaagtcatccgctaaataa

SEQ ID NO: 277785 - DNA, 429 bp, Morganella morganii
atgtacgcgacgaagaaagacatgattttaacgttcggtgaacgcgagtgtatctccctgactgatactgagcatcttggtgatatcagtgatgaggtgatggatgctgcactggtgcgtgcctcggctgaaattgacggctatctcgtcgcacgttaccggacaccgtttacggacactgcccgcattctgaccggccgctgctgtgatattgcccgttaccatctggcaacgtcccaccgcattctgaaagaagaaatccggctgcgttatgaggatgccatccggttttttgaaaaggtggcggaaggccgtatcgggctggggcgcactgacagcggggacattattcagtcctcgccgcagatgaaattcggcagcagcaaccgtcagttcggacgtaactcaaccggcggaggtgcattttga

SEQ ID NO: 277786 - DNA, 651 bp, Morganella morganii
ttgatcacttgtattgagcagcatctgtgtgaccgcctgcgtcagggtatgggtgacatggtgcgtgaggtagccagctacagcggtgagatggatgacgacctgggccgtatcatccgggcttttccggcggcgtgggtcacgttcggcggtctgacaaagagtgaatatattgccaccaaccggcagaaggtgaaatgcaccggcacctttgtggtcattgtgggcgattacaacacccgtgatgatgagtccgcccggttcggcggtgttaaccgcaatgaaatcgggacgtaccggcttattcatgccgtacgcaggctgaccaccgggcaggatttgggcctgaaaattgatccgtttatgccgctgcgggtgcgtaccctctacaacactcaggtgcagagcaaagcactgtcggtgtttgcctgtgagtttgaaacaaagtggattgaatctgttctgggtaacggtctgtggccggaagtgacccgggacacggattcacctgattatatttttaacgagtaccggggaaaagtgaaagagcctgatcctgattttctcagtgtcggcctgcgctatgacccgccgggtatcggcacgattgatgacccggctgacctggtactgacaaggaaaaaaccatga

SEQ ID NO: 277787 - DNA, 822 bp, Morganella morganii
atgcagggcggtgaaaataacgcggatattcagcctgcgctggatgcggtctttgctgccggtcacaacatcattgtgccgccgttctctgacaaagatacgctgctgaagctgcgcacccacctggaaaaaaccggggggccgctggagcagcgcggcgctgtcgcggctgccggatggactggtacgctcagtaccggcaccacactggctgcggatatcaatgacggccgcaccacgattgcctggtatccggggtcggcaaaactgccgtgtcagctggccgccggttacggtgcggtgattgcctctgaggaagacccggccagaccgctgaataaccttgaaattaaagggatggatgttgctccggtaaaagcctgggcgggccgtaatgaacaggaaaatgcactgcataacggactgacaccgcttgaggtgggtcccggcaataaggtgcagattgtccgtgccatcaccacctacacgaagaatccggagggcgtgaacgatacggcgctgctggatttaaccactatacgcacgctggattatacccgtgtggcgtgccgtgagcgtatctcgcagcgttttccgcgtgacaaactcaatgaacgtacccgtcagaaagtccgttctgagctgctggatgtgctgattaaacttgaggaggaagaaatccttgagaacgttgaggccaacaaagaactgctgcttgttgagcgtaacggaaaagacgctaaccgccttgatgcacagattccggcggatgtggtgaacggtttacatattttcgcgggtcgtattgatctgtacgtctga

SEQ ID NO: 277788 - DNA, 375 bp, Morganella morganii
atgttagaagaatatgcaggcgcgattgtccttgaaatcgacggccgtgaggttgaagtcacggacatggacgttcaggaagtcaccggccgcaagctggtgaagaccatgaacaaaaccggccgtgccaaaggctttatgcgcggtatcgccacgtatgaactgtccatttcagtggtgatcccgcttaacggggatatggactggggcgcaattgaaggctccaaactgacccagtacccgctgagtggttccggtggcaaacgtatctcatacctggactgttttgtgacggaagtcggtgagaaatattccactgataacgaagccaaacgcgacctgaaactgaacgcattacgtaaggtggttgaataa

SEQ ID NO: 277789 - DNA, 687 bp, Morganella morganii
atggtagaaactccgaaatacaaaagctttgccgaccgactggtgcagcgcatgactgatgtgggggttgacgttaagcaactatccgagggtgtaggcgttacgtatgaaatggcacgccggtatactttaggctccgccaagccacgtgacgataaaatggagcgggtagctgaggttgttaagtcgacgcctgtatatcttgattatggtgtgtgcactgatggaacggtcgacaagatggctgcagatactgttacagtgaggcaaatcgaggcatttgcatctgctgggaatggctatatcaataatcccttcccagaagtgatcaggtcaatcgagatcccgcaggaccgcatatatgaaatgtttggccgccggacgcttgaaggtgtggtcattatcaatgcggatggtgacagtatgacgccgaccctgaacccgaaggatttgctgtttattgatactaaagtcgggcagtttacaggtgatggtatttatgtctttaattttgaaggatcaacgttcatcaaacgcctgcaaaaagttaaaggccgcaaactggctgttatatccgacaatgacttttatccgccttttcacattgaagaacatgaaatgcatgaattgtatttccacggcaaactattgattagtataccgatgaacattaaatacttctcataa

SEQ ID NO: 277790 - DNA, 246 bp, Morganella morganii
atgcaacaacaaagcattacagaaaaggcaattgaagcggtgggctcaccatcagcggtatctcggctgtttgggtttaaatcacctcagtctgtatttaactggatcaagaacaatcaggttccggcagaaagagttatccacctgtgcgagttgggtaattgggtgataacaccaaaccagttgcgtccggatctttatccaaatgagtcggatggattacctaacgatagcaaaaccatctga

SEQ ID NO: 277791 - DNA, 291 bp, Morganella morganii
atgcgcaacgtgaactatcaagtacgaaaaaaaattaacaggtctggtgccgatcttgagtaccttctggaatgctttggtgatcacctggctgagattcatgactacccgccggatgtttgtggctttgatgctgtatacctgtatctttgcgataagcatcactggccaatttctcagagtcggtcaatggaaatacgcgacatccggttagttctagcaaaagagatgaaaggctggctgccgcctcaggaagctcgttatcctggtctaatcccatcagacgattaa

SEQ ID NO: 277792 - DNA, 465 bp, Morganella morganii
atgaagaatgaatcactgaaagaagtcgtaaaaaagatgtgctgcgccatgccgggtggacgggaagcactggccggggcactggggatgtcactgacgacattcaataacaacctgtacgagaagaacggctgccggtttttcgataatgacgagctggaagcaatggaagacctgaccaaaacccgtcacctggtcgaataccacatggatcggcacggtattacgccgatgcaggacatagaccctgacaacattgatcaggttgagctgtttgatatccgcatgacccttgcggcggcacaggcagagctggaattacatattaagaaaagcctggaagatgggaagttaacccgtgatgaggtcagggggatctataaaaaatcagggaaagtattttcttacttttggggatttgtcgggagtcttgatgctgtgttcggggttccggatgaaaagtga

SEQ ID NO: 277793 - DNA, 192 bp, Morganella morganii
atgagcagattaactcatttggcaggctttgcgcaactccgcgttgctcctgttaagggtggtaaagaccctgccgcatttgtttatacggtaagagtaccggaaggtttctcagaaacaaactaccagtttgtgaagtgggcggtaggtgattttaaccgcatgggtaagacagcaggagccgcggtatga

SEQ ID NO: 277794 - DNA, 192 bp, Morganella morganii
atgaaagaaacagctgacaatcttgatcggtattacaccgacagccgcgggcggaaagttcacgttatccggtacgaccgggagaacagccgggtgattttcatgcgtgacggttatgagcacccgtgctttgaaccgctgaaaatctttcaggaacggtatgcacgctgtccggatgaggtgaaaccatga

SEQ ID NO: 277795 - DNA, 885 bp, Morganella morganii
atgagcatgattttaactgcacgggctttgcagataaaaacaggcaacccgctgcgaaaactggtactggtcaaactggcggacaatgccaacgaccagggggaatcatggccgtctgtgccgtacattgctgagcagtgtgaaatatctgaacgctcagtgcagaaccacatcaatgccctggtgaaaatggggctggttcgtgttgagtcacgaaaatcggccaacggtctgaaccagtcaaatatttatcatctgtgcctggatgttaccgctgtgagtggtgaatctcctgcaccctgtggtgcaaatcctgcgggggtgagtggtgcaaatggttcccggactggtgcagcagatgcaccgggtggtgcaaatggttccggtagtggtgcaggagctgcacccggaatcagtcatgatccagtcatagatccagataataaaaatattaatcctgttcgcggaaaagccaaaagcaaaaccgtgatgccggaaaactttgcaccgacaccagaacacattgagcaggccaaagccgccggtctggacattcaggatgagtttcagaagttcagcgattaccacgccagcaagggtacgcagtatgtctgctggaactccggtttcagatactggctgaatacggccgccggatttaaacgctctgcggactcaaagaacatcgacaccaccgagtgcgatgaagtcttcagaaaaatgttctcatcctccgactggaagccagaaaaccgcgtacaggagctggtcgcaaaacacaaatcctacattgggcggatgaatgaaattgccggacgagcagcatttcgcgggtactggaaacaggccacagagcaggccgcaaaagaacgggaggctgcgtga

SEQ ID NO: 277796 - DNA, 162 bp, Morganella morganii
atgcagacactccgtctgatgatgttaatactggtggtgctgacggcgttactcctgcggcaggcattgtatcgcgagtttctgaacagtattgacaatccctctgaacccgtcagtattccggcacacataaaccatgttctttcaccaccgggtgaataa

SEQ ID NO: 277797 - DNA, 159 bp, Morganella morganii
atgttcggttattccggacaactgaatacccgctgtgaggctttggtagcgcagggcagtccggctgaactaaatcagccaccaatcttatttaatgcaaaaaaaaccggctcatttcttaagccggttaacttatttgatgaaaagtcgttgttatag

SEQ ID NO: 277798 - DNA, 168 bp, Morganella morganii
atggtgaaacaaaaaattaatatgcgttctcgtttattcagggaattatttgaaaaaataaagataatgacttctgttgaagctaccctgaaatcacaaagctgccctaatgaagttgcgataaactcacaagatcaaattacactaatttctattaaggaaaagtga

SEQ ID NO: 277799 - DNA, 378 bp, Morganella morganii
atgagcgatattcagcagagttcggaatgtttggtgatgagcagaagtataaaagactggctggaagcctggggaaactggagttcgtcacgtaccggaactgagtataaaggggtatcttacatgtcaggctcctcttccggaaatcggccatggcttgatgatattgaaggcatggttatcgatcaggctgttggtagcctgaagaaatacgatattgatgggtacaatattatttgcctgcactatcagcaccatttttcattccgggcaataggcaaaaatatggggaaacggcatcagtatgtatcagattattgtgagagggcggaggcttatattgcaggtgtaatccatgccacactgaaagctgcctga

SEQ ID NO: 277800 - DNA, 969 bp, Morganella morganii
atgtttaatccgggtgcggagatcggcaatttcctgaatggcgcccgttatgttgtgagtgcagctccccgttcaatggatagcattccgtccggccgcgttccggcagatgcgcagccgttgctgacagatgagcgggtgcttcgtttcctggataatccagccgtgataaaagtcgccggcggactatccggatcccgtcactatgttaaatccgttggctactgccagattaacgatccggaaaacccttatcaccaccacgaactgaccatgacccgccacaaagatggttttatccggacatgctggcaccatgacaacatcctgcgggcgagtgatgtccaccagcagcaggcggacgaaattctgttacacaaccaacgggcgtttgtggcacgcagcatctttaccgatctgcggctgccggccggtcatcttcttaatccttccgatttgttcacctggtcggtgatgcgccgcgtcagtgatcatcttccggcctttatcagttcctacattctgatgcagaaaccggaggaagagataaccggcactatgacagagcattccattgttcatcaaccgcgctcacacagccggattgttcatgacatcgtcgagcagataaagccggtcgttgttcctgagatagaaccggagccgccagcaagttttatgcggatcccgaagttaaagcgctgggagagtctgaaatacctgcagtgggtcaaaagccagccgtgttgtgtgtgcggccagcaggcggacgacccgcatcacatcatcggtcacggtaccggcggcacaggtacaaaagcacacgacatttttactatcccgctgtgccgggttcaccacgacgagttacaccgggatccggcagcatgggaagaaaagcacggcagtcagctggagttgttatttaagtttatgaaccggtcatacgggatcggtgtttttggttaa

SEQ ID NO: 277801 - DNA, 525 bp, Morganella morganii
atgccggtttatgcggctatcagtgatgatgatattcaactgaaagatgaatacatctcagaattacaggctcagggcgtggataagttcgctgagtcggtgcaatgggcgtttgaggctcttgttgattttggtttcggtggtttgggtcctgaaattctggagggaattatcggactttgtcgcgaatttgctgtgaagctgcgttgcccggataagcggtcacacaatgactggccgggagctcaggataaatcgacggccgcactgtcatgtgacggtaagaataatgtcatgaataaaattgagcaataccgcctgattgtgtccatgttaactgaaatcagaggtcagagtcccggtattcaggtcagccaaaaacagctggctgccgtcaccgctgccgctaactctgtctgtgcggcctttaatgagccggatatgtgtgacaactgcagtgacaaactgcgtggtggctgcctgcctacctgtgcagcttacagcaaggagaataatcatgcgtaa

SEQ ID NO: 277802 - DNA, 315 bp, Morganella morganii
atgcgtaaatactggtgccccgtgtgtgaaaagccagttcctgctgaccaactggccgtaaatgtaggtgacaaagtcaatattactattgagcaaaccaaaataaccccgtcccgcactactgtgcgggttgttaaccgggtcgggaaagtggctggtattaaaaatgatatcgctgccgttacttatcgcggcaagatttaccggataaatacaggggagcttgttcctgccggtgctccaggcgggattgtccgcgctatgtgcggtgagtgtgaatgtggttcgctgccggagggggctgctgatgattag

SEQ ID NO: 277803 - DNA, 438 bp, Morganella morganii
atgtcaatcactaaagagcagtgggccgggattgaggagtcgttaaaagcccattacgtggtcattaaatttcagtatcaggatactgagattacggtaaaccgcgtcagttctggggaaggccggacagagctggcggtctggattaacgggaaaattggtggtgcgtggggaattcagggcaacgaaaactttaacccgctgtgtgagatattctggcacaagcataccaaatccctttacacagccaagcaaattaaggctctggagaatgcgtacgggaagcgtgcagctaaacgtgaaataccgaatttgcataaaaaaaccacgtattacatgccgtatttcagcaaagcgtcggtactggttcgccagttccgtcgcatcgaggggctgaccgttgaacctccgaaagaatgggtaacactccgtggctga

SEQ ID NO: 277804 - DNA, 417 bp, Morganella morganii
atgttaacgcctaatgcaaaaaaactggtcggcattatcaaagccgcccagcagtatctgaaaatggatgatgagacttaccgcagtgttctggttcgtctgacaggtaaagactctgccaccaaactgacgctggatgagttggggattgtccgtgattacttccatgctcagggttatccccgccgcagcccgaagaaatacagccgtaagccgaatgttccggtgtcaaaaaaatcggttctgagcaaaattgaggcgctgcttgctgatgcgggccgtccgtgggaatacgcggaatcgatggcagaacgtatgtttaaccgtcagaaaatcgactggctcgatcatgatgaactggtaaagctgatgcaggcactggcggttgatcagaaacgacggagagcaaaagcatga

SEQ ID NO: 277805 - DNA, 444 bp, Morganella morganii
atgacagacctggaaaaagttgaacatctgttgccggatacgttgcgtcagattgctgccttaatcggctacccggcaacactgaaactgattgatgcgttcggcggcacgacgttcacttttgtgaaaggtcttcatccggccggactgaaacggcttgagcagttatcgtgcatcgtcggcagggatgccgccgatgtgctcaatgcgcatttcgccgggacagaggtgtatatccccaatgcagcagcggcaatgcgtgaggtgcggaatcagcggtttatgcacgatatccgtgcattatcagaacaagggttatccactgtaaaagcagtggcaaaactgtgccctgagtacggtttcagtgatcggcatgcgtgggacttgttatcccgctacaaacaatctggtatccttgactcagaacaacagaatttattttga

SEQ ID NO: 277806 - DNA, 516 bp, Morganella morganii
atgaaaagatatctattgagtcttatcctggcatttaccgccacaggtgcaatggcggttgacgggtacaaggaggttaaatttggttcatcatttgaagctatgagatccgcaggactgtgtgatttccaaattgccagcaagcagcccgagcataaaaatatagttatgtacaattgccttgattttcaattcgatggtaaccatacaatggccgcagcctctttcattggtggcaagttcggaaaattgcaaattatggttgattcaccagtcaattctgtccttgaggcactgtataaaaaatatggtgctccatcatcttcttctacagaagaagagatgcaaaatgcaataattacaggcaaccctatatatgttcgctttgataaagataccgttattctgaaggtagaaagagtgaataaaatagatttagtatcattaaactatgtgtctcctgattttgaactatctgttaaagaaaaaactcaaaaaatcacagatgatatctaa

SEQ ID NO: 277807 - DNA, 447 bp, Morganella morganii
atgaaaaaatatctaccaagtatcatgctatcattattaatcagcagttctctggctatagcggatactcagcaggacgagctgtataataagttaaaacctgtggcttatgatatttttaagcgttcagtcgcgttagctgaaagcgcggatgatagctatcaaagtcttaaatatacagatgataaaacggtatggcgtaaagctcgtgatgaacggaaggcattgtctgttgatgaaaaaaaactggggaatggcttaagctcaccatttagatattgtattcatcttgccagttattctgggatgttatgggggcaatctgtatctgaaggaaagattgatgtatcaacgtttaagtcatatttaacagcaaaaaaagactgtgaagaccagttaaataatcctccggaagataagtctaatctccgggctgttgatctttaa

SEQ ID NO: 277808 - DNA, 444 bp, Morganella morganii
atgacagacctggaaaaagttgaacatctgttgccggatacgttgcgtcagattgctgccttaatcggctacccggcaacactgaaactgattgatgcgttcggcggcacgacgttcacttttgttaagggtcttcatccggccggactgaaacgactggagcagttatcgtgcatcgtcggcagggatgccgccggtgcgctcaatgcgcattttgccgggacagaggtgtatatccccaatgcagcagcggcaatgcgtgaggtgcggaatcagcggtttatgcgtgatatccgtgcgttatctgaacagggtttatccacggtgaaagcggtggcaaaactgtgccctgagtacggtttcagtgatcggcatgcatgggacttgttatcccgctataaagaatctggtatccttggctcagaacaacagaatttattttga

SEQ ID NO: 277809 - DNA, 417 bp, Morganella morganii
atgttaacgcctaatgctaaaaaactggtcggtattatcaaagccgcccagcagtatctgaaaatggatgatgagacttaccgcagtgttctggttcgcctgacgggtaaagactctgcaaccagactgacgccggatgagctgggggctgtccgtgattacttccatgcgcatggttatccccgccgtagcccgaagaaatacggccgtaagccgaatgttccggtgccaaaaaaatcagttctgaacaagattgaagcactgcttgccgatgcgggtcggccgtgggaatacgcggaatcactggcaaaacgtatgtttaaccgtcagaaaatcgactggctcgatcatgatgaactggtaaagctgatgcaggcactggcggttgatcagaaacgacggagagcaaaagcatga

SEQ ID NO: 277810 - DNA, 432 bp, Morganella morganii
atgtcaataataaaagaacggtgggctgaaattgaggaatcgttaaaggctgaccacgttatcattaaatttcagtatcagaatactgagattaccgttacccgtgtcagtgtaagtgaaggaagaacaaagttagccgtctggtttaacggaaaaattggtggtgcatggggtcttcctgacaacaaaaatttcaacccgctgtgtgcgttattctggcacaaacgcaccaaatcgctgtatccaccgaagcgaataagggagatgcagaaagctgtcggtaagcgggccgctaagagcgtgattcccaatcctgatgcgaaattcacttattacatgccgtatttcagcaaagcgtcggtgctggttcgccagttccggcgtatcgaaggactgacagtcgaagagccggaggaatgggtggtgctatga

SEQ ID NO: 277811 - DNA, 315 bp, Morganella morganii
atgcgtaaatactggtgtccagagtgcggaaagccaactccaactgaccaatcgactgtaaatgtaggtgacaaagtcaatattactattgagcacaccaaaataaccccgtcccgcactactgtgcgggttgttaaccgggttgggaaagtggctggtattaaaaatgatatcgctgccgttacttatcgcggcaagatttaccgggtacatacaggggatcttgttcctgtcggtgctccaggcgggattgtccgcgctatgtacggtgagtgtgaatgtggttcgctgccggaggatgctgctgatgattag

SEQ ID NO: 277812 - DNA, 519 bp, Morganella morganii
atgagtaacaattcaactgacgcaatgaagcagcctgaatttgtgttcacggctcagccggtttgtttcgtgcgtgcagtcactccgttaacacctcagattgatatttcccgcgtccggacagatgaattctgtatgccggtatatgcagccatcagtgatgatgatatccaactgacggatggattcatcgcagagctgcaggctcagggcgtagataagctggctgattctattcgggatatctacgatgccctgacggaataccattgtgacggtggcattctcatgactctgagtggcgaaatcagccgctgccggtcatttgctgcaaaattgcgatccccttccgttcagttctgcgattgtgacaactgcacccgcactaccagcactaatgctttgtgtgaatcggtcatgaccggacatacaaacctgtgcgacagttgcagtgacaaactgcgcggcggttgcctgcctacctgttcggcttacagcaaggggaataatcatgcgtaa

SEQ ID NO: 277813 - DNA, 2148 bp, Morganella morganii
atggggatgagcaagttcacctactttggcggtatgggggcggtagttggtggaatagctgcggttggtaaagcagcctggaatgctgagcaggaagtgacgctgctcaaccgtcagctgatcgccaccggtaattatgccggtaaaacatcggcacagcttcgcctgatggcagatcagatgtccggtggctggataaccaggtcggatatgactgctgcgcttacaagtgcagtcggttccggttatttcttcggtgaccaggtatcacttgtggccaaagcagctgcacagatgaaacaggccaccgggcagtcggtggatgaaacagttaatcagttcaaacggcttaaggatgatccggtcaacgcgattatggaaatggataaatccatgcacctgctgaccgcatccgagtatgaacatatagctgcattggaaagatccggaaaaacccgtgaggcgtcagaatatgccattaccaaactggcagaggttaccaaccgtcgcactattgagatgagtgaggatgtgggtatccttgaaagatcatggaataacctgacgaagggtataaaagaagccggtgacgaactgtcaaaaatctggcgaccgcagactgaagcagaaaaactggttaatgttcgtgaaaatattgtatctcttgaaaatgaatggaagaccgaatctgcccgtcagagtggtttgaaaacattaagagcaaacgaatccgagcttgatttcgccgttaaatcccagcaggggtatctggataataaaaataaaattatccaggccaatgaccgagaaaagaaaagccagcaggatctcaataagtacattgaggcgagcctctctcaggcagaaaaaagaacgcgggagcacgaaaagttaaaccgtgaaattgctgccaatgcaaaggctgcaaaagataccgcctctgcatctgacagtgaaaaaatcaggctatggacacctgatgaaatagcgaaagccagagctggtattgataaaaaatatgccgaccctaagacgccaaataaacgcgattatcgtgttgatgaaggaacaaaagcagaagaaacggccttaaaagagcaaattgcacttgaatcaaaattgcgcgtgctcagagagcacaaatctgttacggatgtaatcagtgctgaacgtaaaaagctttgggaaaccgaggctcagattgccattactgaagagtccagaggcaagcgccagttaaccaaacaggagcaggcgttgctggcaaataaagcggcagtactggctcagcatgaaaaactggcgttgctgggtgatgaggttgttgctcaggaacgcctgaataaacttcaggatcaggctgataaatacgttaagcagcagactgaaaagcaaaatgcaatccgcgatactatcggcaaatcttcgcgcgaagcgcagcaggctctggagaggtcgcaaatcctctccgctcatcaggacaatccgcggctgaatgaaatgctggcggctcaggcagcaacgtatgcagcggaagaggaaaagcgagctaactggctggccggagcacaaaccgcctggggggattaccgtgatgccgcactggattcaaatgcgcagatccagaatgcgactatggcggcactgaacggattctcaactgagctgacatctgttctgacaaccggtaaggctaacttccgagaattcaccacatctatactgaaaatgctgacagagatttttgttaaaaaatcgattgttatgggaatggatgcgatggggtttaattttaccccaaatgccaaagggggcgtttatagctctccgtcactgagtgcgtacagtggccaggtggtacataccccgacaatgtttgcctttgcaaaaggtgctggtgttatgggggaagccggaccagaggggatttttccgctgcgccgtggtctggacggaaaactgggtgtagtggcgaaaatggctggtggaggtgatggtgtagttcagcattttaatatcaccattcaaaatgacggcagcaacgggcagatgggcccgcaggcgacacagcaaatcctgaagctggttgagcaaaaaaccaagcaggttattgcatctgaacgtcgtccgggcggagcaatggggtaa

SEQ ID NO: 277814 - DNA, 1296 bp, Morganella morganii
atgacaaatgtttttctctcactattcttagtatgggtagattggcaactcactttaattatattattttctattccaatcgctctgttcgcattatccataagccataaaataatgttaaaagctgcacaacaggcagctgatgctaatgccaatgtacaatccgaattactcgattatatccaaggaattatggttattcgtagttttgggcgacttggtcctgcatggaaaaaactaaaagcagccttagaaacacaaaataagacccaaatagttctcgattccaagcctgccccttggattgcactttatggttttattcttgaatcaggttttattttattaatgataataggaacaagccgtttaattagtggctcactttctccttctcaattcgtttttttccttgtattagcactcccaatttatcgacaattctttgatttaggattatccagtatgttgttaaattatgcacaaaaatcattacaacgcatagaagaagtaatgaaagtggttccactttctgagcctaaatatactcaattaccaataagaacagatatctattttaacaatgtaagctttgtttatccttataatagtcaattaacattagataatatatcttgctgttttcctgaaaaaagctttactgctattgttggccctagtggctcagggaaaagcactttactacagcttatttctcgtctatgggatgttaaccaaggtgaaatattgctagatgatattaatattaaccaaataaattccgataaactctgttcatatgtatcttctttttatcaagatgtcgttttattttcaggaacaattaaagataatattttaatgggaaaaacagatgctcacgatgatgaaataataactgcagctaaattagctaatgcacatgagtttattatacaaaaaccacaaaattatgatactcctattggttacggtggtatgttactctcaggtggagaacgtcaacgtctttctcttgctagaactttattaaaaaatgcaccaattttactgatcgacgaagcaacatcgagtatcgattgttcatcagaagtattaattcaacaagctttatcattgttatcaaaagataagacaatcattatgattgctcatcgattaaatagcattaaaaatgccgataacattatcgtaatggaaaatggaaaaatagcagaacaaggaaaacatgctgagttacttgcaaaaaatggcttatatgcacatttatggttacaacagaaagcgttatgctaa

SEQ ID NO: 277815 - DNA, 1296 bp, Morganella morganii; identical to SEQ ID NO: 277814

SEQ ID NO: 277816 - DNA, 192 bp, Morganella morganii
atggaagacgactcatggtctggtcactcgtcaccgtgggattgggaaaatttaagtccacatttcaaaccaacatatcactacgcatgggcgtgtgaagcaattcaatatgcctgtcagcgtattgcgaataaagaactggctgaggctgcggtcgataaactgattttatttaagcatgtgtccgcatga

SEQ ID NO: 277817 - DNA, 264 bp, Morganella morganii; identical to SEQ ID NO: 127147

SEQ ID NO: 277818 - DNA, 831 bp, Morganella morganii
atgttgatgtgtgatgcgaccggtctgtcgcaacgtcgtgcctgcaggcttacaggtttatccctgtcgacctgccgctatgaggctcaccgtccggctgctgatgcgcatttatcagggcgcatcactgagctggcactggagcgcaggcgttttggctaccgtcgtatttggcagttgctgcgccgtgaagggcttcatgttaatcataagcgcgtgtaccggctttatcacctcagtggcctgggcgtaaaacgcagaagacgtcgtaaagggctggcaacagaacgtctgccgctgctccgtccggcggcgcccaatctgacctggtcgatggatttcgtcatggacgcactttccaccggtcgcaggatcaagtgtcttacctgcgtcgatgatttcacaaaggaatgcctgacggtcactgttgcctttgggatttcaggcgttcaggtcacgcgtattctggacagcattgcactgtttcgaggctatccggcgacgataagaactgaccaggggccggagttcacttgccgtgcactggatcaatgggcctttgagcatggtgttgagttgcgcttaatccagccgggcaagccaacgcagaacggatttattgagagctttaacggacgatttcgcgatgaatgtttgaatgagcactggttcagcgatatcgttcatgctaggaaaattattaatgactggcggcaggattataacgaatgccgcccgcactccacgctgaattatcagacaccgtctgaatttgcagcgggctggagaaagggtcattctgagaatgaagattccgacgttactaactga

SEQ ID NO: 277819 - DNA, 402 bp, Morganella morganii
atgagctttcaaaacgacacaaaattgcatgaaatgacatgcataaaatcagatggcctacaccggcattatcatttttccaatccgaggaattcgtgctactggttcgatattgtgacagtgcctggttatttattcatgaccggcgatatggggacgtgggcctttagccgtatacgcgacatgatccagttctttaatcacgacagtattgattatgggtactgggctgaaaaattacagatggggtcaaatcgtagtgaggcttcagctgcatacaaagaggtcgatttatcttcaactcttgaattttatcgccggtcattagaagagtggctcgcagataccattgaaggtgaggacgacaaaggtacattaagtgtgacctgcccccacgattag

SEQ ID NO: 277820 - DNA, 525 bp, Morganella morganii
atgtcatatatagcaaccagtaccggaaatcatattgatttcaccaatatcactccggctcagatttgtatcgaagatatcgctcgcggcctgtcgaatgaatgccggtttgtcgggcaactggaaagtttctattccgtggctcaacactctgtatatgtcagccagattgtaccgccggaatatgcactggaagccctgctgcacgatgctgctgaggcgtatatcaaagatatcccctcaccgctgaaagccatgctgccggactacaaggtcgtggaaaaacgtattgaagcggttatccgtgaaaagttcggcctgccaccggcaatgacagttgatgttcactatgccgatctggtcatgctggcgaccgaaaagcgggactttgaaatagaccccgtcaaccactggccgatactggattcagctccgccacatgatgacatcatcatccagccactgacaccgccgcaggcatatcaccagtttatggcgcggtttgaaatgctgacagcggagtaa

SEQ ID NO: 277821 - DNA, 189 bp, Morganella morganii
atgagcctgtcgtattccaatgctcttattgttgctaatggtaaaaagccgcacacagctcttgtgttaagtgataacgaggtgattgatgctgtggcggcgtatatgaaaaaaggccgcacaaggcgacctttggtaatttatatccatataatattacttacatttaatatctttaagtccttctaa

SEQ ID NO: 277822 - DNA, 318 bp, Morganella morganii
atgaaaaaatcagtatttcttattgcagtatcttcattatttttagtttcatgtgctacaaaacagtacccgcaagcggctccggttacagcagaagaatctgggatcatgacgtgtaatgacctaaaggttgaaattgctaaaacacgtggtattcaaactgaaattgagaacacgggggagtttgatggaaaaactgtcctgggatttttaggtgattttggcataggcaacgggatggcaaaaagcgatgctcggaaaaaagttgcatcgcgcctcaatcagttagaaggacttaaagatattaaatgtaagtaa

SEQ ID NO: 277823 - DNA, 354 bp, Morganella morganii
atgaacctcgcgaatgcggggttttttataggtgaccatgtggacttattagatttaattgaatcgtttgaaaaagaaatcaataagcacgtaaagagtatcaacttagatcgagaaattgagcatggattttttttggttcatgagtctgacacctcggtcacctacaaagatccgggaactcagctgctctggagcatgtactcttccggctttggaaaagcaaagaaaataataaaaatcaacctgccgccattaaagcaaaatcctgataactttttcgatgctggctttaatgagggggtcgaggagtgcagaaagcacttaaatgcacagcaaatcaaaacaaaatga

SEQ ID NO: 277824 - DNA, 678 bp, Morganella morganii
atgattgagcacgatttgcagtacctgcgggatatggcgactatcgcaatgactgaccacagcagcagaaccaaaggccagcttgaagcatttgagggatttgtattgggaaacacaacgcgctacccacgtaaaaagccccgtgatattaccgtgaacggcagaaaggtaagccgggaaaccgaggcgctatcctgctggtcaacacactattccgtgttaccgatgccacctattgaccgggtggactatcagaactgttcctggcggcgggcaattatggaactggatgaggcagagcagtcctggctgctgtattgctatggtaaggaactgaagttctcacaccagacggctatcaccgcctatgtatggagcgaaatgcaggaacggattaaaggccgccgagtgtcgaagaaagtaaaagaacgactcagggcgttggtatggctggcagttcaggactataccctgaacaaagacgggtattactatcagtctgaactggccgagctggtgggtgtcgagcggaataactggaatatgcactacgaaaagcactggcaggaactgcgattgatctgtaaaaccctggactgtggggcactacgaaaaatgagaaacaacagagtggaaatatggcgcaaaaatacagctaaaacttgcaaaagtgaataa

SEQ ID NO: 277825 - DNA, 969 bp, Morganella morganii
atgtttaatccgggtgcggagatctgcaattttctgaacggtgcccgctacctggtgagcgcggcgccgcactcgatgaatggcattccgtccggtcgcgttccggcagatgcacagccgctgctgacagatgagcgggtactgcgtttcctggacaatcctgccgtggtaaaagctgccggtggtctggctggtttccgtcattacgttaaatcggtagaccattgccagattgaaaacgcagcggatccgtatcatcaccacgaactgactatgacacgctacaaagacggttttatccggacgtgctggcaccatgacaacatcttccgggtggggaatatccaccagcagcaggcggatgaaatactgttgcgtaaccaacgggcgtttgtggcacgcagcatctttaccgatctgcggctgccggtcggtcatcttcttaatccttccgatttgttcacctggtcggtgatgcgccgcgtcagtgatcatcttccggcctttatcagctcatacatcctgatgcagccaccggaagaagagataaccggcaccatgacagagcattccattgtccatcaaccgcgctcacacagccggattgttcaggacatcgtagagcagataaaaccggtcgttgttcctgagatagaaccggagccgccagcaagttttatgcggatcccgaagttaaagcgctgggagagtctgaaatacctgcagtgggtgaaaagccagccgtgttgtgtgtgcggccagcaggcggacgacccgcatcacatcatcggtcacggtaccggcggcacaggtacaaaagcacacgacatcttcactatcccgctgtgccgggttcaccacgacgagttacaccgggatccggcagcatgggaagcaaagcacgacagtcagctggagttgttatttaagtttatgaaccggtcatacgggatcggcgtttttggttaa

SEQ ID NO: 277826 - DNA, 1089 bp, Morganella morganii
atgaaaccgacaaaaaaagtggtgattgtaggcagtaaatttggagaggtttatctcaatgcatttatacaacctcaagacaaatggcatcttattggccttttttccaaaggtagcactcgttctcgagaattatctaaagcattcggtattccactttttactcgatttgatcaactacctgaaaaaatagatctagcttgtattgttgtgcgatcagccattgttggtggcgaaggtagccaacttgcgcaagcatttttacaacgggggatctcggttgtacaagagcatcctgtacatcctgatgaaattaccagactacaatcattagcagaaaaaatgcattgccactatatcgttaacagcctctatccatataataaagcaggacgtttatggatagaaaacacacagaagatatatcagcaaatacaacaacgaccagtgtggggacaaattattacaagcaggcaattaatttattccgccttagatatatattgccaagcaatgaaattacaccctaatgatattacagtcacattagaaaaagataataccccgctacaatttctacggctatccacccctactggtgatttgcttttatgcctacaaaaacatttgtcatctaacgatcctgatcagcatagcctcgtgatgcatcatatgatattaggctggccagctggttatttaactctcgctggaagctatgggccagtagaatggaataatgcgctttatattcatcatcaccaagatagtaaaaaagccatgtatcaatctcctgccacgatggagcttgatgaaccactgtttcattcatttcatactccaccaaatagttggcaggatgtgatggaatgtgaagcaccagaagctattaattacttactggcagagatagataaatgctggcaattacctaatgataaaaaaccaatgattttacaaccccattaccaattagctttatctcaattatggataaaaacattgcaaacagcgggtaaagccattgatggcacaattgcgccatttaagcgaatgaacttcaccaaaagtagtggacggagaaaataa

SEQ ID NO: 277827 - DNA, 147 bp, Morganella morganii
atgaaaacgacaaaaagtatttggacgtgtaattggataaaagtgatctccagcgatgcaattaataatacaatgcttatctatccaatcttgccatgcttcaacttcgcttttatcagcttcactatcatgactaccatacattaa

SEQ ID NO: 277828 - DNA, 1260 bp, Morganella morganii
atgtgttcacactaccaatggcaattaacaccttgtgtggaacaaggtcttatcaagccaacattaatatttaaccatcaacaaatattgccttctgaaatcacagctattttatccgctattggatgtctttctgaacagggtgaaaatcaattaatcattgccaaccttgcagatcctttaattatcgccgagcagatccgccaaatattactgtcatcgtctaatgggtttgttgttatcacgcaacaagcctgggcattaactgccatagaaacggttaatccagcacaacgcagtattcgaagtttattaaaaaccattcaaaaagaatatagctcaaggttaattgccattgttgatttaggtataaatgcctcatggtctgaattagttcccgcttttatacaaatagaacaaggtaataatgaaattattgttcgtaaccattgctgctacttaccacaattaaccccactgccctcatcttctacgatcatagcgcagaacatcatggtatctccgcgctggcatattattactggtggttttggaggcttaggtcgaattacagcaagttggttagtaaggcaaggtgctaaacgtatcgctatattggcaccacgagctgatagcagcgcattagattggatgaataacttacagaaatctaaccagctagaaataaaatggctaacatgtgattgtcgtgataacgctcaatgtcatgcagcactcactcagcttgaaaatgaaggtggcattgaggggcttatacacagtgcaggtattttggatgatgctcttatgacacaactcacccctgagcgtatgtctgacgtattttctgttaaagcgatatctgccaaacaattttgtgatgctttagaaaaaacagatgccagttaccttattttatactcctctgccgctgcaactataggctctgaaggacaagcagctcattccctcgcttgtggatatttagatggactagctgaatatgcacgtcgcaatatcaagggattaaccgtcatttctatcgcttggggggcatggcaaagtgttggctttgtggcagaaaaacaactccatgataaattacaacacaaaggtatgagtacgcttactactgaggaaggactggcacatttagatgcttgtctgctagataatacctcttgtcgccttgcaatgcgcttagcaactccacctttaatgacacaaaaatcgcatggcaagcaacacctccgtagttaa

SEQ ID NO: 277829 - DNA, 894 bp, Morganella morganii
atgtcattagtgactgaattatctgaattactcgcagcaaaaggctggtctcaggctcaggcatcacgtggtgtcggtgtcagtactgctgtgattaaccagtatctgcagggcaaatacaacggtgatgtgaaaggtgttgaggaaaaagtccgccagtttattcagcgtgagcatgaccgcgccaaagcccgcaatatcaagcctgtctatgttgcgacatacatggctaaaaaaggcatggaagttatcaaaatggcgcatctggatggggatatcaacgtgatctggggtgatgccggtatgggtaaaaccatgattatgcgccggtacgccactgaaaacctgagtgctgtgctgattgaggcagacccggggtataccgcccgtgtggtacttgaggaactgtgcaataaactcggactggctaagcgcggaaacatgcacgaactgagtgaggccatcatccaggcactgcgtgattcggggaaagtcattctggtcgatgaggctgaaaacctgccttaccgtgcccttgagacgttacgccgcattcatgataagtccggtatcggtattgttctggcgggtatgccgcgtcttatcctgaacctgaaaggtaagcgcggggagtataagcagttatacagccgtgtcggctttgccctgcgtatgggggatgcgttaccggaagaggatatccgtcaaatcatcacagaactgctgccggaaattgaggacgaagccgttttctctgagttattcaaagtatgcaaaggtaatgcccgcaggctgtttaagttattgcgtggtgtctcacgcggcagtcagattaaccagcgtcctgttgatgtggcgatggtgaccgggttctctgaaatgctgattaattag

SEQ ID NO: 277830 - DNA, 531 bp, Morganella morganii
atgacaccggcagcataccgtcaggccgttctggctgcagaaggtgatgagattgagtacctgacagagattgagctgcgggaaatgttcatgccggaagttaagcgcgtggctcagcgtggctggattgaattcaacaacaaccagtattttgcggaggatttaatcctggtcgatggtgaggaagtccgcgtggcatatgacattcatgatgccggtgaagtcattatccgtaagcaggacggatcatacgtctgcaaagcggtatggaacggtaacaaagttgccgccgtaccgacaacgcagatggacaaagcggttgaagaccgccgcaaacgccgtatgtcactggttgaaagtaaaatgcgcgaaattgaggcagaagcccgtccggtacttaccggaaaaaccgtgcctgatttcggcagttatatcagtgaaccggtggccgttccggccggaggcaagccgacaacattcttacaggtcgagtatgaacacctgaatgccagacaggccggaaaccaataa

SEQ ID NO: 277831 - DNA, 186 bp, Morganella morganii
atgacatcacatcagttattacgcctgaaacaggtcgaagaaaaaaccggtctgaaacgctcgcaaatctatctgtatatgaaagaggccacttttccccgttcaataaaggttggccctgccagcgtagcctggctcgaatctgaaattgatgaatggatcaacctcaaattagccaaccgctga

SEQ ID NO: 277832 - DNA, 699 bp, Morganella morganii
atgatgggctcaaaaccaacaggagcaaaaaagaaatggactatcaaggaagaccctgcactgtataaacaacaaggcggagaatacccgtactattcatctttcagtatcactttgcagaaactgaatatcggccattacagtgaaattgatgatatggataaatttgtcagtgcatggagagataccggccgtaatatgaaacccgccgccagagatatcaatcatgagaaagccattgaggttcagtctgttatgggaaaaattgatgcggaatggtccgggtataataaagcaaatgtcagtgaaacatttcgtggtgatacgccggttattacaggaagttatccatggcttgccgattttattaaggaaaccggcaacagtgcggaggctgtgactaaagttatggattcggatattcggtctcagctgattatgtctacagcaaaagatccgggaatgggatatgtatcgaataaatcaattatgtggcattttgaactggaagaagggcatgccggtgtttctgaaggattgtatgcatcagaaggtgaggtgactttccctatctataacaaaatgaaggttacatcactgagttatattccggaaggacaatcttatatgaataatgcggaacggtttggtactgcacaccggtatattattaacgcaaaaatgttaccgaaatcataa

SEQ ID NO: 277833 - DNA, 543 bp, Morganella morganii
atgtacagcatcaaagtggatacagccgcctttgaggcggcactggataagctggtcaaaggactggaaagccgcgaacccctgatgcgccgtctcgccgggctgatggcggatgcggtggaggaaaactttgcacaggaggggcgtccgaaatggatgggatggagtccgtcaaccgcccgccgccgtcgcggtggccgcatcctgcaactctccggcaggctggcgggcagcatcggttcttacagtgacaatgacagtgccgttgtgggcacaaacgtgaagtatgcccgtatccatcaggaaggcggtgaaatcagtatgcccgcccgcagccagcagacgtactaccgccggaggaaagacggcactgtcggtaaccggtttgtccgtaaatcccgcagcaactacagtgaaacccattctgtggggccgtataaggtaaaaattccggcccgaccttttctgcagctggatgactgggatcaataccggatgacactcacgattgaggactatctcacacagttaaccggtgaataa

SEQ ID NO: 277834 - DNA, 786 bp, Morganella morganii
atgagcaatctgattattgtcgatggtattaatgtgtgccgggatatggccggtcgatattgtctgaatgatttacaccgtgcagctggtggagaagaacggcattcaccaaaccggtttacccgtctttcttttgtatcagacctggtatcagagctaacgccagatatggcgtttgctcctgctgatgtgcaaaaaggcggtaccgctccgggaacctatgtgtgcaaagagctggtttatgcttatgccatgtggatcagtcctgcattccacgtaaaagtgatccgcacgttcgatgtagtagccagaactcagcaggcgatacagctggctgataaggttcaggccggagctatcctgctggagtctatggcaaaaacactgaatctgtcgaattcctcaaagcttggcggatatcagaagctgcaaaagatggctggtcttccggatctggctccgtcctatgcgattgatgcaccggcgggcgcggtggatggttccagcagaccgacaacctccctgacaacactactgagaaatcacaatgcagcgttgtctgctacccgggcatataagcgcctggctgagctggggattgtggaacagaaagcccggccaggatcacgcggcacacagcgcctgttctggtcgataacggcgaggggactggcatacggtaaaaatatgacatccccggcaaacccacgggaaacgcagccgcacttctttgaaagcaaatcagctgagctgctggcactgatgatgactccggcggtggcctga

SEQ ID NO: 277835 - DNA, 1029 bp, Morganella morganii
atgttttggctaattactccggttccattttttaatgccacaggaaactcatggtataaacttgatcttaatgaaaataaaaaatgggaaaaaatagctgatttcccgggtacgccaagagaccaggctatagcaattaatttaaataatgatatttatatatttggcggagcgggaaaagaaaatattgagagtgaaacaataagctcattaacagatgtttatcgttattcaccaagtgaagacaaatggagaaaaataaacaccagctcgccttatggcttggttggtcatgcaggagttagtatcagcaccaataaagccatcattctcggaggagtaaacaagcaaatatttgataaatatttcattgatttaaataatactaaaaacaattcacccatgaaaaataaagttattaatgattactttaacaaacctatagaaagctatttttttaatagagtaatactgacttataatgcagataataatcaatggaattcattaggtactattccttttaatggaactgcgggttcttcattagtaaaaaataacaatacaataaccttgattaacggcgaattaaaacccgggttacgtaccagtgaaatacaaacggctctattagaaaataatcaactacagtggaatactactgtacagaaacttcctccaccatcacctgagcagcagcaagatggcttagctggtgcatttgcaggttatagcgctcatactttacttgttgctggtggtactaactttccgggctctcaggctaagtattcacagaaacattattttgcacatcaggatttagataaaaaatggcacaaagaaatttatgggttgattgatgatcaatggaaagtaattggtgaactgccgatccctcttggttatggaatcactattgagcatggtaattcactatatttaatcggtggtgaaactacaaaaggtgaggcagttaattctgtaatcactttaacaataaaagataaagatctaattattaactaa

SEQ ID NO: 277836 - DNA, 198 bp, Morganella morganii
atgtcatttaagcactatgcaacaacagcggccactgcagaacgcgacggccattataaagaagccggacgtaactggacagatgcggccggactggcaaaaaagcatgagaaccggcagtgggctgaataccgtgctgagttttgtgccaaagcagcaggaggccgttatgtcccggttgtctgcgaagcagtttaa

SEQ ID NO: 277837 - DNA, 639 bp, Morganella morganii
atgtccactaatccaaagcagtttactcagtatgaagtcccggccggttactggcgtgatgccaaacgtacgttaaccccggttgatttactcaaagagatcgatatccagcgtgatgcgctggtcggtgacctggtcgttcaggccattcaggcgcgtgaatttctgcgtcagcttaaacttgcgtcgttcggcgatattcaggcgtttaaagaactgtctgcagagcagtatgacgtcagcctcgggggtaaaaaaggcaatgttaccctgtattgttatgatggacgttacaaaattcagctggccgttcaggacagaatcgcctttgatgagcgtttacaggcagccaaagccctgattgatgagtgtttaaaggattgggttaagggtgcaagaccggagatccactccatcattgatcaggcatttgcagtggataaagaaggtaacatcaataccggtgctgtcctttctctgcgtcgtctgaatatcgaagatacccgctgggttaaagcgatggaagctatcggagaggccgtgcaggttatcggcagccgtcagtatgtccgtttttatgaacgtgtcggcgacagtgatcagtatatgccgattactcttgatatcgcaggggtgtga

SEQ ID NO: 277838 - DNA, 189 bp, Morganella morganii
atgtctgtaaaaattacgattcttatcacggaaaaaaaaggtggcggcatccgttttgaggcagaagccgcaggggaacagtcaaccggtaaggagttacgtattgctgaagatttaaaagataaattaattcgtttgctgaaagattctcaaccatcaacaaaaaaaggaacccgacatgtccactaa

SEQ ID NO: 277839 - DNA, 675 bp, Morganella morganii
gtggctgacctgatactgacccgcagcggtgacggtaataatcttatttcactgtcagaaacccgtaatattcagggctgtttttccgaactgaccctgctggcacaaagtcacgcctcgacaaccaaaaataaaaagctgcagacaaagccggtggatgtttcccgcagcgcacagacattcagtgtcagtaccgaaagtgatgaggataccggggcggatgacggccagtcaggtacccataatatgcgggtaaaaatcggtgatccgtctgttccgtattaccggccgcagattatcaccgccggtgatgtggataatccggctcagcttcagtaccgtgcaaaaaaagcaatggcggatgcccgtctgtcagggctggatatcactgctgaggtcttcggtcaccgtacggacaaaggcgaactctgggagccggggcagcgggtcagaattaaaagtgagctgcacggtattgacgggattttctttctgatgggccgtacgtttaccggcggccgtccgggcgggccggtgacacagctgcggttcaaggaggatggtgtctggataccggacgtctacacacagaaagccaaaaataaaaaagggaaaaagaaaaaaggcaaagatcagctccggccggttgcactgacagcagacggagggaaataa

SEQ ID NO: 277840 - DNA, 675 bp, Morganella morganii
gtggctgacctgatactgacccgcagcggtgacggtaacaatcttatttcgctgtcagaaacccgtaatattcagggctgcttttccgaactgactctgctggcacaaagtcacgcctcgacaaccaaaaataaaaagctgcagacaaagccggtggatgtttcccgcagcgcacagacattcagtgtcagcaccgaaagtgatgaggataccggggcggatgacggccagtcaggcacccataatatgcggataaaaatcggtgacccttctgttccgtattaccggccgcagattattaccgccggtgatgtggataatccggctcagcttcagtaccgtgcaaaaaaagcaatggcagatgcccgtctgtcagggctggatatcactgctgaggtgttcggtcaccgtacagacaaaggcgaactctgggagccggggcagcgggtcagaattaaaagtgagctgcacggtattgacgggattttctttctgatgggccgcacgtttaccggcggccgtccgggcgggccggtgacacagctgcggtttaaggaggatggagtctggataccggacgtctacacacagaaagctaaaaataaaaaagggaaaaagaaaaaaggcaaagaccagatccggccggttgcactgacagcagacggagggaaataa

SEQ ID NO: 277841 - DNA, 363 bp, Morganella morganii
atgaaatactatattgataaaaatcaggtggtttacgcacttaataatgaccttaatcctgccgaatggcttccgggtaaagttaaggaaatcgatgaaaaagaagcgctgttaatagctaatccgccgccaacaaaagaacaactgattgaacaggcggagcaacaaaagcaggctctgattgctgaagccagccagaaaactcaactcttgcagactcagcttatgctgggaatcatcacggatgaagacaaagccagcctcaaagaatggatgctgtacgtgcaggaagtgcaggcggtagattcatccctcggggctggtattgtatggcctacaccaccggcttcaccggccagataa

SEQ ID NO: 277842 - DNA, 552 bp, Morganella morganii
atgagtcaggatgttacaactcgcgggttactggctaaggtcaataaaactgatgttactgattcgacaggagctgattcagagaaaattatcagccaaaaaggagttacggacgagttaaataaaaaactcaacaaaaatgaagtgctgcaaaatgtgggaacatcaacaactcaggtcatgagccaggatgcatcgaccagacttttttcactaaaaactgatctacccaaacttccgcttatagggaatggggcgagccgtgggggcgtaaccgcaagtcgtgaacttggcattacgtatacaaacgataaaccatattcaatttttgtcactgtaatgctgcagtcaacatcaagggattccaaccttataaccaggatgcgtattaatgacacgccagccagtaatttttatatcggaacacgtggttctgatatggatatcctggctgaagcgacgcattcacagctgattttaccgcgcgagcgatatgtcattacttcgtccccaaattcaaaaattgtttcatgggtggagattgctgcatga

SEQ ID NO: 277843 - DNA, 789 bp, Morganella morganii
atgagcaatctgattattgtcgagggtattaatgtgcgccgggatatggctggtcgctattgcctgaatgacctgcaccgggccgctggtggagaggaaagacataaaccgccttattggctgagaaatgcacagacagagcaacttattgccgagttgcaaatctgcgactcgggtacacagccggtaaatgtgttgcgtggtggtactgaacagggcacctacgtgtgtaaagaactggtttatgcctatgcaatgtggatcagcccttctttcaatctgaaggttatccgcacgttcgatgctgtggccggaacacagcaggcgatactgttggctgacaaagtgcaggctggcactatcctgcttgaatctatgacgaaaacattgaacctgtcgaattcctcaaaactgggcgggtatcagaaactgcaaaaaatggctggtcttccggatctggctccctcctatgcaattgatgcaccggtgggtgcggtggatggatccagcagaccgacaacatccctgactacactgttgaaaaatcacaatgccgcattgtctgcgaccagagcatacaaacgccttgctgagctggggattgtggagcagaaagcccggcccggatccagaggtacacagcgcctgttctggtcgataacgacgcgtggactggcatacggtaaaaacatgacatccccggcaaatccgcgggaaacgcagccgcatttctttgagagcaaatcagcggaactgctggcactgatgatgactccggcggtggcctga

SEQ ID NO: 277844 - DNA, 639 bp, Morganella morganii
gtggctcaacactctgtatacgtcagccagattgtgccgccggaatacgcactggaagccctgctgcacgatgcagctgaggcgtatatcaaagatatcccctcgccgctgaaagccatgctgccggactataaagctatggagaaacacattgaagcggctatccgtgagaagttcggcctaccgccagcaatgacagttgatgttcactatgccgatctggtcatgctggcgaccgaaaagcgggacttcgagatagacccaagcagccactggccgatgctggattcagctccgccgcatgatgacatcattatccagccactgacaccaccgcaggcatatcaccagtttatggcgcggtttgaaatactgactaacggggaaaaagctacgaaagaacgcccattaaaagttaaatgtattcgtgatgatggttgtcagttctggactgagggtaatgagtatccggctaaattttgcacgtccggttttctcatgtccggatctctcatgattggagacgacgataacccggatgccgaatggtttgcatcactcgctgatgacagtgaattttatacagttgacggccttgattattctgtacagttcgaactactgaatagcggtgaatag

SEQ ID NO: 277845 - DNA, 231 bp, Morganella morganii
atgctgtattccgtcatgaatgacctgaatatcaatactgaaaggatactgagtgcccgttctgttcgtttcgatatgaacgatacgaggcttactgtcggtgttggtgtaccagactttattttgacgactggttgtcaggtttctgtaggtctgacccgcaccgaaaagctgatcggtagttgcaatatctttaccgtcaattttgaaaccatcagatccgatagttag

SEQ ID NO: 277846 - DNA, 192 bp, Morganella morganii
atgacaaccctctttgtcagagcacgtcagggtatccgtgtgtcgtatgaacaccagttccgccgttacatcacggaaacccctgcagaagttcctgacaccgcgtattaccgccgcatgatagcgtgcggtgatctgattaaaaccgcgcgtccgcgccctgtgaaagggaaaaaacatgatcagatttga

SEQ ID NO: 277847 - DNA, 651 bp, Morganella morganii
ttgatcacttgtattgagcagcatctgtgtgaccgcctgcgtcagggtatgggtgacatggtgcgtgaggtagccagctacagcggtgagatggatgacgacctgggccgtatcatccgggcttttccggcggcgtgggtcacgttcggcggtctgacaaagagtgaatatattgccaccaaccggcagaaggtgaaatgcaccggcacctttgtggtcattgtgggcgattacaacacccgtgatgatgagtctgcccggttcggcggtgttaaccgcaatgaaatcgggacgtaccggcttattcatgccgtacgcaggctgaccaccgggcaggatttgggcctgaaaattgatccgtttatgccgctgcgggtgcgtaccctctacaacactcaggtgcagagcaaagcactgtcggtgtttgcctgtgagtttgaaacaaagtggattgaatctgttctgggtaacggtctgtggccggaagtgacccgggacacggattcacctgattatatttttaacgagtaccggggaaaagtgaaagagcctgatcctgattttctcagtgtcggcctgcgctatgacccgccgggtatcggcacgattgatgacccggctgacctggtactgacaaggaaaaaaccatga

SEQ ID NO: 277848 - DNA, 162 bp, Morganella morganii
atggtcaccccgaccaagcgcggtaaaaaatcggaagaggatacaaccgaaacaccgatgtgggttggtaaaggtgggaaactcactattctgccggaagaccagggacagttatttggtattgacggcagtatcgacgggaaattaaaagccattaattaa

SEQ ID NO: 277849 - DNA, 237 bp, Morganella morganii
atggatagaaatgaagtaagtcatgctgactggcatcgtatcgatattgttgctgctcttcacaaagaaggcgtcacgatgcgtgacctgtcaacgcaggctggtttaaaaccagacacgttaaagaatgcactggcgcgttcttatccaaaaggtgagcgcattattgctgatgcgcttggcattcagcctcaggaaatatggccaagccgttacctgagcagagtattagggtga

SEQ ID NO: 277850 - DNA, 342 bp, Morganella morganii
atggttcatatcatggaatacgcaaagtctatgcgtgagaaaggtggccggtatgttttcctgctgaaagcggcgacgagtgaaacatggtggcccgagtatgcagatcatgttgcattcatccgtggccgtatcgggttcgatttaccggactggtttgtaccggcgaatgaaaaacagaaaccgtcaggtgctttctttgccggtgcggttgtcattctggataaggactggcggggagaaaaaatcagttatatcagccgcgatgagttgatcaccatcggcgaactgtttatgcggcaggcacgctggctggtggcgaaaacaggggaggccgcgtga

SEQ ID NO: 277851 - DNA, 567 bp, Morganella morganii
atggcagtcatcggctatatccgcgtatcaacaactgaccaaaacagtgatttacagcgaaacgcgctcatcagcataaattgcgaccatatttttgaggacaaaatgagcggtaaatccgccgtcaggccgggactgaaacgggcattaaaggccattcagccgggcgatacactcgcagtgtggaaactggacaggctcgggcgcagtgtcaaaaacctgatagcgctgatatctgatctgcacgaacgcggcgcacatttccggtcactgacggacagtatcgacaccagcaccgctatggggcgctttttctttcacgtcatgtcagcgctggcagaaatggaacgtgagctgatagtagagcgtacactggcaggcttggccgcagcgagagcgcagggaagaattggcggaagacccgcagcactgacacagaatgaccgggagcaaatcggccgtctgctggataaagggcattcacggcagcagatggcgattatttatggtgtgggggtatcgacaatttaccggtattttcctattgggcgacgcagcgagagttaa

SEQ ID NO: 277852 - DNA, 201 bp, Morganella morganii
atgagtgaatctgttccggatatagccgcccgcctgacttacacgctgcaagtgatggaagaaaggcacgggtctaaaatgatgagtctgacgaacactgtcgagaacaacgctaaagaagcattacgccagtgcattatggttcttcactcatatgactatgaattaaataaattacaaggggataaggatagtgaataa

SEQ ID NO: 277853 - DNA, 636 bp, Morganella morganii
ttgtcaggaaaatctgtcgcagctcttctcgaataccttggtttaccggaattgctggataagaagtttgataagaccggcgggaagatcacaggacagactgatattgaggcgccgggcggtcgcacccagacactgaaagcaaaagctggtacatcggtataccaggagttgtaccttcaggatatcttcgctgcatggtggggaattaccgctggtaacaagttaagcctggaaaacaggattacaagaaatacgctaactatcggatctgatggtttcaaaattgacggtaaagatattgcaactaccgatcagcttttcggtgcgggtcagacctacagaaacctgacaaccagtcgtcaaaataaagtctggtacaccaacaccgacagtaagcctcgtatcgttcatatcgaaacgaacagaacgggcactcagtatcctttcagtattgatattcaggtcattcatgacggaatacagcatcgtgcggattatcgctggacaactgctgatgaagttatttgcctgactgctttaataccacctggagcgcgattcagtgttaacggtgggtgggcgcagcctgccgagtgggtggtcatcagtaattggttggagttttcactatga

SEQ ID NO: 277854 - DNA, 546 bp, Morganella morganii
atgtacagcatcagagtggatacagccgcctttgaggcggcactggataaacttgtccgggggctggaaaaccgtgaacccctgatgcgccgcctcgccgggctgatggcggatgcggtggaggaaaacttcgcacaggaaggccgtccggaatggatgggctggagtccgtcaacagagcgccgccgtcgcggcgggcgcatactgcagctctccggcagactggcgggcagtatcggttcttacagcgacaataacagtgcggtggtggggacaaatgtgaagtacgcccgtatccatcaggaaggcggcgaaatcagtatgcccgcccgccgtcagcagaactatttcaggcagggtaaaaacggcgttgtcggtaaccggtttgtccgtaaatcccgcagcaactacagtgaaacccattcggtagggccgtataaggtaaaaattcccgcccgtccgtttctcagtctgacagataccgatgaacgtgaaatcggcaccgtgattgagcgttatctcacacagttaaccggcggggaataa

SEQ ID NO: 277855 - DNA, 180 bp, Morganella morganii
atgtcagtagacgatgttgccgcgtggatcatcgaaaaagcccaggcttttcacaaactgcaatcactccgtaccgaacgcgaaagagcaatccgcgatcacgaacgtgctctggaccgctttgatgaagacattgccaagtgggaagaccgctgcgtcttaatagtacaaccgcagtaa

SEQ ID NO: 277856 - DNA, 213 bp, Morganella morganii
atgagtatgaggattgttattaccatcaccgaagctgaaccgggaaacatggttgccggtgtatcgacagaacgtcataacgccggtgtctcagacaatgaacggcttattaccggaaagatccgggataaagtcaatgaatacattgcaaatgaatttaaagcaacagcggacacattcaacccacataaggagaactcccatgtccactaa

SEQ ID NO: 277857 - DNA, 267 bp, Morganella morganii
atgaaaacaactgaaacactgaaagaaaagtatatccggtgggttaacgggttaaaggcaaagaaagtggtactggttacttttccgtgtccgcactgtggtggggagattgaaacattaccggcatcaggtcgtgaggtgtgggagtcgctgacatcctgccctttttgtgagtcagtttttatgaaactggtttcaggaaagcgggttataaccggcagatttttcgctgaaactgacatggcaacaggagaaacaacattatga

SEQ ID NO: 277858 - DNA, 516 bp, Morganella morganii
gtggagcaggaatacggcgtacccgggaaaacccgcacggtgaccggattccggaacccgaaagacggtcagatttatgtccctgatccggggttcgggtttaatccgggggaagtcagttatcagcctgagctggagcggtatcatccggcagcggccagccagtatgtcaccggcaccctgaccgggccggactttgcacgggggtatcagcaggccgtcaccgcacagcagccgccaccgcagcagcgttacccggtggccgcgcgtccgaataccgatacgcagcgcacacagccggtgtataccgatgcaccgaccctgaagcagctggctgagcaggatatcacgcaggaagattacctgttcgtgcagaatattatcgaacagccgcagaagacccgccgtgatgatgacggtacggaatactacgcgtcattttaccgggggcagtggtgggtggtgactgtccgtgataaccggctgtcggatgtgaaagcacaggcggtgttctga

SEQ ID NO: 277859 - DNA, 198 bp, Morganella morganii
atgcagcagcgccttacattcagcgtccgtgtacagcttgccgggctgaatatcactaccggtatggccgtaacatacggtgagcaccccgaccacatcacggtaaggtttgtactcaacaccctcatacgcggggatcagcaccagcgcaccggcaatcgccccggcggcacaagcggccatgacttttttaaataa

SEQ ID NO: 277860 - DNA, 258 bp, Morganella morganii
atgaacaccgataaaatcgatttggcgttattaaaacaggaaattactgactggcacgatgttgcaacagaggattgcaacctgctgatagagcatgcagacaagccgattaatattccggaaataggtcggacaatacagtttgaaaccaaagcagaacagcgggctttcagaatgggggtagctattgctcagtcgcaattttcagcattgccgtttgataccgggtctgatgatgagggcaccgaaaatgagtaa

SEQ ID NO: 277861 - DNA, 258 bp, Morganella morganii
atgaacaccgataacatcgatttggcgttattaaaacaggaaattactgactggcacgatgttgcaaaagagggttgcaacctgctggtagcacatgcagacaagccgattaatattccggaaatgggccggacaatacagtttgaaaccaaagcagaacaacgggctttcaaactgggggtaatcattgctcagtcgcaattttcaacactgccgtttgataccgggtctgatgatgagggcgccgaaaatgagtaa

SEQ ID NO: 277862 - DNA, 225 bp, Morganella morganii
atgtgccggacggatatgattatccatgacaccgacccgctccagatatggccggtcgtccgtgttctccatctgctgcttatagcgcccggccatgtaggaagactgcatattggtctgaaagatggtattcaggcggcggggcgtgagccgtttaccgtgcagttcgccggtgtccgggtcagccaccagacctttaccgagccaccctttctgctccagtaa

SEQ ID NO: 277863 - DNA, 234 bp, Morganella morganii
atgtgtcgggcggatatgattatccatgataccgacccgttcccagtaagggcggtcatccgtgttctccatctgctgcttatagcgtccggccatgtaggaggactgcatattggtctgaaagatggtgtccagacggcggggagtgagccgcttaccgtgcagttcgccggtctccgggtcagcaatcagacttttaccgagccagcctttctgctccagaaccggaagtaa

SEQ ID NO: 277864 - DNA, 162 bp, Morganella morganii; identical to SEQ ID NO: 277848

SEQ ID NO: 277865 - DNA, 162 bp, Morganella morganii
atggttacaccgactaagcgcggtaaaaaatcggaagaggatacaaccgaaacaccgatgtgggtcggtaaaggcgggaaactcactattctgccggaagaccaggggcagctatttggtatcgacggcagtattgacgggaaattaaaagctattaattaa

SEQ ID NO: 277866 - DNA, 129 bp, Morganella morganii
gtgctggtactgcgtattgttcagctggaaaaactggaagaacaaatcgctcaggaattccgtgatctgctggctgataaattcgaagaaactgaaatccagacgtatatcggtaaattcaaagcttaa

SEQ ID NO: 277867 - DNA, 192 bp, Morganella morganii
atgacaactctcactgtcagagcgcgtcagggtgtccgtgtgtcgtatgaacatcagttccgccgttacatcacggaaaccccggcagaagtccctgacaccgcgtattaccgtcgtatgattgcgtgcggtgacctgattaaaatggcgcgtccgcgccctgaaaaagggaaaaaacatgatcggatttga

SEQ ID NO: 277868 - DNA, 1170 bp, Morganella morganii
atgccattatcactgatcactgaaaaagatcgtccgctggaaattgcagccatcgacctcgggtcgaacagctttcatatggtgattgcccgtattgtcaacggcgcactccaggttctcagccgcctgaaacagcgggtgtatctggctgaaggcttaaatgatcagaatgagctgagcgaagaagccatggagcgcgggctggcctgcctggcgctgtttgccgagcgccttcagggctttcccgccgcacaggtcacgattgtcgggacacacagtctgcgtgaggcagtcaatgcgcacgagtttctcgaacgcgccgcgtccgttatcccctatccgattgaaattatttccggtcacgaagaagcacgcctgatttttatgggtgttgaacacacacaaccggaaaaaggccgcaaactggtgattgatatcggcggcggttcaacagagctggtgatcggcgaacgttttgagccgattttaatcgaaagccgccgtatgggctgtgtcagtttcagccgtcagtttttcccggacggcaaaatcaccgaggccaactttaaccgcgcccggctgatggccgtttccaaactggaaaacctggcgattgctttccgtgtgcagggctgggatgtatgcctcggcgcatccggcaccatcaaagcggcctgtgagatcctgcgtgaactgggggaacgggacggtattatcacccctgtccgcctggaaatgctggtcaaacaggtgctgcgttacaaacggtttgataccctgaatttaccggggctgtctgacgaccgcaaaaaagtgtttgtgccgggcctggcaattctgtgcggtctgtttgacgcgctggaaatcactgaactgcgcctgtctgccggtgccctgcgcgaaggggtgctgtatgagatggaaggccgtttccgccatcaggacatccgccagcgtaccgcgcaaagtctggtggaacactataacgtggataacgcccaggtactgcgtgtcctcaccaccatgaaaaacctgtaccgtcagtgggcggagcagaatccgtccctggttgatccgcagttggaagccattctggtctgggcggtctggctgcatgaagtcgggctgagcactgatgaatcccctaatgatttttatcaaaatcattaa

SEQ ID NO: 277869 - DNA, 465 bp, Morganella morganii
atgttgacatattccattattataattacaaaaagaatatcatcatattgccctctcttcagtgaaacccgcaaaatgcgtataactacaacgcagaagtgtcatttgtcacatcaccagaaattggttttgttttcttctttaaaatcaaatgaatacataaaaaatcaagccaatttattccttttttatatgcgttgtaatatctgcatatttccagtttttaattttactttttattcttttgtacatttttattgcggattttatttattgacaaccattataaggcttgcatattatgcacaatatactgtttttgccttgcagatatttcctataatagtatttaaaatatacattaagtttaatgacgtcctgatggtatctttatgcagcccgataattgccacgcacttagttgtcaacaccaggtctttaaaaaggagcttcatgcagttatag

SEQ ID NO: 277870 - DNA, 147 bp, Morganella morganii
atgctgacactgatactgagcacttccctgtttacatatgatatctttcctcccggagacccgaaactaacgcagtcaccacaacctgaaaaagaattgataatataccgggaaaatacctactcgctgtccaatccattttgctga

SEQ ID NO: 277871 - DNA, 2160 bp, Morganella morganii
atgacgactaaatatatttcgcgggcactgctgcctgcgctgatttctgttgccctttttccggcgcagcaggcactggcagataccataattgtgacggacaagccttctcatatcaccccgcaaacccaggccggtgccggttttgtggcgaccgatattgatatggggccgctcggtacccgccagtggctggatattccctacagcagcaatacggtcagcgaagcgatgatccgcaatcagcaaagtaaaagtgtcagtgaaatgctgaaatatctgccatcttctcagatgcaggcccgcggcggtatggatgtaggccgtccgcagagccggggaatgcagggcagcgtggtggaaaacagcagactgaacggcctgaatattgtctccaccaccgcgtttccggtggaaatgctggagcggctggatgccgtgaacagcctgaccggcgcaatttacggcccggccagcccttccggtcagtttaattttatctccaaacgaccgactcaggatccgctgcaccgggtgacggtaggatatcagaaccgtaatgcttacagtgcgcatctggatcttggcggtcaggtggatgaagagaagactttcggctatcgcctgaatttactggatgaagagggtgaaggctatgtccggaacagtaaaatccgccgtcagctggccgcggttgccctggactggcagatccggccgggaacacagatacagctggatgccagtcactatcattttgtgaccaaaggatttcccggcagctttggttacggcccggatattgatttaccgaatgcgccggacagctccaaccctgaccttgcactgaataccgccggtaatgacctgacaacagattctgtcagtacccgtttcacccattatatgaatgatgactggtcactgagcggcggtatcggctatcagcaggcggatcgggcaatgcgctccgtttcgtcgcaaattctggacagtaaaggaactatcagccgctcgatcacggattctccggctgccggtcgtttccgcgtgctgagtaacaatctcgccctgaacggtcagtttgataccggttcgataaaccatgatgtggcactcgccaccaccggttatacctggtcaatttacagtgccaaagagcggggtaaaacctttcagctcggcaataccaatatgtatgacccatcttccatgaccgaaccttccgatggtcgcatcagaaccggcggggaacgttacaaagccagtgaaaaccagcagcagagcattatcattggtgacactgtcacgtttaatccgcagtggtctgccatggtgtatgtcagtcagagctggatcacgacccgtaacttcgataagcagggacacaaaactgaccgtgatcagcagaccggcaccagcccgaatatggcgctgatgtacaaaatcacccccgatgtgatgacttatatcagttatgccgattctctccagcccggggataccgcgccggatgatgataaagtcaaaaaccggggtgaaacactcagcccgtaccgcagtacacaatatgaatggagtattaaagccaataccggcaatatgaacctgagtgccgcagttttccgtctgaaacggccgtttgcctataccgacagcgaccagatcttcaaaaaacagggcgaacaggtgaatgacgggctggaactgaccgccaccggcaatgtctggcaggggctgaatatctacagcggtgtcacgttcctgaaagcagaactgacggataccggaaacagtaagactgaggataaacgggttgtcggggtgccgaaagtacaggcaaacctgctgatggaatacagtctgccaactgtttcgcagtgggtatacagtgccaacattcattacaccggcaaacgggcggcaaatgataccaacaccagttgggcggacagctatatcacgctggatctcggtgcccgctataccactcagatagaaaatgtgccggtcacgctgcggatctctgcggataacgttaccaacgagcattactgggcgtctattttccccggcaacagtaacggtaaaaatggcggcgccaatgcctttaccggtgctggccgtgaattccgggccaccgtatcatttgatttttaa

SEQ ID NO: 277872 - DNA, 195 bp, Morganella morganii
atgccgtcaccggaaaccggcgacggcatatccggatcactccggttgcagaatatccgtgatctgctgcggcgtcagcgtaatcccataaaacgtctgataaaacgcggctgtttcatttctcatatcaatatccgcaaaggcgtccgggtacagcactgtagccagccagagaaactgcaatgcctcctctga

SEQ ID NO: 277873 - DNA, 1287 bp, Morganella morganii
atgcaagacagcattcagacaggtgcaaatgcaaatagtgatttaaaaaagataccctttaccaaatatgatgccgggtgggttgtattatgtatcgggatggcgatcggttccgggattgtttttatgccggttcagatcggtattaaaggtatctgggtatttattgccgccacattattgtcatatccggcgatttactggctgcagaatttatatctgcggacattatcggaatcggaagaatgtgaagattatgccagcgttatcacgcagtatctggggaaaaactggggggttgcccttggtatcgcctacttcctgatgctgctgcacggcatgttctcctattcgctcgccgtgacctttgacagtgcctcctacatcaaaacattcggtttaacagaaggtttgttatcagattcggtgtggtacgggctgattatcctgacggttctggtggctatcgccgcacagggggagcgcctgttatttaaggtctccggcccgatggtaatagtgaaattcgggattatcgtattactcgggattgtaatggtgccttactggaactttgccaatatcagcgcgttcccggacttcctgccgttcctgcgggatgtgtttctgacactgccgtttaccctgttctccattctgttcgtgcagattttaagcccgatgaacattgcctaccgcagactggaaaaagacaagcgtgtcgcaacttaccgcgcggtacgggcaaaccgggtggcgtatattattctggccgttgctgttctgttctttgccttctcgtttacgttctcgataagccacgaccaggccgtctcagcgtttgagcagaatatctcggcactggcaattgccgcacaggtaattccgggctccgttgttaaagtcatgaccgcaatgctgaatattttcgcgattctgaccgcgtttctcggtatttatctgggtttccaggaagcgattaaaggtattgtggtgaatatcctgacccgctttatgccgcaggagcgcattaatcagaccgtactgcattacggtgtatgtatcggggtgatcctgtccctgtggttctgggtctccacccgcttctcaattctgttctttatgcagctcggcgggccgttattcggcgtggtttcctgcctgatcccgtgctatctggtttaccgcgtgccggtcttacataaattcaaaggtgcaacagtctggtttattatcttcttcggcgtgctgttgtgtctctctccgttctttaagtttttcgaataa

SEQ ID NO: 277874 - DNA, 990 bp, Morganella morganii
atgctaataaataaaaacacttttgcgtttaaagcaaaaattgacagctacgcgatttttcgccatctggagctgtttatcaaaattgtggagtgcaacagtttcagcggtgcggcacgaaaactcaatgtaacaccgtcgtctgtcagccgtggcttacagcagctggaagagcagctcggtgtggttctgctgaaacgaaccacccgcaattttatcctgactgaagccggacgttatttattgcagagggcgcaacagttactgacagatctcgatgactcattagtgaatacggcgagtttttatcagcacgcacagggacagctaaaaataacctgttcaattgccttcggcgtctgccatttaatgcggctttacagcgaataccgggaaataaatccgcaggtcagcttatccgttgatctgaacgatgcattaattaatttaaatgaaactgactttgatattgcattgcgtattaccagtcatccgccggaaaattttgcattacggaaactatgcaatataaattggatctattgcggcagccgtcattattttgaacaaaacggggtcccgcagtcaccggcggatattgcccggcacaattgtttaattaatccgaatatcccggacacctggcggatgaatgataaagacggtgtagcctatccgctggcgatcaacaatatgattgaggtcaacagcagcctgggattactggaggcggcgcgctgtcatcaggggattgtctgcctgccgacctatatgctgggaaactatattgataacggtgaattattgccggtattactggattacaatccgaaaaccacgccgttcgcgctttatgcactttacagcccggcgcacacccatgccccgaaaatccgcacctttattgatttcctggcggataagctgtcgcttgacccgccgtgggacagctggatgcatcaggacagagcagggagttccccggcataa

SEQ ID NO: 277875 - DNA, 180 bp, Morganella morganii
atgcaaattatttatcctggatactacaccggcaactatctgcctgacgacacctttgctgaggaatatcgctgtgcacagcaacagggggtttcctgtctgttacttgacaaggaggtatcagcctcaggcactatgaatattataaaactgacagcgaacgccgctattttgtgctga

SEQ ID NO: 277876 - DNA, 933 bp, Morganella morganii
atgacgaaaattattatggattgtgacccgggtgtggatgatgctgttgcgattctgctggcactggcttctcctgaaattgagctgctgggggtcacaaccgttgccgggaatgttgagctggataaagttcatgaaaatgcccgcaggatccttgcgctggcatcgcggccggatataccgctggccagaggctgtggccgtccgctgctggcccgccggggaaacaaaactgccgtgcacggcagtgatggcctggcgggggtggaactaccgcaatccccttactgttattcagaaaaacacgcggtggattttattattgataccgtgatgtccaaccccggcgaagtcacactgtgcccgacagcaccactgaccaatattgcaatggcgatgctgaaagagccaaggctcagagataatgtgaaggatatcatcctgatgggtggcgcggcattccgccggggaaatatcacaccagccgctgaatttaatttctatgttgacccgcatgcggcacatatcgtttttgacagcgcggcgcatattaccatgctggggctggatgtaactcataaggcagatatccgggcggggctgtgcggggtactggagcagggaaatgccattgccgttgccgccgcacagatggcgcgcggctatgcggaatcggatccgttcctgcacgacccctgtgtgattgcatatttagtccgccctgatattttttcaggcaccgacggacacgttgaaattgagtatgaatcgcgcaggcttttcggcttcagccatgccgttgtgccggatgtgcagaaaggcgctgaaaaccagtgccgtatcgatgaaccacatatcaataccacgattatcaccgatgtacaggcggacgtgttaatgtcgctgatagcggaacggattctgtcattataa

SEQ ID NO: 277877 - DNA, 186 bp, Morganella morganii
atgaagaaaaaaaacagtcttgcatttatcagagagcgattaattaaaaataacgttatttatgtaaaagaactcagtgcactgctgcatgtatctgaaagaacaataagacgctatatcgatgaattacaattatcaggtgtggcagttaaatttcacggcggtgttaaattacagaaaatttag

SEQ ID NO: 277878 - DNA, 390 bp, Morganella morganii
atgatttactggatgtttttaggcttagccattattaccgaggtgatcggtacattgtcgatgaaatacgcgagtgtctccggcggcagtgcggggatgattgtgatgtatatcatgattgcctcttcttatattttattatccatggcagtgaaaaaagtggccctcggggtggcttatgcgctgtgggaagggatcgggatcctgatcatcaccacgttcagtgtgatgtggttccatgaatcgctgtcaccgctgaaactgggcggtctggcactgttaatcgcgggtatcaccctgattaaatacggcaccaaaaaagtgcagaaaaagcagcctgctgccaaaccggttcgtgcgccactgaatgagatgctgaaaggggcgtaa

SEQ ID NO: 277879 - DNA, 1299 bp, Morganella morganii
atggaaatagtagatgatgattcggtttttttacagaaatggaaccttaattctgaattagttgaaaaaagtggtttgtcagtagaaattttgaggtctatagtgcaagactacaaaaataatcaactttcattattagacgaagctgaatatatcgcaaaaaaaattcaacgttgtaattctgtacattctgtacgttggcgtattaaagatacatcccatcttttaaataaaataatcagaaaactaacagaaggtgaaccatctgaaaagtacaagggaataaattcaagaaactataaatctataattactgatcttatcggtgtcagagcaatttatctttttaaaagtgactggaaagaggttcatgaacatattttatcaaggtggaaaactaaagaagatgagtcagtaatgatatatcaccgtgaaggtgacattatggatatttatgcaggtcatactgaatgtaagcaagaaatacataagcataattatcgctcaattcactatgttgtgccagcaactaacattgaatctgtgcaagtatattgtgaaatacagacaagaactatttttgaggagggttggagcgaaatagatcatcaggtaagatatcctgattactcagatgatgaaactttaatgagctatttaaccatatttaataggttagcgggaagtgctgacgaaatgggtagttacgtaaatgaactcgtagaattaattaagaaaaacaataaactagagagtgaacgggatttaaaggatcaaatattccattctgagaaagaaaagcttgaggcggaaatagaaaatctatctgccagtcacaataatttcacagaaatgaagaatgcatatgataaactcatagaagttcagaatgaagagctaaaaagtttaaaagaagagataaaatctagagcagatgaaaaaataaaactaaacaggctaaaaacccctgtatcaaaggttgttaatcaaacagatacagttaaaacagatgatagatatgagggaacaataaagatagaagtaataagaaccaatgacttcgcatcttttgctggccacttcactcccgcattaaaaacaataccaaatgtaagtgtcactccacttgaaacgacggcaaagaatactacaatatcggatttgagagttaatactggagtaggaaatacaagagactttaacgctcacgtttttaatgataagttaagatatatcgaggagggggaatatttattttcatttgtagcaattctagatgagtccagtttgagggggtga

SEQ ID NO: 277880 - DNA, 1191 bp, Morganella morganii
atgacttatcatcacggcgtggaagtcaaagagacaaccaaactcaccaccctgatccgcgatataaacacctctgtaatcggtgttgtctgcacgggtgatgatgctgatgcggaacaatttccgcttgatacccccgtacttgtaacccgcatccgttcagtgctcgggaaaacaggtaaaaccggtaccctgtataaaaccctgaaagccatttctgaccagtgcagcccgaaagtgattgttatccgcgtggcagacgctgccaatatccagcccaaagagggcgagacagccaaaactcaggatcagcttgttatcggcggtaatggtgccgatggccgctataccggcctgtatgcgctgctgacggcaaaagacaagacagacgagcaaccgcgcatcctgattgctccggaactcgacacgaagcctgtggcgctgcaaatggctgtttttgccgataagctgagcgcattcgcttatgtgtccgccaacggctgcaccacgattgccgaggcgaaggaataccgcagtgatttcagtcagcgtgaagtgatggtgctttacccggactggattggctacaacagcgaaaccggtaaaaatgaaattattcctgcgcctgcggtggctgccggattgcgtgcccgtatcgacgatgaacagggctggcacaaatcattatccaacgtgccggttaacggcgttctcggtatgtctgcggatgtgtactggtcactacaggacaaagacaccgatgcaaacgacctgaacgaaaaaggcattaccaccctgataaaaaatatggggctccgcttctggggtaaccggacgtgtgacgaagagatttatgtctttgaagtctacacccgcaccgcgcaaatactggcagacatgatcgccaaagcccatttctcatacgttgataaaccgctcaccccgtctctgattaaagacattatcgacggcattcagaagaaaggggatcagttggttactcaggggcgcttactcggcttcagctgctggtatgaccctgccgacaacccgtcaacacagttacgtgatggtcacgcgatcatcaaatataaatatacgccggtgccgcctcttgagcgcctcggccttgagcagacctttaccgatgaatattttgcggtattcaatcagttaggttcaggagcgtaa

SEQ ID NO: 277881 - DNA, 675 bp, Morganella morganii
atgaccgccattgtttcccctcatgtttactgtaatgacgggattattacggatttatccggttatggctgcattcccggaaaccttggtttgagagaactttaccttgcactgactggcgggacgctgaaagggccgttaaatatcgaatatgttggaggtcggggattaactacaggagcaacagccggaacatcaatttatcatgaactgtatctgcttggaaaactggttgcctggtggggaattataaacagtaacgaattagtgcttgaaaacagagtcgctggtaaaaaattaattattggccccgatggtttcaaagttgacggtaaagacattgcgactactgagcaacttttcggtgttggtcagacctacagaaacctgacgaccagccgtcaaaataaagtctggtacaccaacaccgacagcaagccccggattgttcatgtcgaaacgaacagaacaggtactcagtatcctttcagtattgatattcaggtaattcataacggagtacagcatcgtgctgattatcgctggacaactgctgatgaggttatttgtttaactgctgtgattccgcccagcgcaagatatagcgtcaacggaggatggggacagccgacagaatggactgttattaatttctggctggagtactcgctatga

SEQ ID NO: 277882 - DNA, 354 bp, Morganella morganii
atgaaatattacaaaacgaaaaataatgaagtttatgcacttgaagataacgactctgcaaaagagtggataaaagaaaaagtgactgaaatcaccaaagaggaagctgataacatcacaaatccgcgaccaacgaaagaacaactgatcgcaaaagctgaatacgataagcaggcgctgattacagaggttcaggctgaaactcagttactgcaaacaaaactggcacttggccgtatcagtgataatgaaaaggcgcggttaaacgcctggctggattatctggacgaactggaggcagtggacgtatcctccgcccctgatattatctggccggtgaagccggaggtatag

SEQ ID NO: 277883 - DNA, 630 bp, Morganella morganii
atggcagattacaacactgaaattcagtacgcggtatttgacgaaaacgggctagctatcgtgccgggatgggctgaggtgtattgctgccacccgctgacacgggaatataccggcaaaagcatggatgaggtaccgttagggttcagtctgaaagctgatgcctatccggataaaccggaattacccgcgccgggatttgccattgtccgcagtgaggacggtaaacgctggctgcatgtggaagaccatcgcggtaaaaccgcttatgacaaaaccacaaaagaaaaagtcctgataaacaacgtcggtgcgctgccggataatctggcattgcttgagccgcaaacgccttttgataagtgggacgggaaaaagtgggtaacagataaagcagaacagcacgcgcatgaggtcgctgttgccgaaagtcagaaacagtcgctgttggcagaagctgaacaggaaattgccatgctggagcgtaaaatacgcctcaacatggcgactgaaacagaccgggcaaaactgacagaatgggaaatttacagtgtgaaagtcactgataccgacacatccgccggtgccggtactgaatggcctatacctccggcttcaccggccagataa

SEQ ID NO: 277884 - DNA, 609 bp, Morganella morganii
atgagtagccgcctgctgccgaccggatccagtccgctggaacttgccgctgctcaggcgtgcgcagaaatacagcgcgtgccggtaccgataaaaaccctggtcaatcctgatacctgtccgttgcatctgctgccctatctggcgtgggcgtggtcggttgaccgctgggatgcagaatggccggtgcggacaaagcgggacgttatcaaagcgtcaatgttcgttcacaagcataagggcaccatcggggcgctgcggcgtgtcgtggagccgctcggctatctgatcagcgtcactgagtggtggaaaaccggtgaccggaacgggacattccgcctgacagttggtgtatcggaaaccggcatcaccgaagaaacctattacgagctggagcgcctgatattcgacgcaaagccagtcagccgccacctgctgggattgtctattaacctgagcacatccggcaatttttactgcggtgctgccgccaacaccggcgacacgctgactgtttatccctacataccggaaacggtacgggtggaaagcgcggactatctcggtgccgcactgataaccattgataaagtgagagtaaacccatga

SEQ ID NO: 277885 - DNA, 909 bp, Morganella morganii
atgccaaccatcgacatcagccagttaccgccgccggacgtgatcgaaacattagatttcgaacagattttcactgagcgtaaagccgcattgctggcctctctgccggaagaactgcgaacgccggtcgcccgtgtgctgcaactggaatccgagccgctgaccaaactgttacaggaaaatgcttaccgggaaatgctgctgcgccagcgggtcaatgaagccgcccgcgcctgtatggttgcctatgcctacggggcagatttggatcagctgggcgcgaataacaatgttccccggctggtcattcaggcggctgacgatacggctatcccaccactgccggccgtttatgaatcggattctgatttccggatgcgcatcccgcaggcgtttgaagggatgagtgttgccgggccggtcggcgcttatgtttttcatgcacgcagcgcttccgggctggtagcggatgcttcggccatcagtccggaacctgcctgtgtgaccgtcagcgtgctgtcacgcgagggtgacggtaccgcaccggctgaactgctgaccctcgttgataaggcactgaatgatgagaatgtgcgcccggtggctgaccgcgtgaccgtgaaatccgttgagattatcaattacaccattgacgcggtgctttatctgttcccgacaccggaatctgaaccgattgaagcggcagcgagggaacggatagcgcggtatgtgaaagagcagcaccgtatcgggcgtgatatccggctgtcggccatttatgccgccctgcatgttgagggggttcagcgcgtcgaactgaaaagcccggcaaaagatattgtgatcagcaatacccaggcgtcattttgtactgatgtgacggtgacagtcggaggttccgatgagtag

SEQ ID NO: 277886 - DNA, 417 bp, Morganella morganii
atgctgaaaccgaagttactgcgggaatttctgacggcgcgggagccgcgttttcagcagaacccggaatcactggaggtctacgcctcagagggaaatcttattgccaccggcaagccgggaaattcattcatgtacagctacaagctgaatctgctggcaatggattacccgaactccctggatgatttgatgctgccggtgctgaagtgggtgcgggagcaacaaccggcgctgatatttaacccggataaacgcgagggcgggatccgttttgatgctgacattctggacaacgacacagccgacattctgattgtactgcccgttaccgagcgtgttgttgttgagggcggagacggagaagaaaccgtaacacatctgcctgagccggaatttaaaccgcgtcaggtgtaa

SEQ ID NO: 277887 - DNA, 1035 bp, Morganella morganii
atgaaaaaaaagaaaacactgcccgtcaccgctaaagcagaattacccgctgacaagcagtgtgctgcattcacctttgataatcctgtgccggtcaccggtgcttatgacctgctcgactgcatggagtgcgcgaaaaccgataagtggtatgaaacgccgttagacttctacagcatagcccgcgcactccgttcagcagtacaccatgagtcaccgctgctgtttaagcgcaacgttattatgagttgttttatcccgcataaatctcttccctatcaggaaatgagtgcttatgtccttgattatctggtattcggaaacggatatcttgagcgccgccgcaacatgctcggctggctgctgcaactgaaacgatcaccggccaaatacacccggcgcgggattgacctggacacctattatttcgttcagacatggcaggatgcacatgaatttaagcgcggtgatgtcttccacctgatcgacccggatattaaccaggagatttacggactgccgcaatatctggccgggctgatatccgccaaactcaataaatcggctaccacattcagggttaactactatgagaacggctcacacgccggggtgattgtttatctcaatgatgcactggccgacccgaacggcgttgagaatctgaaaggcgcattgcagaaatcacgccgtgacggggctttcaagaacctgtttgtttattcggccaatggcaagaaagacggcattcagatcctgccgttcagtcagattgcagccaaagatgaatttatgaacgtgaaagatgccacccgtgatgatttgcttgctatgcaccgtgtgccgccgcagctgatgggtatcgtaccgaccggtgcaggcagcttcggcgatgtggaaaaggccgcgaaagtttttgctatcaatgagctgatgccaatcatgcagagtctgaaatccgtaaatgactgggtcggtgaagaggtagtgcgcttcaatgagtacgccctgcttgaagccctcggcgcaaaataa

SEQ ID NO: 277888 - DNA, 1773 bp, Morganella morganii
atgtcagtaaaatcaaccattgatttttacttagccgaagaaagccctggttatgcattgcaaataaccggagaatggggagcaggaaaaacccatgctgtaaaaaaaatattgcaaaatgatatgtattacctcagtttattcgacatacaaagctctgatgaggtttattcttcaattttttatttaatgcaaaagaataaagaaaaagccaaaagagcattgagtaatttaaaaaaaatagacatttcattttgggggattaaattaccagtcggtgacgtattttcttctttatcaaatgctattataagaacagaagtgattaatgacaaaccaattgtctttgatgatatagaaagaagttcattatctcaagatgttatctttggcattattagcaattatattgaaacacataactgccatgtgattattttgatgaatgacaacaaggaaaaagaaaacagccaatataaatgcctctcagaaaaaacaattggaagagttgtaagggttactccagagtacaatgaaagctacgacagttttattcttaatacaagaaataaagacatactatcctcaataaaatctaaattaatatctattttcatgaagtctaattgtaattcactaagaatattaaaacgcattatttttgaaatagatataatatgcagctgcatagattttggcaaacacaaagatattacaaatgaaatatatgagggattatttgttttcacaataacaagcatagccgcaaaacaaggaaaaataaataaaagtaatattgaaggcagaaagttaatctcttactataaaaatagcacaataaatggaaaaaatatagataatgaaatcaaagcatgtaaagaaatatatgacgtacatatcgacgatgtagacatatcaataacaatattaaatgatgttgttttaaacgatataatattcgatggtaaatacaaccgccatttgataattgaatcaataaataactatcagaaaataaataaaaataacatagaggttccatggaaaacaatttacaaatttatgcagcacagtgatagtgatatcaaaaatgcattggatgaaattaaatctataattgaaaatagaacttattacccactacctcacatactacaatttatatctgcaataatatatatatcagattatgttgcatatgattttggtaagaatggcatggagtgctattttattaattacatagatgacctttacaaaaaagaattattagataccattgacttttccaatacagctaacatctataatttcgattccgtagacaattacggttattattcaagtgaaaaagaacaatttaaaataatcaaaaaatatttgattacaaaagcaggtgacttaagagataaaaaaataaatgaagaaagtcaaaatttattacttttaatgaaagatgatatagatatattctcaaaaaaattaaccgataaatcttatgaatttatgcttgaaccactactcagtaatataaattacgttgatttcattgactcattcattagtctggattttccccgactggacaaagtcaatagaattattacaacacgattttatagaaaccaaggttattctaaattaaaaagtgaatatgactggcttatggaaataataaaactattaaaaataaaagtacttacgttttccggaataaaaaaattcagaatacaatgtgctatagatagatttgagactgtatttaaccaataa

SEQ ID NO: 277889 - DNA, 222 bp, Morganella morganii
atgtctgatgaaatagaccgtgcaaatgatcatgcggcgttaattttggaacatcagatagccgcagctcggcaggtaattacccgcgtttccgcatttgtctgtgagaactgtgatcgcccgattccggaagcacgccggaaagtcatcagtggctgcacattgtgtgcagactgtcaggcagcagatgaattaaagcgcaggcactaccggagcatttga

SEQ ID NO: 277890 - DNA, 222 bp, Morganella morganii
atgaaatcatttccggatccaatatttaccccggttgctgaaagtattaaagcgaaccgtgaagatgaacgtaaatcactgcttaatcggtttgccgatcgccagaggtcacttgccggaaaaattatgaaagaaaaattagaacgggcagatatttgtcagctactgatgaatgatgccgaccatatcgaaaatgaagcaggggagctgaattatgtctga

SEQ ID NO: 277891 - DNA, 186 bp, Morganella morganii
atgactaaagagcaaaaagttctcttcttggttgaacaatctattcaatgtgccctcagtgaaatccatgatcagggttattcacataccgggtcggtcataaaaagtaaaattgacaactattactactctttgaaagaaatccttgaagaaaaacttgcacaaaaagacactgattttctttga

SEQ ID NO: 277892 - DNA, 303 bp, Morganella morganii
atgagttatatgaaaaaagagcatgtctcaattgatgaattacgaactgatagttttatttatgttgtcagtgaattcatctgtactaattcagaatgtgaatattcaaaaataagattcattgaaaaaacacttgataacctattttcttttgaaaatgccgacaaggctaaatcagagaaactaattccattattgaaaatagcagtaactaatggttcctgggttattgatgaaaaagagattgaatcacggatgtctgagagcaagcaaatcataagtaatctgcttgccatactttaa

SEQ ID NO: 277893 - DNA, 279 bp, Morganella morganii
atgactaaggaaatcgtaaagacaccaatagcctcggattgtgtgacagaggcgaaatttgcagaaatgatcggaaaaactaagcaggcaatttctgatatgcgcaaagatggcaagttaccggttgttgagatgaaagatccgaaaggtaagcggggcgaatattacgtttatttgccagcatggaatgccgggctgaaactggcgtatgaatcactgccggaagaaatgcgcgacggctggttagcgtggctcggtttgggtaaaccccgtcactaa

SEQ ID NO: 277894 - DNA, 981 bp, Morganella morganii
atgtcgattaagaaactcgaagatggtcgctatgaagtggacattcgtccggctggccgtaacggaaaacgtgtcagacggaaatttgataagaagttcgaagcaatcaatttcgaacggtacatcatggccaaccattcaaaagaatgggagccgcagctgacagataaacgtaagctgagtgaactgacagatttatggtggaattcgataggaaaacaccaggagcattcacacaatcacaaataccgtgttgaacagttctgccgcctgatgtctgatccgacagcagcacagatcacgaaatcactgatatcccgctattgtcagctcaggatgtcacaagggatcaaggcatcgacaattaacagggaaatcacatgtgtgagaagtgtattcacttatctgatagaaacggaattatttaaagcggagcatccgtttaacggatttaaaaagctgaaggaacaaccaacagaaatgtcgtatctgagtagtgaggaaattacagcgttactgaagaaattagaaggtgacgactataacattgccgttttgtgtctgagtaccggcgcacgctgggcggaagctgtacggctgaaacgggaacatattattcagaataaagtgcggttcacttatacaaaaacacgtaaaccgcgcattgtcccgatctcagacgaactggctgaactgatttgccgggataaaaaagacctgcttttcccgaaagtatcttatctgcatttcaggaagattttaaaagagacaaagccctctttaccgacaggacaggcaacacatgttctgagacattctttcgcaacgcacttcatgatgaacggagggagcattatcacattgcagcggttacttggtcattcaagtctcagccagacaatgacctatgcgcactttgcgcctgactttttgcaggatgcggttatgttcaatccgttgaaaggaggatgcgggatctga

SEQ ID NO: 277895 - DNA, 405 bp, Morganella morganii
atgactatccgatttctgacagttgatgaagtggttgaaatacagcgctcaacactgccgaacagcggtaaaccggatctcagcaaactggaaggggcgttatcccgtattgaggcattgcgggattatgaggagtgtgaggatatttttaagttctctgccatgtacctgatttcaattgccaaagcgcatgcttttaatgatgcaaataaaagaacggctttccaggcagccagtgtgtttctgatactgaacggcgttgaacttaatgtctctatggaactggtcaagctgaccatactggcagccaccggagaagcggaacgcgatacagcagcgtttgttctcaaagtattgtccgattatcacaacgacctgcttgaagagacaaccggcggatattaa

SEQ ID NO: 277896 - DNA, 453 bp, Morganella morganii
atgaaaaatgtatcctacaccatgatgagaacggagctttccgctatcctggacagtctcaggaatggcgagaacgtgacaatcacccagcgcggaaagccggatgtagtgatttccggcactgtcctgtcatcatgcagagcagaagaaccggcggcggagtattttgccggtaaaccggaaacactgtttccggcggataccataaatcagctccggcaaatggaggaggcggtaaaatctgttctgccttccccggattttatcgaaacggtgcgtaaagcgtcggctcagcttgaggctgcggtgaattcagatgcaatgaaagagatgctgcgtattaccgggcagctttcggatattgccggtaaaaatctgaccgatttccagaaggcactggcaagaacgaaaacaaaacacgctgacatcatcagagcgctggaagacaaataa

SEQ ID NO: 277897 - DNA, 231 bp, Morganella morganii
atgcagcgcggctttgcaatgtcagctgccacgtcaaacctgttccagccgtataatgtcggtaaatttaacctcagtgcagctgtcggcggatataactccgaaaatgcggttgctgtcggcagcggctaccgtttcaataaaaatgtggcagttaaagccagcctggcaacctcaacatcaaacggcggtgatgtcatgtatggtgccggtatgaacctggagtggtaa

SEQ ID NO: 277898 - DNA, 894 bp, Morganella morganii
ttggcactatatgggacctttgaaaaaaaatgttggctgaagttcattgatggaaaattgcctattaaccagatatcattacccggtacacatgattcagcgacaggtacatatagtgaagggataggtgaaggcgggatggtaaaaacacaggatgattctgtttatgagcaacttaattcagggatccggtttattgatgcacgttgtcgtcatataagtaattcatttgccatgcatcatggaataatatacttaaataaaatgtttggtgatatcctgaatgaatgtaagcgttttttgcaggaaaacccgagtgaatttattcttatgtcagttaaacgtgaacatacagaagagcaatgtacccggagttttcaggaaacctttgagaaggaatattatgattcttattggtggtttggggaggaccgtttccctctgctggaggaagtcagaggcaaaattgttcttttcagccgctttggcggaccccacggaatacaaacgtcctggaaagataatgcaacatttgatattgacgaaagaatacatgtacaggatgaatataatcaaacagatgaagtcaaaaaatggcatgcaatagaaaatgcatggagttttgcagcctacagaggcaatactgaatggatgacaattaattttaccagcattgcagccggattttggggtacaaggagtataagggattatgctgaagataaaaacccggaactggctactcatataatgtcccgtggtgaatgctgtggtgtcgtcgtttctgattttcataatatcgctatgctttctaatggtgttattatgactaactttcggaatatgctaaatccggcaagaggattgtttttagcttttttattaatatcatag

SEQ ID NO: 277899 - DNA, 564 bp, Morganella morganii
atgaagttaggaacgtatgaacgaccaaaatattggggtgttgatggtgttatcggtgatatctactactatccggattatactttattctttagattaaaatataatggcagtccatctgataaaaactggtattatccgaaaaaagaagtcaataatcagttctgggattgggttgggtattaccccggaacgatgtcagagcccaaaacttggcgtgaacccggaatcgagggttgcatttactatgagccggaatatggttatttacgtttgaaaaaagacggtaatccgtctgaacataaatggtattttccatctgatggcaactcaaatgaatattgggattttatcgactttagggcaggtaatcctgtggatcctaaatcttgggatgtagatgaaggccaggaaggtgattatttctatagtgcgagactgaattctttttttatttttaaaaaaaatggtaagccatcttcttttaactggtattttccggaaaatggacaggataatacttattggcactatatgggacctttgaaaaaaaatgttggctga

SEQ ID NO: 277900 - DNA, 2133 bp, Morganella morganii
atggcttacgcacataaaaaacactttaataaaacattactggcattattactgacttcacaaagcacactggcattttccgcaatggattatgacgtctcaaagataaaagatattggtcagtcatcatctgtttctgctgatggtaaagtaattgccggaacttatgaaatctcaaataataactatcgtccttttattattattgatggtaatgcagttgacctgagtaaatatgcagccggaaataatagcatttatatctccggactttcagcggacggtaatatcgccaccggttatatcgttgatgaaaataacagattaaattctaaaatgtatatttatgataccaataccgatacggtgaatattcctgatcagcaggcatttaccaacgtcgcttcccagggtatttccggtgacggtaaaaccgttatcggtattgcagacgaaaaggccttccgctttaccggacaggacggcattacattattagatccgtcagaaaccgcaacctccaccgcaaacggcgttaattatgatggcagtgtgattgtcggccgcttcatcagcggcagtggtcaggcatttaaatatactgatgataaaggcatggtttcactgggcacactgagagaaggtaatgctggcgaatccggcgctaatgctgtatccgctgacgggcttattaccgtaggctggtcaaatatcagtgaatatgaaacacatgcgatgagtcataccgataaagacggtatgcgtgatctcggcaccctgaagaaagataacagcggctattccactgcgtcatcagtttcacgtgacggacaatttattgtgggttcatccgataacgaagatgatatcgcacgtggctttgtctatgtttcaggtgaaaaaaagatgtacgaactgaaaccactacaggaaagctttgaaggtgaatccagtgcggaagccatttctgcggatggcaaagtggtcgccggttatgtgcagaatgacaataatgaaacatccgctgttctatggaaactggactataaaccaccaatgaccccgcttgagccgtcaaaaccggttgatccgtctgaaccactgacaccgcttgagccatcagagccggtcaaaccagtcaaaccaatcctgccgctgacaccggttgacccggctgataacggcggtatcacggtctctgatcctgttgatattattaaaacccgcaatacagtaacaaaactggcaaacagcagttatcaggttctggatttataccagaccgccctgtataacctcgcggaaagccgttgccagatgggtgacgataattactgcgccggcctgtttacccaatatgacaatgtgcatcagaacagccgtgtggccaccggcgtatttggttcattccgtttaccggcagaaaactggacgctgggcgcgtcactgaatttcgccgtaaatacccgtctggccgatggctacgacacccgcggcaataatcatcccggtgttggcgcatggctgcgttatcaggaaaataaagataactccggctttaacagtgagctttccgctgcatttttacagcagggtctggaaatcacccgtcaggcacaacggggcactgaaaccggaaaaggcaattctgatatcaaaggttactatgtaaaattcaccaccggttatggcattaccgtgagtgcaaataccctggtgacaccactggctgctattaaatatcataatgtcacccgtgccggatatacagaatcaaatggtattgatttcccggcaacctatggccgtgccggaaataaaaaccttgatttacaactcggcgtggatttgaaacatcagtttaataagagcacagaactggatgcaggtatcggcgcggatattaaactcagtcaccagcgtgatgcctttaccggccatattcagtatgtgaacgatgctgattatatttatgatcgcggcaacagccagagtgtaaaaccgtatgcccgtgccggtgtgaattactttatcacggagaattcaactctccgcggcgatattggttatcacaccacagattaccgtaatgatggtttgcaggttggtctcagctattcataccactggtaa

SEQ ID NO: 277901 - DNA, 240 bp, Morganella morganii
atgtttaacgaatgcgttgttgatgaaattttaaactggatagaaaataatcttgagtctgatctttcattagaagccgttgccgggaaagccggatattccaaatggcattttcagcgtattttcaaacaacagaccggctataccctggcaaattatgtccgtgcacggcgtttatcctgtgcggccatcgccctgcgcctgctaccgctcaacctgatgcatttatccatgaaataa

SEQ ID NO: 277902 - DNA, 285 bp, Morganella morganii
atgctccgtattgaagttattttcagcagaaaccaaaaagagatgataccgcctggcacatttgaagctctggaaaaggaaattgaccgaaaactgcgagctcagtatccggatatgaacattcgtattgcgtggggaaccaatgcagcaatgtcagtaaccggcgggaaaaatgataaggataataaaaaaataaaagagatactgcaggagatttttgaggatggcagttgggtgcctgaaatggcagacgcttctgatgatgtagaatattttgataaataa

SEQ ID NO: 277903 - DNA, 879 bp, Morganella morganii
gtgccgtacccgtcccgctctcatgaactggccggtctggccgccggtaccgcgttttatttccgcgcccggctggtggataaaaccggtaaccagtccccctggactgagtttgtgcgcggtgtggccgagttcgatgcatcgaacattattgatgaagtggccgccgggctgggcgactctcaaattatcaaagacctgcggtcgcaggcggatgacaacttcgaagccatcatcaacaacgccaacaacgcatacggccagtggggctactggcagcgcgaaaacggcgcgatgaaagcagaaatcatcgaagtccgcaactacacggtcacggaaacgaaggcacttgcagagaaactggatgcggtacaggttaaagctgaagatggtctggcgctggcgcagaactccatccgcgcgcagtgggatatggcatccggtcaggcatcggtggtccacgatatgaaagtccggatccgttataacggtgaggattattccgccggtatggttatcggggctgagctgaaaggtggtcaggtgaacacgcttatcgggtttaacgcgcagcagtttgcgttttataatccggtaaaaaaatcgatggatctgttcatgtacatgaaggacggacaggtctttatgcgtgaggcgttcattaatcaggcatggctcaacagtgtggttgtcactgacaaaatgcagtcggagaactatgtgccgggtaaacagggttttattctggatgcaaaggctaataaatttgagttctttgacgggacaacaacaaacggtaccggtattacagcgggcggtattaaagtatatgacaataaccggctgacggtcattattggtgatatatcggggtattaa

SEQ ID NO: 277904 - DNA, 1896 bp, Morganella morganii
atgttgaacttatcatcaagtcaatctcaaatagtgcacgcaccatttaataaagcgattcaagtgcttgcttcagcaggttctggtaaaacacgagttttaactgaacgaattcgctatatattgcagaatacaaaaaaagatggggtgatagcgctcactttcacaaacaaagctgcggaagaaatgtctgttcgcctagaggactgtattgaagcagaagacagggcttggatagcaacaattcattctgtggctcaacgtattctcgagaagtatgggcatacagtaggattacctgcagagcttcatatttatgatcgagataaagatcgaatggaagttttcctccaatccttacgtgaagatggcgtaaatattgatgaatatctgaatatttctgattctaaggagctaaaaagtcgagaaaaaaacattaaaaattatatggatatattttcaagaatcaaacgtgagctatttacagaatcagatgtaacagaaaaatacccaaacaataatatttggaaggtttttcaagactatcaatcatctttagtcaatagtggtgggatagattatgatgacatattagtctatgctcacaaaattttattaacacataactggatcgctcaaatttatcgttctcagtacaaacatatttgtatcgatgaagctcaagacttaaataaagcccagtatgagtttattaaggcattgtgcggagatgtcatccacagtgtattcatggtgggggatccgaatcagatgatttacgggttcaatggttcttcaaaagagtatctttgcacctatttcttggaagatttcactccatttcagtttgaattaaaagaaaactatcgtagcgcaaaggctattattagggctgcgaataaattaaagccgaactctcaatcggaacttgattatgccttagaaggcagtgttaagatagtttccgctgatacggaagaagctgaggctgaatggataacatctacagttaagcagctcttagagttaaagacacaccctgaaatagagggtgacatatctttagataaaatggtggttatagcaaggaatagatttgtttttaataaactagaagattgtttaaaaaaaaataacatcagttattctatgagaaaaggagagcgtcaactagagcctacgacaatttttggaagaattctcgattactctattcgcataaagctaaacccaaaagattgggttgatggtaaaaaattgtgctcactattgggaattattgcgcctacgtcatggtcaaatggtgttttaaatattttagctaatcaaactaaaaaactggatagagaaaacgctgaattgtactctgagttaatgagctcaataaataacctagacgttgatgaacctaacataagaaagttcgttcgcttgtttaaagaaaaattaactagcttaattagtcaagccgatgctccatctgaaggaaagtctgaagagataaaattaagtttagatgagttgaatgaatttagcagagcttggactttattcaaacgaaaaggtttgggaagttctttagtcgcttttagaaatgctttagcccttggtcagttaacagaaaactcattagaaaacgggttgttattgagtactgttcatactatgaagggacttgaaaaagacatcgtttttttgatgggaatgtgtgagggcgttttccctgattaccgagcaaactcaataaaagaaattgatgaagaacgtaataatgcctttgtggcagtaactcgcgcaaagcgttggctttatgttacgtatcctaagcaaagaatgatgccttggaaagatcttaagttccaacagaaatctcgctttgtcagagaaatagagtaa

SEQ ID NO: 277905 - DNA, 1767 bp, Morganella morganii
atggatattcaaattgatgttgttcgaatttgtggattcagaggtgtctccaatgtggaggttattttgcctcgggtaactgtattgtttggccaaaataacgctggaaaaacatcgataataaaagccctgcaactttcattaggagattactcccggtatttatctgatgaggattttcatattggcgatgatgaaaagagacaagataatattgtaattgatttgcgttttattgcattagatcgtggcattagaacctctgagttttcagaatcatggcaacaagaatttggtgattcgatacaagcagaggctgatgggaaacaattcgtagcaatacgaacaactgcaaagcctgatagaattaaaggtggatataacgtcgaacgattttatttagatgtttggccgaatgccgaaaattggcaagatcttcgtatcaacagtaaaaataagatgggaaggagactcgagtccataccttttatttctatagatgcacagcgagatatccataatgagttaaaagaaaaatcttcgtttgttggtcgagttctatcaagtattgaatacggtgatgatgatgtagcagaattggaaaaaatggttgccgaaatcaacaaggaagcgattaataaaagcgaacctcttaaacgtttaaaaaatcatcttgatactctaaatcaatcatttgaagggtctggacaaactgaactgacaccgttccccaaaaaaataagagatctttcaaaacgattcagcgtgcattttggagagtctgataaaagctcattctctatggaataccatggtatgggaacacgcagttgggcgtctatattggcagttaaagcatttacagaattgatggcgacaaaccatgagaatgaagctgagccattctttccaatattagcggcggaagaacctgaggcacatttacatccgaatgcgcaaagaacacttttccaacaattacaagatagtcctggccaggttatcattagtacacactccccatatttagtggggatgtcagaacttgaaaatttacgtggattgattaaaacatcaaatgctatcaatgctacacgattaattagtgaactagatcaagaagatataaacaatcttcagcgagaaattatgcgattcagaggtgaactattattctcaaaagcgctaatattattcgaaggcgttactgaagaacaaataataccttcaatgttttcagtcttttttggaaaatctgcattttctcttggtgtaaattgtataagtgtttctgggaaaaactacccgccatttataaaaatggcattgagttttggcattcctgtgtgcattgtcagtgataacgatggaaatactaaagcggaaattgaatctcaattaaggaagattgaaaaaaacacatcattaattctgtctgaaaaaagtttacatgtttcctatttgtcaccctcaaatgatattgaagctgagttaattcatgttgtggggatgcgtcaagaaattatcgaggctctgattaatacggagacaagggggagaagtcatgctgcctatattgaagctaaaactagagaaatcgaggggcttactgatgatgagattctaaggagaatgcgttcttccaaggcatcttacgctggttttctagctgatgtcatattaagaaatccaaacaataaaacagtggagcaattgatacctcaggctgttattgatacttttactcagctaaaagagtggggataa

SEQ ID NO: 277906 - DNA, 567 bp, Morganella morganii
atgagaacctttggttatgctcgcgtctccaccagtcagcaatctcttgattcacaagtaaaagcgcttaaagctgagggagtaaaaacaaatcgtatttttacggataaagtgactggcagtaagatggatcgcgaggggctccagatgcttcggctaaaaattgaggaaggcgacgtcatcctaataaaaaagctagaccgccttggccaggatacgtcagatatgattcaacttatcaaagagtttgatgaaatgggagtcgctatacgctttctggatgatgggatcagcacagaagggacaatgggtaagatgatagtcactatcctgtccgctgtagctcaagcagaacgacaacggatactggaacgtactaacgaaggacgcttagaagctaagagtagaggcgttaaatttgggagaaaacctagtgtggataaacaaaaggtcttagctcttagggagcaagggattggggctacagatatatcgagaatattaaacatcgcccgctcttcggtttacaaagtgctccaaatgggccaaaaaaggtatcttgaataa

SEQ ID NO: 277907 - DNA, 444 bp, Morganella morganii
atggttgcaattttgttaaaaaagccgtcaggcagggaggccgatatacccgttgattttttgaccgctgagccggctgagagttatggcagattcaccggcgaaccagatgaacttcagctggcgcgttattttcatcttgatgaagcggataaagaatttatcgggaaaagctggggtgatcacaatcggcttggtattgccctacaaatcgggtgcgtgcgctttctgggcacttttcttactgacatgaatcatattctttccggcgtccgacattttaccgccagacagctcgggattcgtgatatcaccgttcttgcagaatatggtcagagggaaaattcccgccgtgagcatgcagcactgatacgccagcactatcagtatagcagtatagcgaaattgcccggccctcagacgataattttcatgacgaaatag

SEQ ID NO: 277908 - DNA, 885 bp, Morganella morganii
gtggaatggtacatcagtgatgccaaaaacggtgatgaagccccagaatatctcatggatagtctgagttcccatgaagtagacggtgtatggggaacggcgtatctgagcctgtatctgccgtggaacatcctgttctcagaagaaggtaaacaggaatttcaggagtgggtacagtatttatgccgagaactggaaccggatcacggtgactgtggttatacactggttatgccacgtgattattatctgtttatgccgcaggaatatggactggcacagcgttatccggcgatggtggtgaattccaccgttcatatggctgcaactgaatacgaaaattctatccgcagtgtacagtggctgacgctcctcgctgaccgctatattgaacgcctcggcggtgaggctcatgtacgcaaggtgttatctgcggacccggagattaccctgacccgctaccccggcgggctgatgattcaggccggtgattatccggatctcacccccggcacaccgccggaaagttattaccggattaatgagttgatcagaccaatccgttatgtcattaaaaaagatgattccttacatttttgcggagagggacattttacaaaagaaacaagcaggcagtggtatgagcgttatgatcgcggtcctatggttgtttctccgttgtatgcgggtgaaccggcccgggttgatggttactggacaaccaaaggccgcgagaatgtggagaccatttttcttcagggcacaccggcgattgatattgaaggcaatccgctcggcagtacagaatggcggcttatctgggaaattccgcatgatgatgaacgggatctgaccctgctggagcaaaaactcaatggccggtaa

SEQ ID NO: 277909 - DNA, 267 bp, Morganella morganii
atggccggtaaaccggttatctgtctcggtgatacgactgaccacggcggcgtggtcatctccgctttgaataattacagcatcaacgggcgcccggtggcgacggagggggattcggtctcctgtccgaaatgcaaaggcgtctttcagattgcttccggttcttcccttatgacctttcagagcaaaaaaattgccctggagggcatgaaaaccacctgcggcgccacactgattgcgtcacagtctgtcaagacatcagagtaa

SEQ ID NO: 277910 - DNA, 753 bp, Morganella morganii
atgactgtgcataaaatatctgcgtattttaatagtgatttagatatagtttggccgtgtccttcctgtcaccagaaaacactacaaattgttaaaggtacctttaaatgtgaaaatactgcggatacaaatcgtatcttgaatgaagaatggtttgactatgaaatgcacagaacagtttttgtttgtatggctaaatgtgcgatgaaacaatgccaagaaatcgtcgcgtgttcagggattggtggcacagaatttatctacgatagtgaaattccccatcttgacagttattatcagccaaagaatttttcaccaacgttacaccctttcttaataactgaaaaatgtatggaagagataaaaaaacctcttatcgcttccttttctatttatttcagccagccaggatctgctgctaatctgatcagaattacggtggaaaggttactgactgcgattggtataccggacaaaaatgataaaggacgtgatattaaactacactctcgtatcgatagccttgagggactatacgcaccttacaaggagcccttgatggcaataaaattcttgggaaacgctggtagccatacctatgatgaagtaaaaacagatgatatcgaagatgcatttgagattatggaatatgttactactgatcttttctcgggtaagaaagagtcaattgagatgctttcggaacgactaagtagtaaatttgataagaaaaaacaaacaagaaaggtatag

SEQ ID NO: 277911 - DNA, 720 bp, Morganella morganii
atgaattggctaataccattaaatggaaaatccccatcaggagcatataaagtaaactttcttgttcaggatgataagatatacattagtgataatcacagagttgccttgtggtgttggatgcagcacttaacacaagattgtaacattgcgttattccatattgacagacactatgacactcttccattaactagtaattatatcgacgaatttcctggtgtttttaatctccaatcacttactgactatttaaacctaaaaataaatataaattcacaaacaacaccactaatacgctgggataattacttatcattttttatatcagactcaactatcaacagttgtattcagtgtatttatcttgcaacgcacaaagacggtactttcccaaaaaaccctttagttcataacatcaagcaggttgaaccatacgaactactagcggacttagaaggtacactttctaatcacgatagaacaatcataaatattgatctagattattttttcactgacaaatctggtaatttttttcaatttattgatagcaaatttataattgagttatttaaattaataaaatcagggttagataataatgaaatagaatgtctcacgatatgtctaagccctgaatgctgcggcagctggtataattctgaaaaaattttagaaatcgcaaaaaaggagctcgatattaatttcacattataa

SEQ ID NO: 277912 - DNA, 486 bp, Morganella morganii
atgcatgatgcgttgatctgcggcaggcgtttccggacgttcaatatcgtggatgattttaatcgtgaagccctggcgatagaaattgatctgaatatcccggcccaacgtgttgtccgggtattggacagaatagttgcaacacgcggatacccggtgaaaatgcggatggataatggtccggagcttatatcactgacactggcgcactgggcagaagagcatggtgtgatactggaatttattaaactgggtaagccgactcagaatgcctttatcgagcgttttaaccggacataccgtacagaaatactcgatttttatctgttcagaacgctgaatgaggtacgggaaataacagaaaaatggttgtcagaatataactgtgaacgcccgcatgaatcactgaacaatatgacgccagaggaataccggcaacaccattattttgatcccttccctttcttcagtaccggtataaagtag

SEQ ID NO: 277913 - DNA, 150 bp, Morganella morganii
atgaaaaagacacgttataccgaagaacagatagcgtttgccctgaaacaggctgaaaccggtacccgggtagaggaagtatgcagaaagatgggtatttctgaagccactttttacatctatggactacctccgttttgcaagtactga

SEQ ID NO: 277914 - DNA, 1020 bp, Morganella morganii
atgaatgttatctatctcggtattgatctggctaaaaatgtttttcagctttgtggattaaatcaggcgggtaaaccagtttataaaaaacgcactgatcgtaaaacgttactacagaccgtcgcgaatattccggcctgcctgattggagtggaagcctccacgggcgcattttactggcagcgtgagttcgaaaaactgggacataaggtaaaagtgatcagcccccagtatgtaaaaccctttgtccgcggacaaaaaaatgacggtaatgatgcacaggctatcgcaattgctctgatgcagccaacaatgcagttcgtaccccccaaaagccctgaacagcaggatattcaggctctgcaccgtgcaagacagcgtattgttaatcaccgcactgcgacagtctgtcaaatccggggactgctgcttgatcggggaataacaatcggcgcggcagtctcaagagttcgtcgtgctgttccgcttattcttgaagatgctgaaaatggtctcagcgttagaatgcgcaggacgattgcagaactttatgatctctttaacgatcttgatcgtcgtataagcttttttgataaagaaattgatgctgtgttcaggcaatcagaagcctgccagcgcattgccaaagttaaaggcattggccctaaaacagcaacagctgttgttgccgcgattggaaaaggaactgaatttaaaaatggtcgtcactttgccgcatggcttggtctggttccacgacagcactcgagtggtgacaggcaggtactgatgaatatgacgaaaaaaggtgacaagcatttgcgaaccttatttattcatggagccagagcagtcgtcagagtcgctgcaaacaataatgatggttatttaaaccaatgggtcaatcagctaaaagagcgacggggattcaacaaaacgaccgttgcggttgccaacaaaaatgccagaattatttggtcaattcttcataatgaaacagagtacagaccggcagtgtaa

SEQ ID NO: 277915 - DNA, 801 bp, Morganella morganii
ttgctggaggcctaccgtatcgggctgcggcgtggttgttgtctgatgatgcagagccgcacggtctaccactatcaaagccggcgtgacgaccgcgcagtcacgcagcggataaaggaaatagcggaaacccgcatccgctacggcgtgcagcgaatacatatcctgctgcgccgggaaggctggctgattaaccataagaaaacccaccgtatttattgtcaggaagggctgaatctgcggacaaagcgaccccggcgacatgtcacagccaggcacagacaggagcgtccggcagtgacggcagccgatcagtgctggagtatgaatttcgttgctgataatctgttcaacgggcgccggatccgggcgctgactgtagtcgataattttagtcgggaatgtctggcgatagaagttggacagggtttgcggggtgacgatgtggttgcggtaatggcgcgtctgaagcagttacagcaccgtgtacccgaacggtttcagaccgacaacggcagcgaatttatctcaaaggcgctggataaatgggcatatgaaaacggggtaacgatggacttctcccggcccggaaagccgacggacaatgcgttaatcgaatccttcaacggtagcttccgtgacgagtgtctgaacgttcactggttcttgtcgctggaagatgcgcaggaaaagatcgagtgctggtggcaggaatataaccggcaaagaccccattcctcgttaaataaccagactctggaggaattcatccgaagtctgcaaaaaggtccggatctctga

SEQ ID NO: 277916 - DNA, 2211 bp, Morganella morganii
atgagcagtgtccacaatagtctcgatccccgtgtccgtaagtgggtttataagcagggctggtcatcattaaggcccttgcaggagagttctattccggcaattttagcccgtgatcgtgatgtactaattagtgcaggtacagctgcgggtaaaacagaggctttctttcttcctgcctgttcggcgattgcagatctcaccggtggatttggcattatctatatcagcccgttgaaggcattgattaacgatcagcaccgtcgtcttgagagtcttggtgaagccctggaaatgcaagtgacgccctggcacggggatgtaccacaaagcaaaaagaagaaagcacggacaaacccgtctggcatcttacttatcacacctgaatcacttgagtctttgctcataaactcattgggttggctcaaacaggcgttttcttcagtggcatacattgttattgatgagttccatgcttttattggctcagagcgtggtatacagctgctttctctgcttaatagaattgaccatgtgctaggccgccagttaaatccagttccccgtgtcgcgttgagtgccacgctgggagagctggaaaaagtgccagaactattgcgtccggataagagattaccttgtgaaacggtaacagacagtaatagcacagccacactacaggttcaggttaaaggttatcttgagcggatgcccgaaaaaggagaagagctccagagctctgccgaacagctcgtctgtgcggatattttcaggctctgccgtggcgattcccacctggtctttgctaacagtcgaaagcgtactgaaagcatagcggcaacactgagcgacatgtgtgaggcaaatgtcgttcctaatgaattctttcctcatcatggttccctggccagggagttacgtgagacacttgaagcccgactgcagaaagggaatttgcccacaaccgctgtttgtacaatgacgttagagctgggtattgatattggtaaggtgcagtcggtcatacaagttacacctccgcattctgtttccagtctgcgtcagcgtatgggacgttcagggcggcgcgattccccatcggtgctgagaatgttaattactgaacctgaacttaccgcaaccagcagcattgtggatcatttacgtctgcagttggtccaggcgatggcaatgatcaggctgatgatctctaaacgctggttcgagcctgcagatgtccggcagaaacattactccacgctgctacaccagatccttgctattactgcgcaatggggcggagttcgtgccgatcagctctggtcacaactttgccagacaggtccgttccggaatgtcgatataaatgacttcaaaagtctgcttacacatatggggatatgtggcctgctcactcaacttgccagcggtgaaatagtcgtcggggctgagggggagaagctgactaatcactatacgttttatgccgtattcaatacacctgaggagtttcgaattgttacgggaaaccgaactcttggcacagtgcctgtagactccccacttttgcctgagcagcacatcatcttcggcggacggcgctggaaagtgtcagagatcgaggtcgaaaaaaaggttatctatgttgaagcgactaaaggcggacagccgccactattcagtggtagcgggatgtctgttcatgatgttgttcgccaggagatgctcgctatctataaggaaaatgattaccgtatcgcggtaggcagcaagagagtcgattatgctgatgccactgccagaaggctctttgcggaaggcagtaacaacttccaacgttacaatctgcaaaatgactattttattgccaatggtcagaactgctacgtgattccgtggatgggggataaaattgtcaatacaattacgtccctgctcatacgttgtggttttaaggccagttcatttgccggagtgatagagatagaagattcaagagtcgcttctgtccggcacgcacttaagggaatgctattgtcaggcttaccttcagaattcgagcttgctgcagttgttccggaaaagtatttggataaatatgacgagtatttgccggagtctttgcttgcgaaagggtatggggcaaaggcgtatgacatagaaggtacgcgcatctggcttgatctcctccccaattcagcgccaggctaa

SEQ ID NO: 277917 - DNA, 1317 bp, Morganella morganii
atgtctgtaacacgtataagagtgaaagagcgcgacgctattattcagtcacttaagtcgggagtaacgccaaggataggtattcagcatatccaggttggccgcgtgaatgagataactgccctccatcaggatattgaacggattgttgatggcggggcaagcttcagacttatcattggtgagtacggttccgggaaaacgttctttttaagtgttgtacggtctattgcgttagagaagaagctggttacggtcagtgcagacctttctcccgacagacgtattcactcatcgggaggtcaggctcgtaatctttactcagagcttatgaaaaatatgtccaccagaaacaaaccagatggcaatgcgttacttagcgttgtggaaaggttcattactgaggcaaggaaggaagctgatgcgaacggctctcaggtctcatccgttattcataaacgccttgctgctttgtcagatatggtgggcggatatgactttgcgaaggtcattgacgcattctggcgcgggcacgagcaggataacgaaaccttaaaatccaatgccattcgctggctgcggggcgagtacaccaccaaaactgatgcccgtaatgatctcgacgtccgaacgattatctcagacgcctcattctatgattctttgaagttgatgagcctttttgtccgtcaggcaggctatgccggacttttagttagcctcgacgagatggtgaacctctttaagttgaataatacgcaagcgagaacagccaactacgaacagatcttgcggatcctgaatgactgcctgcaaggctccgccgaaaatattggttttatcctcggggggacgccagagtttcttttcgatccacgtaaggggctctacagctatgaggcgctccagtcgcgtctggcagaaaaccgattcgcacagaaagcaggcgtgattgactactcgtctcccacgctgcatcttgccagcctcactcctgaggaactgtatattttactgaaaaatcttcgtcatgtttatgctggtggagatcccgctaattatctggtaccagatgatgccctgaccgggtttctgcatcactgcagcaaaaccatcggagatgcttactttagaactccccgcaataccataaaaggttttctggatatgctggctgtgctggagcaaaacagaacgatgaactggcaagcgctcatcgagggtgtggcgattgaagaagacaatcccagcgatatggatgacgccattgttgaggaaagcgatgacgatgatggcctagcgaatttcagactatga

SEQ ID NO: 277918 - DNA, 2307 bp, Morganella morganii
atggaactatggatatttatagcagctatttatttaatttatattatttttttcaaaaaaaagcgtaaatcagcaggctctaatacttccaatccggtgaaagcaccaccaaaagaatggattgctgataacaaaaagaataaagctgtaatgcacaatgatgataacgaagatgacaatctggctacgtttacactaagtggcgaacggaatatcgaatacagcataacggtcactccacgccagaatatctcaaaaattaccggtgctttggctcgctggattttaccgggggaggtgatcacagtcggtggggtagaggttaccgatggccacttctatcttgggcagcgaatgaaacctgccgggcataactcaggcggttattattatgatagtagcgaggcatcgctaattgacgacacgcttaagatataccccacaccttacatttacgaagatagttcattagggtactggcccagtttttcctcactttcacctgaagcacgtggcgcgtacctgagttggcttgccagcgacagatgtgacacttcttgcccaattggttacgtttttatttatctgtatggtctggaaagacgggcacttgttgacagcagggacaacaatatatctgacgatgagttctattctcttttcaaagagatctgccgtctcagatcggttttcaatgaaaaccgatctttccggtactactcgtcccagttacttgaagcgatgtccattcttcgtccgaacgaaaatcttgcagcagctctcagcaatgattcggagttcagcaatagcatgcagttcaggctaattctggcaaagactgttgaggtaggagccccggtgccagttgatctggctctgacgtgggtgacaaaccatactgaatactcattacgaacccctgcccgccgctgcgcgaaagaatttgcttctctttttaaacggcgttacacccttaaatacggtgaaggaatggtagtgaagccgaataaagcgcgtctgcgtttagattacacgcctgcaagtcctagtttgcgaggtattcggcttcctgttcccgacttgcctgatccaagtgcattgaaaggccctgttcagaagcttatgacccttgccgatatatgcacagatgaactggatgcatacagtcgttaccttggtagaaaaggtacttcagcaaatgataccgctgcaattttgttgctgccttcagaaatcgttaacgaaagcgctgaaaaaatattaagtgcattcaaactatgggctgatgacgcgatcctcagtaagggtggggtagtttcagttgctgactactggtcacatatgaatgctacctgtccggcgaagatcaataaaaaagaggccgacttgatgcaggcctttgctcagaaaatggggtactgtctggctcctgacccctattaccaccacgtaaaagcagatgtcgatggtgttcttgttttattccctgctggtgaaggtggacgcttctctccttctcctgaatttatcacagctgtattgacgctccgattaggtgcggtagtcgccttgattgacaattctctcgatcaagccgaacagaaagtgcttgagaatgccatcaacaacaatgccagcttcagcgatgatgaaaagcgctctctgcacgcatatttaacgtggcagcttcataccccggcgaatatgacgggaatgaaaagccggattgaattacttggtgctgcggaaaaatcagctgtgggtaaggttatcgttagtgttgcttgctctgatggcagaattacgcctgccgaaatcaaacagcttgagaagatttatacaagcctggggcttgatccctcatccgtatcaagcaatatccatcagcattccgcaactgaaactgctctcgtttcatctgtaccagctaatcagtcgacggcagggtttacactggatgccaacgtacttgcccgccacgaatctgccactgatgatgttcgtaaattactgaactcgattttcactgaagaagaaccagaacaaccagaaagcgctccagcctcattaaccggagaagggggacttgactccgctcatagcaaattttatcgcaggttgctggagaaagatcaatggtccagaaaagaggcgacagagttgtgcagtaactggaacctgatgctcggcggtgcgcttgaagtgatcaacgattggtcctatgcggtgattgatgcaccagtgctggaagatgctgatgatcacatttgggttgacctggaaatagccaaagaattagagggttag

SEQ ID NO: 277919 - DNA, 222 bp, Morganella morganii
atgaataccatcaataccaccacagccccttccccgcttgacgaaccacttgttgatatgaaattcatcaccaaatttaccggattaacggacaagtggttttacaaactgattcaggaaggccggtttccgaaaccgattaaactgggacgtagttcccggtggttcagaagcgaggttaatgcctggctgcaggagcgtattgcgaaatcccggagataa

SEQ ID NO: 277920 - DNA, 579 bp, Morganella morganii
atgaaaacatataatcttcattaccagaaaagaacagagagtgtaattaaaaacgctctcattgaattaacccgtattatggcactgcgtgttgatctgcgtttaccacctgattatccggacagcccggatgactctaaagtaataacccgattctttgattctctgaaagctaaactacgttatgacacagcccgtaaagcgtcccgctgggggcgtaatctcaataatccgctttattatgtctgggtacgtgaatacggtgaaattaataaccgaaggcattaccacctggtcttattcgttaataaagacatttatcattcaccgggagtttataacgggggaaataatctggcctcttttattcagcaggcctggtgcagtgccaccggtttagcctggccggtgcattcccgtctggttcatttccctgagcacggtgtcgtttatctcgacagaaacagccctgagttacccgcacagctctcagccctaaaacaacggacggattacttagccaaagatcacaccaagccttaccacgatggtttccggtcattcggaaccagccggtaa

SEQ ID NO: 277921 - DNA, 999 bp, Morganella morganii
atgatttataaagaaatgcgggaagatttcaggtttcttttcccctataaaaaagatattgtttataactgggggttgaatccggcgcgggaattctcagaggtaattcaaggggtacgtcatgattactgtctgaattgttatgatgaagatctgaagacagatatcgatttaatcagagttatagataatggcgggtatccaaaaatcattgacggagtaatgagtattggttgcggggaaaaaaccatcaggcaactggatgggattttcagagtaaaggagcgaatgtataactccattatgaaataccataaaaatattttaaaattaaataaaaaagctgtttttttgtgtttttcattatctgttaacagagggcgtcagttcattggaaatgaaacaccggaaaatatcaatgcttataataaaatattaaagaagttcaggtctgaattttttaataacatcaggtcgcgtgcattctttaaaagaaatgttattggtcatttctgggtgtcgttgcaggagaccggcggggggtatatgtatatccatatcaacttctaccttaaggacaggaaatacaattatcttcttggccgggaaataaacagcgtctggtttggaatccttggaaaaaataaagtaaccggacaggccatacattttacgataacggaaagctatgaaaacagcagggcaaacaacaatgcaggaagaaagaagaaaattatctataaagtgagtgagcgcttcgattccggagacaaaaccagaaaggtcatggatatttatcctgatttaaacggaggaaaccagggtgctgaatatagttttactaatgacccatcccatataccgtttagttcttatgttaaatcgctggtaaaaaaagcattccatatctcaggaatgcgcagtttcggtacggcttctcttcagacggaacagaaggcatctgcagaaagtggtaccgcacagatacagaaaaaataa

SEQ ID NO: 277922 - DNA, 729 bp, Morganella morganii
atggcaacctaccgtatcgaccccgacctcgcgtttatcggtcagtgcagcaatgaggacctcggtctgctggtctccgttctgactcacgacagtaaagacggcaaaaaacggctggcggagtctctgaccacctcaccggaatatcagctcttttaccctgaccatcagaagtactggcctgccatctgtgccgaactgcaggccttcggggccaacagtctggtcacgctgctgcgcggtaacagaggcgtgctctaccgtgaaatcctgcacgatgtctgcgacaagctgaaagtgaattacaacaaagaaagtccggtggaaaccaccgaactgaacctgctgatgaaagttctggagaaaagcctgcgggagatgtcacaggaagaactggtccgttttgcggacgggctgaagctgaatctgtccgcaccgactccccagcttatcctgctcgcggtgcaggccgccgtcaccagctccggtgtcgcagccctgcagtttgccacgattgccgctgtcggggtgattgaggcgatgggcggtattgccacctgggggacgctctttgccgccaaccgggcgctgggggtactggccggtcctgtcgggattgcgctaagctccgcctggctgatagccgatatcgccggtcccgcttaccgggtcaccgttccggcctgcatcattgtggcatacctgcgccagaagaccctggcggcctga

SEQ ID NO: 277923 - DNA, 672 bp, Morganella morganii
atgcatacgtcagattcacgccatgaccggcttgcattccggctggccatgattatcagccgcctgttccgtggcgaaacactgtatccggcacagctcgcccgtgagtttaatgtctctgcacgcacgctgcagcgagatttcagtgagcgtctggtctttctggatacggagccttatcagggcggataccggctgaccgccggtcagcgcccttaccggacagacagcgatatcctgtactttgccgatatcacccatatcaccccgctgttcccctcgcttgaccgcaggctgctgtccgtgctgctcagtccggaaaacggcgctccctgtctggtctaccatgaaccaccgcaatccgccccgacgctgttcggcggcttttatgtggtgacgcaggcgattgtccggagacggctgctcagcttccgctgtgacggtcaggagcatgagggcatggctccctacaagctgatttattttcagcgggactggtatctgtgcggggaatggcagtcagccctgcgggtgttccggttcagtcagctgcagaacattgccgtgtccggacgccgcttccggcaggatgcggttatcgcacggacagtcacccgtcccgaatttatcaccgcattaccccattatcagtttatccgttcattaccttaa

SEQ ID NO: 277924 - DNA, 450 bp, Morganella morganii
atgaaaagaagtctgacactgcttggttgtttactgctgtccgccccggtttttgcactacgcatgcccggtgaggtgcagcctgaccgttacacttattacctgaccccggaatacgggcagcagctgaaaatgcagaacgacggcaaagaccggaaacctgcgtggcagccactccctgccggagagctgaggagtgagacaagagcggatttgtccaaaggctatccggctccggtggccatgacctgtatcagcagtatttattataataccggggctcaggctaactggctgaaggtgggctgtatcgataataacggtatggagtacgaaaccagtaagaaatggccgccgaaatccgtcgcggagcgggtctgcaaagccggagagggagactgtgagtccttcctgcagatggatactgacagctggtccggtccgcagtaa

SEQ ID NO: 277925 - DNA, 333 bp, Morganella morganii
atgaacaatacagcagtacccgcgtcaccggcggcagtctggcagacactgctgacttatctgctgcaacagcactacggcctcactctgaatgacacggaattcagtgatgagcgcgtgattgaggcctgcctctgtcgtgggatgtcgttatatgaggcactgaacgcttttgcggagaaatacgcactggtccgcactgaccggcgcaacaacagtatcactgagccgtcacacggcatcactgcggccgatattctgcgggcacggaaggcaaccggcctgataactcaccacagcagctatgccacctgcagccccgttatcgtataa

SEQ ID NO: 277926 - DNA, 837 bp, Morganella morganii
atgacccgtttagcctcccgcttcggcagggcgaatattattcgtcgtgaccgcccgttaaccaccgaagaattatactgcactgtacccagtgtcttttcagcggaaaaacatgaatcccgcagtgaccgttacacctatattcccaccattaccctgcttgagagcctgcagaaagaaggcttttacccgttctttgcctgtcagacccgggtccgtgacgacagccgccgggagcacaccaagcatatgctgcgccttcgccgtcataaccagatcaccggtgtccaggtaccggaaattattttgttaaacagccatgacggcaccagcagttatcagatgctgccgggattattccgtgcagtctgtcagaacggtctggtttgcggtgatacttttggtgaagtacgtgtacctcataaaggtaatgtcgtcgataaagtgattgaaggggcatatgaagtgctggaaacgtttgatgcggtggctgaaaaacgggaacagatgcagtctctgttgttaccaccacgggcacagcaggcgctggcgtatgccgctatcacgtaccggttcgggggtgaccaccagccgatcacggaagagcaggtgctgcaaccgcgccgatgggaagataagaaggatgacctgtggacggtgtaccagcgtttgcaggagaacctgattaaaggcggactgtccggacgtacagccaaagggaaacgatcacatacccgggccgtgaccggtatcgatggtgatatccgtctgaataaagcgctgtgggtgatgacagagaaaatgtatgagtattgctctgaccgtcaatcaatatga

SEQ ID NO: 277927 - DNA, 873 bp, Morganella morganii
atgatatctcccgaaacactgcaatccgccatcgccagcatttcagtgtggcgccaggatgacgtatgcgcaccccataagccattgctgttgctgtatgtgctttcgcagtataaggcgggacatccgcgtctgttcaattatggccgggaaatccacgaaccactgacccgcctgctgagagagtttggacccaaacgacgcactgattaccctaatatgcctttctggcggctcaggagtgatggtttctgggaaatcaccgatgcggaaggttgtaagcaccgccggggtaacacgcagccgacaaaaaaagagttgattgataatcacgtatcaggcggctttgatgaagccgcttaccggcaattacgtgaacacccggaattaattgataagctggctcagcaaattctgacaaaccgttttccggaaagtattcagcggatccttgccaaccaacttggcctggattttgtggaccggacaaagaaccgcgacccgcatttcagagacatcatactacgcgcctatcactcccgctgcgctttctgcggctatgacctccgcctggatggcgcactggtgggtattgaagccgcgcatattcactggaaagcctacggcggcccgtgtgtggtacacaatggtctggcgttgtgttctcttcaccacgatgcgtttgatatgggcgcattcggattagatgaagatctgactatccgcatctccgccggtgtcagccgcagccctgtcgtcgacaacctgttctggcagcgaaacggccagttgttacatctgccgcatgatgaatccttatggccggcagaacaatacatcggctggcatcgtaagcaggtgtttaaggtgtga

SEQ ID NO: 277928 - DNA, 864 bp, Morganella morganii
atgttagtttcgatggagaatatgctcaatcgtgcctttgcacgccagtacgccgtcggccagtttaatattaataacctggagtggaccggaacggtattaaaagttgcacagcaactgcgttccccggttattttaggtgtctccggcggaaccataaaacatatgctcgggctgaaatgtattcacgatattgtggtgaatgcgatggagtttctggaaatagatgtgccggtggcactgcatctggatcacggccagtcttatgaagcctgtgaagcggcaattaaagccggtttcagttctgtgatgttcgacggttcacatatgccgtttgccgaaaacctggcaatcaccaaacgtctggtgacttacgcgcaccgccgtggtgtgtctgtggaagccgagctgggcaccatcgcgggcagcgaggacggtattgtgaattctcacgtcatttatgcggacccggcggagtgtcagaagctggtggaagaaaccggggtggattgcctggcggcggcgctcggctcgactcacgggctgtataaaggcaaggcgaagctcggttttgcggaaatgcagcatatcgcgcagctggtgaaagtaccgctggtactgcacggcggaaccggtatttcagacgaggacatgaagaaagccatttcactcggtacggcgaagatcaacgttaatacggaaaatatgtatgcgtggtgcctgtccgtgaaagagcagtttgaacagcagggcgcgcatgatatcaacgatccgcgcaaagtgattatgaaaggattgcagccggtcgcggagcgggtggaagaacggatgcgtctgttcggctcagccgggcagtctctgtaa

SEQ ID NO: 277929 - DNA, 1488 bp, Morganella morganii
atgcgaaaatccggcgcggcagcgtttcccgaattactgacaggtaacgggatcatcaaagatcaggtgtatcacgctctgcgtgaggcgatcctcagcggccgcctgcatgcgggcagcaaagtaccgtccggacgggcgctggcggagatgatgggtatctcccgtaactcggtgattgccgggtttgagcggttgcaggatgagggctatctcatcacccggcgcggcgcgggtacctttgtggcggataatctgccggatcacgccatcagcggaccggtggcatccccggcggatgaaaccggggaactggtaaccgccaatatcagcccgctggcagaaacattgctgtcgcagcgtgttgcatccggtgcgccgtccgatgcactgtttatggtcggtaccggatgtgtggatctgtttccgcatgatgtctgggggcggctgctcggccgtgtctggcgtcagtcccgctatgcgctgcatacgcacagtgagccgcacggctacccgccgctgcgccgggcaatctgtcattatgtccgtgccacccgcggattgcagtgcgatgaggaccagatcctgattgtcaacggcacccagcaggcgattaacctgacagtgcagacgctgttacagcccggggatgaagtctggctggatgaccccggctatgatggtgcgcgcggggcgtttttatcacagcggctgacagtacgtccggtacgcgcggatgaagagggcatggatgtgtatgacggcctgcgccgctggccggacgcgaaactggtgttcaccgcaccgtcacatcagtttcccggcggcggcacactcagcctggcccggcgttcggcgctgctctcctgggcggcaaagcaccatgtctggatcctggaggatgattataacggtgagttccgttatgccgatcgtccgcttcaggcattgcaggggctggacaggcatcagcgggtgatttatgcgggaacgttttccaaaatgctctatccggccttccggctgggatttctcgtcgtaccgaaagcgctgatcccggcctttgaggtgacaaaatattatgccgataccggctgcggctatctggagcaggccacgctgacccggtttattaatgaaggtcactatgcacggcatgtccgccgggtgcgcaaagcctgttatgagcggcggcaggcggtgacggatgccattaatcaataccttcctgaactgctggatattgtgccgagtgactcggggatccacctgttatgcaggatgaaaaacggtgttccggcacagacggtgattcaggcaggacggcagtgcggcatgggcatgcagccgctggcccgttactgccgtccggatgcaccgcaggaaggggtattattcgggtttgccgcctatccggcggagaaactcaccgatggcatccgccgtctggcggaggcgttacaggctcagggtgtggtgacggtttag

SEQ ID NO: 277930 - DNA, 1686 bp, Morganella morganii
atgagtaactcaatcgtcgagattgaggataccaaatgtatttttatcttcggttacaatgccgcagattcacatcctatcgtcgcccgtcgtattgttaaggcgaaagagaagggtgcacaaattattgtctgtgacccgcgctatattgaatcagcgcgtcttgctgacattcatttggcactgaaaaacggttcaaacattgcgcttatcaatgcgttagcgcatgtgattattgcggaaaacctgcacgataaagccttcattgacggccataccgagcagtttgaggaataccgcaagctggttgagccgtacacaccggagtccgtggaagcgatcaccggtctgaaagctgaggatatccgcaaaacagcccgtatgtatgcgaaagctgaaaatgcggtcattctgtggggtatgggtgtgacgcagttctatcagggtgtggaaactgtccgcgcactgaccagtctggcgttactgaccggcaacctgggtaaaccgcatgtcggtgtcggcccggtccgtggtcagaacaacgttcagggtgcctgtgatatgggcgcactgccgaacacactgccgggctatcagtatgtggaagacaaagccgcactggagaaatttgccaaattctggggcatcgaaaaaatgcctgccgaaaacggtattccgctgagtgaggttccgcactttatcgacgaaggcgtactgaaggcgcactacgtgatgggtgaggatccgcttcagactgaaccggatctggccactatccgccgcaccttcgataaactggagctgctgattgtccaggatatctttatgaccaaaaccgcgtcgattgctgacgtgattttccctgccacttcctggggggaacatgaaggtgtgtatactgcagcggatcgcgggttccagcgcttctataaagcggttgagccggtcggcgatgtgaaaccggactgggaaattatcagtctgatgtccactgccatgggttatccgatgcattacaacaacaccaaagagatctgggatgagttacgtgaactctgccctatctactatggtgcgacctacgagaaaatggcggacctggcttatatccagtggccgtgccgcgatgtggcggacagcgatcagggtacagaatacctgtacgacggcggtatctttgataccccgaacggcaaaggtcagttctatacctgtgaatggcgtgcgccgatcgaccaggtcagtgatgactacccgatggtgctggccaccgtccgtgaagtggggcactactcctgccgctccatgaccggtaactgtaaagcactggcggcactggcggatgagccgggctatatccagatcaataccgcagatgctgctgcactggggattaaagatcaggaactggtctgggtggcatcccgtcagggtaaagttatcacccgcgcgaatgtcagtgagcgtcctaacaaaggggcggtttacatgacctatcagtggtggattggtgcgtgtaacgagctggtggcggaaaacctcagcccgattacaaaaacaccggagtataaatactgtgctgtccgcgtcgaaccgattgcggatcagaaacaggctgagcattatgttgttcaggaatataccggtattaagcgccgtctgcgtgaagcagcggaagggtgttaa

SEQ ID NO: 277931 - DNA, 3252 bp, Morganella morganii
atgaaaaaagcggtcgggatctataaatctctgctgagagatccctattttcaggataaggcttaccggcgtttaacggatctgtatttttcctttgataccggcggtgaaattgataaaaaagagattatcgcgttcctgaaaaaagatatcgaagaaaatgataactaccgccaggcgtatttttatgccgattatctgttgcaggaagatccggtaaaaaaccgtaaacaggctatggaactgtatctgaaagccggcgaatacacccccagtgctgatgttcacctggcaaaatcgcttatttctctcaataccggcaataatgaacgggctttaaagctggcactggaaataatgaaaagcggatatgcccgttctctgctgacggaaaaagaatggcatgatgtcacgcagattgtattctccgaaggcaaaaacaacctccttgccagacaattctgggtcctgcttgccctgcgggataataacgctgaagcgcagaaactgattgaaccgctgctgggtcaggatccggttgtcacgtattactatgcgaagctgaaactggaagatgcggaagataaaccggatatgaccgatgagatcctgcgtccggatattgaactgatgatgaaagcggcagcgctgggcaacccggatgccggtgaatacatggtgaatcgtctgaagagcgcgacccgctccggtacacaaagtaacctgaatcaggcgtttctgcgggtaaccggactgacggaacgcgatattgtgccccggctgacacaatgtgccgatgccggaggatgggcctgtatgtatgaattgggcgagatctattatgagggtaaatacggtgtaaaagctgacctgaatacctccgtcgcctggtacgaaaaaattcctgatcgcgattaccgtttcacagaatcacgcctgagcaaagtcaaaaagagccgtgacaccctggcagacctgaatgcccacgtacagaaaggagatgctgaagccgcctatgaattatcttatgcctggagaaacggcaaccacggcctgactcaggatccgaaaaaatcacggtattacctgaaaatggcagcggaaggcggtaatgaagatgccatcaccacactgattgatgactacaaaagcgcagacacactcagcccggaggataaaaaactgctgctgtcgctgtacgacaaactcccgggaaccggcaataacagctatctgcgtgatctgggtacacagtacctgcagggcagcaatcttgtcagcgcagatcgtcagaaagcccgttattatttcagcaaagccggtgattacggtgctcacgagctgaaagcaatggatcagtttgaaataaatgtaaaactggcggatgaaagcccgaatgctgcttatgaaaccggttatgcttattttctcgggcgcggcacacaaaaagatctgcagcaagccctgccatacctgcaaaaggcagcagatgccggtcataactatgccacaatcctgctggcagatacctatgaaaagggagagtacgataaagagacacagcgccggattatcacaccggactgggaaaaagccattgtcctgatacgtgcctacaaagggccgcgtgatgtatcagaaaatattgcattctatgagagtacgataaaaccggcactggccggagacagcagcgccatgaacgccgccggggaacactataagagcagcggctattatgataccgcccgctactggtttgaaaaaagcgcggaaagcggttatctgcctgcattctgcgctctggccggggcgactgaaaccaatgacggtaaaatggcggtattacgccgcggtgcggagaaaggtgacagttgctccgataccatgctggccatcatgcaactcagagagaacagcattacacaggattcaccggagtggaccggtattatcacccgggtggaaaacggtctgaaaaacagtgatgaagaggtgtcaaaagccgcgtttgaagcactgactcagctgtatcgcggcactctcagcgatgacaacggcagctctctgtataaggcagacaacaaaaaatatctcacactgctggaatcggaggcagataaacgggccgatgcacaaatcgacctgttctattattaccggcagaataatgacatggataaagcactgtcttacctgcaaaaaggccatgatagcggcgatatcgctgcgacagaaacactctacgaatactatatgtcgccggaatattgccgccgtgacgatgccgatcccgctaaagcggagcagtatctgacggaatggctgaaaaaatcggactatccggaaaatactgataaccatatgctgatgccgccggaagaccggaccaaagccatgggtgatgcatggcttgaaggcttctgtcaccgggcaccggatcctgacaaagctatcgcgtggtatacccgctcactgacgtataacaacacacatgccctgaaaggtatgtatgacgcgcagatagtgaagaagaatgctccggaaacctattactacggttcactcgccggtgtcagctcccgggagggggacgaccttatcgccacactgacggatgcagaacgcgacaccgtgctgcagcgtattaagaaaaagcaggtgtatgagcaatacggtcgttatgaacaggaaattgaagcgaagcggcaaaaagcagaaagcggtgacggcccggccgcattctcgctgggggtaaactatgcccgtggcgaacgcgttccggaagatacggaaaaaatgatctattactatgagctggccggtaaaaacgggtacgccagagcctacaacgtgctgggtaatctctaccgtaaaccgaatgagcgcgggatcccggtcgacggtaaaaaagccctcgcgtattttgatgcgggagcaaaactgggtgacagcaataccgcacacctcgccggggatatgctctatttcggtcaggccgggctggaaaaagattatccgcaggctgcccgctattatgaaatgacctctcttgaacagggcagtcatcatgaaatggcgaaatacaaagtcgcgtggatgtactatcacaaaatggccggtaccggcagcgatgatgatctgcgaaaagcacgggataacctgatattgtcggcaaaatacggcaataaagatgccgaagaagctttaaaagagtgggatttctcacgtatcagcgataaaaataaataa

SEQ ID NO: 277932 - DNA, 915 bp, Morganella morganii
atgcaacgaattaaatatgtttattaccttaatagctgggattttggagacgatatcaatgttctaattagctccgctgaaatagttacaccagaagaatatcgaccggagatggagagtaatatttattgccctaaatgctatacaccattggtcaaagtacctaagaataggccgcaaacaactgatggaaaacaagcttatttttcgcataaaaaatcatatctacacattgaatgtaaattacgttctctaaagggacaagaaaagtactttgattcagaagaacttgccagacaagctatagaaaatggcaatttagtaattatacaaaactttctagaaagaaagcctcaaattcatacagttactaatgaggaatttggacaaatctatgtggaagatactgatggaaacgacgttgctgttcagataggacgacacaatggtgagattttttcattaccaagtaatataactacagttgcaggattatgtcgaaactttgataaaaattattataaatattatttgttgcccaatgaaagaaatccagagcgattagatagactattgacagatattaaaacagtttccgatataaatgatataccaaaactttactatgcaaaaataatcagtagctcttcttattcagcagatacttcaatcagaatgacccgattggattggggaagaaacgggagttattcggatttttattttaagcagcgtaatggtgattgtagagatcgaggactaacggatagaactcctaggggacaatatattttaatgtatggcaaagttactacaaatggaactggtttatgtatagaggctcttaattggggagaattcgcattattaccagaaaagtataataaaattcttgatattaaaaatctagattaa

SEQ ID NO: 277933 - DNA, 384 bp, Morganella morganii
gtgcagcagatagcggacggcgattacagcattgcggcaaaaggtagcctggtcggcagtgtcggtaaaaacatggaactggccataacggaaaatgccactctcgagatcgggcaaaagttggttgagaagattggccagatacgccagagccttgccgggcagaaacaggaaatcattgcgctggttgtctggataggcagtcagcaaatcaacgtggcgcagcttatgttagacacactcgacgtggtaaaagaactggccgaactcacggccgcacacactcacgccaataccggcaccccgaacaatgccgctgccattaatggcaccgccaccaaatcggacggactcaaacaaaaatacagccccgtaataggctga

SEQ ID NO: 277934 - DNA, 225 bp, Morganella morganii
atgaaagacgtaataatcgtttatacagatagcagatgtgaaatccagagcgttaaaaatgaatcgacaactgtaaccatcacagacatcgacgttgctccaaaaaacattactgaaagaaatatagaaatattcccctacaagggaattaattttaatatcgttcgtgcagctgacgtaattagtgatgaccgaattatttgcgcaattgaaggcattcaataa

SEQ ID NO: 277935 - DNA, 510 bp, Morganella morganii
atggcattagtaaaatgtaaagagtgcggcaaggaagtagccagttcggcaaaaacatgtccgcattgtggcatcaaagaaccgggtgtgacggcaaagcaaaaagcaggcggatgcctggtaattttagttctggcggcggcgatcggttattggatgtcaggtgatagttcagatgataaatcatcatcaaccactgcggctaagtgtgaggcaactgatggtgagtgtgttgctcaaaagctgatgtcagaccctgacgttatccgtggttgcaagtccccgcttgagaaatcagtgaagtttgaatatgagtggacagatggaattatgactccgacattctcccgttacctgctcacaaataataataaaaccataacgcttatcggcgaccaattgaaagtgacaaatgcgtttaacgccaaacttccgatgacttatcactgcattattgatgttgagtcacacaaagttcttaacgtcaaagctgaacaaggtcgtttataa

SEQ ID NO: 277936 - DNA, 291 bp, Morganella morganii
atgcctgacgccggccagtactttattgcagtattactgagtcttgtaaatatcatctgtttcaggagggtaatattaaagcaaaaaataataaatagagccattatatccatacttatatcaacattatttgtcaccgtatttcctcttttaaaattgagtatattaaaagaaatgcatttcaatttttcattttttacagatattaattatgctatcgcgattacagcaggaagtgttattaatctgatctcactatgggtatcagactctgtaaaaaggattaaataa

SEQ ID NO: 277937 - DNA, 2862 bp, Morganella morganii
atgagcaaaacagaaaacacgttacataaaaaaacaccgtcggtgacggtactgagcaaccgggggcaggtcgtacgcgatattgtgtatcaccgccatccggataccccggagaaaaccgatgagcgcattacctaccatcagtttgataaacgaggatttttagagaagagtgctgatccgcgtatgcaggcatccgggctgagcaatttccgctatgtcacctcactctccggacaggtgctgtgtacggaaagcgcggatgcaggaatatcgctgacactgaatgatgcggcagggcgactgatgatcagcatcagtcagatctgcacggataaggggcaggataactgcagcaaggccgtgactcagactttccggtatgaaggtgcggattcagccgggcgtctgctgagtatcactgaacagaccgccgggcagaacgctcaggtaactgaacgttttatgtatgcaggcaacagtgaggcggagaaagcaaaaaacctcgcgggtatctgtacacaccattatgatccggccgggctgatgcagacggacagcattgcgctgaccggcgtgccgttatccataacccgtcagttgctgaaagatgcggataagccggttagctggccggaaagcaatccgcaaacattattatctgctgaaaaatacaccacacaaaccattgcagatgcgaccggtgcggtgctgaacaccacggatgcggcgggtcatcagcaaaaagtgacttatgatatcgccggattactgcgcaccagccgggtgacggtgaaaggcgggacggaaaaaatcattatcaaatctgtgacgtattccgctgccgggcagaagctgtgtgaggagcacggtaacggtgtagtgaccacttacacttatgaaccgcaaacccagcgcctgattgctgtcaaaaccgaacatccggcacggaaaaaaatatttcaggatctgcgttatgaatacgatccggtcggcaatgtgctgtgtgtgaccaatagcgccgaggagacgcgattctggcataatcagaaagtggtgccggaaaaccgatacacttacgacaccctgtatcagctggtcagcgccaccgggcgcgagatggccaatgccggacagcaacgcagttccctgccggatatttccccgtttgataaagccagttacgccaattacacccgcaactatatctatgatcgtgccgggaatatgacacaaatccgtcattcagcaccgaagaccggcaataaccacaccacggatatcaccgtcagccagcgcagcaaccgcgcggtactgaaaaccctggcggacacgtcggagaaagtggaagacctgtttaccccgggcggacaacagacacagttacaaccgggacaaactctgtcatggactgcgcgcggcgagctgcaacaggttacgccggtggtgcgtaacggtgccgccggtgaccgcgaaagctaccgttatgatgcgggcagccagcgtatcctgaaaaccaccttgcaggaaaccggtagcagaacacagacacagcaggtgatctatctgccggggctggagctgtaccgcggaaaagaaaactatcaggtgatctgcgccggtgtcgccgggcgggcacaggtgcggctgctgcactggccggacggcaaaaaagatcaccagcggttcagttatgacaatctgatcggcagcagcggcctggaaacggacggcgacggtaacctgctgagtcaggaggaatattatccgttcggcggcacagctgtgctggtggccggtacggacagtggcattgactacaaaacccaccgttattccggtaaagagcgggatgcgaccgggctgtattactacggctaccgctattatcagccgtgggcagggcgctggctgagttcagatccggcgggaaccgttgacgggctgaatctgttccggatggtgaggaataatccggtgtcattttctgatgaacaggggcttgttgcttatccgcgcacacaaattcccggaacatctctttatcaaccgggtatcagtacaggcagtgacagggaaattcggggagctaagttgatacctccggcagcgaatacggttactgaattatttaaaggagaacccgtcaggctgcatgatgtattagctgacagtacattacagcaaacacctctgcttactgacctgattaacccggcgaaggtaaaaatggacagttcgacgcgaagttctctttctgccgttaaaggcggaataatggaatttaatgctgttcatataccggccggaaataacggtatcaatgcattacggattattgataccgaaacatcggctttccagagagggaaaggaacaacattagcatattgggttccgcaaggaggatatgcggatattcctgcccatcctgaaaatggtcagcctcagttggtattcacgccggggttcagcgggtgctcgtttgttgctgataaactggatgatacgactatcagggtacgacatgttcagggaggtaaagaagatgccgagtataacagattacatgcgtctgagcatgggcatggaatgattggagcaatggaatatcgcgactacggatatcatgaaaactacagcggagcagttctggaaaatatccagggatcagcatttatgaaatatgaaggagactcatggcaaattaaataccagcgcctgaaaaatgcaccgggtattgtttctatgggtgaaaaaacatccggaatagtaagaaaacaacaggggcttaagctcgaaatccgccatagcagggaacgcagtgttgttggtactggttctgttcctttaatgcattga

SEQ ID NO: 277938 - DNA, 189 bp, Morganella morganii
atgaatactgaaccgacaagatacataaaaatgaaggaaatgatttctctgacgggaaaaagtaaaccgacactgtggcggatgtacgcgaaacgaaacgagtttccgaagccggaaagaacgaaaggcgggacttttttgggatggtctgaaactgtttatgaggattgggtcaggagtgaaaaataa

SEQ ID NO: 277939 - DNA, 570 bp, Morganella morganii
gtgaataaattcaaacatctgatgattgatcttgaagttatggctaaaaagccggatggcgctatagcagctattgcggctgtaccgttcgatatggtttccggtgtaaccgatgatgcgcttttttatgaggtggtcgatctgcgtagtagtgccggattgggcggaagtatcgacgctgataccgtgctgtggtggctgggtaaaagcgataatgcccgtggtgaaatcattaatagcgaaaaggccattgaactgcctgacgcactgctcggcctcagttcattcgtttctgagttctgtggagaacaggttcaggtatggggtaacggaagtagtttcgataacgttattttgcgatcagcttatgaaaactgcgggataactccgttctggaagcactggaatgaccgggatgtgcgcaccattgtcgaacttggccgcaatgccggcatcgacccgaaaaaagatttcccgtttgttggtgaagcacacaatgcactggatgatgcattgcaccaggtgaattacgtggtcgcaatccaccagcatttattaaaaaacctctaa

SEQ ID NO: 277940 - DNA, 723 bp, Morganella morganii
atgttatatatatcaaccagtaccggaaaacatattgatttcgtcaatatcactccggatcagatttgtatcgaagatatcgcgcgcggtctgtcgaatgaatgccgctttgccgggcaactggaaagtttctattccgtggctcagcactctgtatatgtcagccagattgtgccgccggaatacgcactggaagcgctgctgcacgatgccgctgaggcgtatatcaaagatatcccctcaccgctgaaagccatgctgccggactacaaggccgtggaaaaacgcattgaagcggttatccgtgaaaatttcggcctgccgccggtaatgacagttgatgttcactatgccgatctggtcatgctggcgaccgaaaaacgggactttgaaatagaccccggcggccactggccgatgctggattcagccccaccacatgatgacatcattatccggccactgacaccgccgcaggcatatcaccagtttatggcccggtttgaaatcctaacaagaggtgattcatttccagagatactagagcttggcctcagtgtgcgggctgcaaattgccttaaacaggcagggatagtaacaacagggctgttactgaaagaaacagaagtaaacctcttaagaataccaggaattgggagtcagatactcagagaaataattgaatcgataaaaccattcggacttaagttaaaaaaaggatag

SEQ ID NO: 277941 - DNA, 228 bp, Morganella morganii
atgcctgaacaaaaaaaacaaagcgttaaaatgattattactgtggcattaggtaccccacccactattaacgttgatgtacagaatgaacttcatattaatgaagaacaacctcttacaaaatatttcttagaaagagttagtgaatatatttccggcaaagaagcaataacgaatgcaataacaaaagccgcacaagatactctgacaaaaagaaatatacactaa

SEQ ID NO: 277942 - DNA, 828 bp, Morganella morganii
atgtctaatttagacggaaccgctatttctcagattcagaatatggccgttgcttcattaagtctggacgctgtaaataaatccctctgccctgctgtggttttaccgggtgatttcaatgttaaaagcctggagcacttacaggaaggtcgctatcgcttccgtggtgcgatggatacaaccagtatcactgactttgtgaagtattccctgcaacacggtgttgaggaaggtgtcagctgctttattgatgctgatgaaatggccgctaaaaccatctttaatatcggttccatcggtgagcctgggcatgcagataatacagccactgtatcactgaaaaagacatcgccttttgcatcactgctgaatgttaacggccgccgtcagggtcagaaagaactggcggaatggctggaagactggcgcgataacctgatggcatttgatgcagaaggtaatgttattgatattaagcaggcaatcaatgctgtgcgcaaaatcaccattgaagcaagccgctccgcagatcatgaggaccgtgattttggtgccagccgctccgtaatggaaagcgtggaagcaaaaagccgtgacatcatgcctgctgtatttcagtttacctgcacaccatacgatgaactgtctgaacgtgctatcaaactgcgttacagcgttctgaccggtggtgatgtacctgtgctggtactgcgtattgttcagctggaaaaactggaagaacaaatcgcccaggaattccgtgatctgctggctgataaattcgaagaaaccgaaattcaaacctatatcggtaaattcaaagcttaa

SEQ ID NO: 277943 - DNA, 303 bp, Morganella morganii
gtgtttgaaaacaaactttctgctgcactgaatgaagtcgcttttggtaccaataagaacggcggtactggtgaagtacacgtgatttttaaattcactcagtcagatgaagaccgcgtgaaaatatctcacaaactgaaaatggttacaccgactaagcgcggtaaaaaatcggaagaggatacaaccgaaacaccgatgtgggtcggtaaaggcgggaaactcactattctaccggaagaccaagggcagttatttggtattgacggcagtatcgacgggaaattaaaagccattaattaa

SEQ ID NO: 277944 - DNA, 2199 bp, Morganella morganii
atgcttattgagcgctttaaatcaggaaaagatggtggaattgatggtcgtttttatcattttggcgaagtaataatccaagttaaacactatgttaaaactggttatagtggattattaagtaaacttaaaagtgaagaagttgcaaaagttgaaaacttaaaacctaatcgatacattttcatcacaagcgttggtttatcccctgctaataaaaaagaaatttacgatttatttaatccttacattcgaaaaaataatgacatcattggtcctgaatatctcaatgaccttttaacactttaccccgaaatagaacggaatcattacaaactttggctttccagtacaaactttttaatcagtctgctaaataatgctacaattcaaaatagtaacttcctgattgaagatgctaggaaagaatcatataaattcatcaaaaccaagcaattaaaaaaagctttagagattttagataaaaacaaagttgtaatcatcactggtttacctggcgttggtaaaactacccttgcaaaacaagtgatgcttatgcattgcaatagtgactatgaagtttactatattgaaggatccatttcggaagtagattcattatattttaaagagaaaaagcaatttttctattttgatgattttctcggcgctactcttttagaaatttttactaaaaattctgattctaaaatcgttcagtttattaaaaaaatcattactgacaaaaataaaaaaatgattttgacgtcaagaaccaatatattaaatagagctaaaaatctcagtgagatatttaatatagaaaaaattgaaaaaaaagaatttgagataaatgtatcagatcttactgatatagaaaaggcagagatactttacaatcatgtttggcatagttcattaccgcaggagtatattgatactttttatgataatcgtaattattggaaaataatacatcatccaaattttaatccacgacttatatcgtttattacagatagcgatagaatatcaggaatagatagttcgaatttttggtcatatatcgaaaattcattagacaacccagaaatgatctggtcgcactgcttcaataatcaaacacgtgaggaagtccttgatctagtttgcttggttgtttttaatgctaataacattgaagaacgggattgtaaaaaggcattaaaatgcgttttcaatatcaaatataaaaataactttcactccaaagtaaataaaatagatgaatacataaaagagtctattaaatcaacacttaatagaattctgatgccgataaatgaagaaaatataatgataagactgacaccattcaacccatcagtgtctgactatatcatcaatcgctatgcttctgatgaaacatctctttcactttacttttcagcccttaagacaaatcaatcaattaatactttattttctttacacagcaataggaaaatcaattcagatgtatttgtttcagtgcttgagtcagtactcaatgctgttgatcttgaatacttaaataattactcaactcatcttcttcattcgatcatacattccaatttaatctccaccaacaaaaatagaatggtctatccgagcttatttttaaacattaaagaagaatatctcacttacgattacaaagttggggagtgcgtgttatgggctgtaaaaaatgccccaagtctattttcagatcaattcatctctgactttataaattatgccatgaggtctaattggagatatactctcaaccataacgattacctccccttagcacacttaatcaatcttcgacctgcaataaaaggagaggacgttactcatcaactaatggaacatatcaaagaatattggtatgaaaattatgacgaatatttatctggaacaggaaaaattcaatcattagattatgacgaacggtctaaagctgatgacattgcatatgacatgctacatgatttaattagtgaatacgattttccctttgaggacaatgaaattgaatatatgtatagtaaagtcgatgcgtctacacacctcgatgactcttatgtttatgatgaggatgaaaatgaggataaaagaaatcgcttctatagccacagagatgaaaaagaacatagcgaaagctatataaacgatttatttcaaaaacattag

SEQ ID NO: 277945 - DNA, 183 bp, Morganella morganii
atgattttacgcaaaattgcacaatttcccaaggtaactaaaagatataccgcgtcttatatggtgcagctttgccacctttcagaaatagtgctggatattctaacggaaggtcagaaaggtgcgtttaccaaagaggatggtgagaaagtcattgatgaaacggggaagcgggttatgtaa

SEQ ID NO: 277946 - DNA, 342 bp, Morganella morganii
atgggtgttgaatttcacataacgagagctgaattttgggcagaaaatgaagatgcgcaaataaccgctgatgaatggcttaactacattaataacgataatgaattaaacagatatattataaacggcgattaccacgccttgtggtcaggtcacccgttgtacgaagattcatggcttgactggagcgaaggtaatatttataccaaatggcctgatacatacctgtacagaaagatgttgcagattgcaaagcaccttaatgcccgggtgatggatgatgaaggtacgatttacagtgacgaatcacagtgggagtatgatccgtcaacttacgcttaa

SEQ ID NO: 277947 - DNA, 882 bp, Morganella morganii
atgtttatttcaaggcagctcaaacaatttattgctatcgctgaaaatatcagcctgacgaacgcggctgaacaacttaatctgacaccttcagcactcagccatggcattcgtgaacttgaatctaaaaccggtatttcattaattaaacgctccggccaaaaggtatcactgacaaccgcaggtacgcatctttacaatgatcttttaccttattatcttcagatgaaaaatatagaagataaattgtcagaaagaaaaggtaacagaatatccgttaatgtcaaaattaacggactttattgttcgttaatcagaggaaaaatacttaaattttgtaaagaaagacataatattgatctatctctgacgtcagaggaacaaattgatattgaaaaagaaatactgtcaaacaatacagatatagttatttcatcagctataattccggataataaaaacatcagatatataaaactccctcaggaagaggcaggattacttgttcataatgacctgttatctaaatatggttcaattcaggaattaattaaacatgaacgtctcattcagaaagaaaatgaagttgaaagtgaaatattcaatacatttttaaaaatcttctttaacaaaaatggtcattgcaatatcaccaggatatcagatgcatgtgatattccggagtttatttcttccgctgctggttatagccttatcgccgggaataataaatttattcctgatatgaaaagaaaaaactgcagttttatttcactttctttaccttatcgcatgactattaacagaagagtttacttcagagaacaatgtaatcagccaattactgacctggtattaaaaataagtgaggccaataattaa

SEQ ID NO: 277948 - DNA, 201 bp, Morganella morganii
atgcagcccgtatcgggcatactaaaagaaataagcaataacagtgataatacagatcaggtctcatatgatttaatgccactatcctgtacagagacttgtgataaatatcatagtgttatttcttcctctgagtctgaagcgcttttactgcatgtacaggaacaaaagaaaaaaaataagtttactgattgcgtttaa

SEQ ID NO: 277949 - DNA, 3606 bp, Morganella morganii
atgaataatacagagcaggtgagaatcgaaacgccatcattgccgaaaggaggtggtgcgattaccggaatgaccggcgagccgggaatcatcggaccggatggtgcttccgccttttccgttccgctgccggtcagccgcgggcggggttatttccccgaaccggtactgagctacaacagccgcaacggtaatgatgccttcgggcttggctggacggtcagtatggcagcgctcagccgcagagtggtaaaaggtgttccccgctacacgaatgaagatgaatttaccgatcctgataatgaagttattgttcctgttttggggagtgacggcaagccggtatcatccccgaaaaggaaactgcttgatacagacctgaaaacggaataccgggtaacacaatatcgcccccggctggaaacctcatctgacctgctgcaatactggcaggcggaaagagatgttccggggtgcccgtctgagttttgggtcatatttgcggcagacgggcaggtacacctgttcggatatgaggattcggcccgcatatatcaaccggataatccgcgacacattgcccgctggttaattaatgcgtcggtatcccctgagggggagcagatttattatcgttacagtaatgaggataatgaagggtgttctgaagatgaaatccgttttcacccgaaacaatcataccgttaccctgaaaaaatctgttacggcaataaaaagagcgggcgccattttccttgtgtgaataatagcgctgatgataacaagtggctgtttttcctggtgtttgattatggtcagcgcagctgtacgctggctgatattcccggatggcagattccggcagggaagcagtggccgctgcgtcaggatatcttttcctcttatgaatacggatttgaaattcgtatccggcgtctgtgccgtcaggttctgctttttcaccgcactgctgatttgaaggccggtaccgatcaggggagtgacccggagctggtatcgcggcttgttctgacctatgacgagtccccggtcatcacaacactggttgccgtacgtcgctccggttttaatgacccggcggataaaaacgggataaccgtattaccaccgcttgaatttaactggacgaagccggaaaaatggtcagaacatcaatgggaaacattggatcatatcgggaaactcaattctcatcagccttatcagttcctggatttatggggcgagggaagcaaaggtatattgtataaaaatcgcggggcgtggtggtatcgctctcccgtaagaaataaaaacagcagtgatataaatgccaccacctggagtgaaccgcaacttttgccggatattcctgcattggataaacatacactgctgattgacctggatggtgatggtcgcctggaatgggtcgttattcaccagagggcaaacggttattatccgcaggataaaaataatgcggaacaatggctgcgtttctcatctctcagcggtttaccgacagaattccattatccggcagcacagttaattgattttacaggtaaaggattgtatgacttagtggttatcggcccgaaaagtgtccggctgtatccgtcagatcgtaaaggctggaaggccggtacaatcattaagcagcctgatggtgtaacactgccggttttgtcgggggatgaacgttcttttaccggattcagtgatttaccggggaccggtcagcagcacctggtccggattaatatggatggtgtttattattggccgaataaaggtaatggctattttggccatcctgttcatattccgggtttcattccgggagagcattttgaccctgcaaacctttatctggcggatattgatggtaacggttcggcaaatattatctatgcgcattctgattacctcgatatttatattaatcagagcgggaatcgtttttcaaagccggttaaattaccgttacccgaaggcgtccgctatgatcatacctgtgaactgcaatttgctgatattcagggaaatggcgtggattgtatgatcctgatcaggccattgccggagttgcgccattggttgtttgagttctcaactaaaaaaccgtggctcctcagtgaggtaaataacaacatgggtatgaattacgcgctgaattaccggagttcggcgcagttctggctggatgaaaaagcagcatcagaacatcagaaaacgcctgtctgttatcttcctttcccggttcattgtgtatggaaaacggaaactaaagatgaaattaccggtaatacgctgaccagtacggtgaattaccgtcatggtgcatgggatggttctgagcgggagttcaggggttttggttatgttgaaataacggattctttgctgacggaaaatgaagaaggtaaaccggaaacaacggcgccaaaacaaacccgcagttggtttgcgacaggtattgaatcactggataaacggtttcccggggaatactggaatgaggacaaggctgcatttcccggctttgcgcccagatttacacaaaattacggtgataaggaaaccgaatgtaaggatgattgtaaaggcgccgcgaattattggctgcgtcgcggattaaaggggcagctactcaggcaggaagtttacggtattgataaatcaaaattatcagcagtgccttatgaggttactgaacagcggattgctgttcgtctggctgaaaaacagggctgttatccggtggttcgtccgtctgttattgaacatcgccactatctgtatgaacagtttgctattgatcctaaatgcacacagacggtgatcctcagtagtgatcaatatggtttgccactgaaacagatcactatcagttatccgcgacggaaacgggatattaatccctatcagagtattgagagcctgctggaaagtacatgggtgagcggttatgatttacagcaggagaaactgcgttttgtattacagaaaaacagttattacgttcttgataaccatgggaatggtatccggcagctggcgatagcggatgcacaacggcaggatacggctgaatttgaccgcaatgaattgccacaggatggttattcactggagagtttattacagaaggatagcctgagtaataaaccgaaacagttcgaattttccgggcaaactcgcgtggcgtatctgaataagtccggaaaaagcggactattatcgcctgactttcctgtacgggtagcttacatggaacacgctgaatttgatgtaaatcatcttaaagaaatgaaagattatttcccggagggaagtatagagaagttattatcatccggaggatacattgaaacgaagtatgcatttccggaaaaagataagaaagaagaaatcatttatgcagcacaacggggcataacgaaatacggaactcaggaacaattttataaaccgatatcttaccgtgctacaaacctgacagaattcaataaacttaagtgggataaatatttttgcgtggttgttaaatatacggattcagccgggggaataactaagcctgaatataattttaaatag

SEQ ID NO: 277950 - DNA, 615 bp, Morganella morganii
atgctaaaagtctcccccgaatttatgacgccggagtataacgatattatctcaaggctgaaaaatgatcatatcattactgaagatggttatttcagtgcattttcccgggaccgtatgtctgaagaaaaccgctgcttaataaaagcgatgatgataccggatgaaaacagattaccaccacatatattacagttaaaaactgatcgttatgataatgacaatgctcagcaaatacggcagaaagtgactttttttgatggcctttcccgtcagttgcaaacatctgtcagagttgaatccgataatacggttatacgaaatggaaaaggcagtcactctccgaaaaaacataattctgatttccgctggtcggtaaccggccgtaaagaatataataataaaggttttattattcgtgagtatcagccttattttattaatgactggaagtatgatgttgactttatttcaggaaatgagcggtggtcagatactaattattatgatccgctggggcgccttatcaaagttgtgacagcaaaaggttatttacgtaacaccatatatacaccctggtttattgcacaggaagatgaaaatgacacggtatga

SEQ ID NO: 277951 - DNA, 3558 bp, Morganella morganii
atggaaagtgataaacataatttacttttttcacggatagttgagcaggcacttccgggattttcagataaattatcagcaagaaaaaatgaaaaatcggttattacccgtctgaagcagggaaaaaaagggctgatggctgactatcccggactcggatatccggatgctgaaatattgcataatcgtctggcagttgcagttcatactgtggcccgtaaacaacgggaattacgtcagatcagtgagtttcgttcaccgcgcgaagaaaaaggactgaaagcattaacccggcaattaacttatgaagatcaattctcgccaaactgggcgggaaatactttaccggatgcgatagattcaggccacggcgctgttgcttatctttatgacctgcttacatttgtggaaagaatgattgaaccgaagggagacagtgataaagcgattacactcaaacagcgcagaccggatatttataatattttactgaatgaagagaatgtaaacggaagtatttccaaaattcagattattaatcaaatcatgagtactgcaataagtcagcaggaaaatagtgaagatcctgagaaactgatgctgaatgcacgctatccttaccagtttccgtttgaaaactatatgaatcagatttatgccgtactggatgaatatgacctatctataggtgatattaaacggtattgcgatcccgaggcgccttatttcacacagccggttttgcacggaaagcgttcagattctgctctctggctggatagtcgtttagggcctggtctgcgtaatattttgctggccggaccacaaatacaaaatagcaagaaagaagataatgagaaatattttaagagaaattttggtgttgaacagtttacggatttactgaataccacggttttctgtcagcaattaaaacttgagcgtgtagatctggaatcattgttttcctgtggtgaatatacaccacatttatccccgaatgttataccggaaataagtaacagatatgcagataaggagccggggcgtgaggtatctccggctgtttacggttcggtatttattaataatggtgtaatgcctgctattagtgttaatgaaaaaatacacagtttcaatgaactgaatgaaggaagatgcgaacgcattgaacgttttctgcgtctgtcgagggcacttaatcttccttatgaaaaacttgataccttattgatatctattttaaaagctgaaaataaccagagcggtcacaaatgggatattactacaaataccctgagagctattggcttgttcacgcaaatgaacagaaaactaaaatgtacagccagtcagttttctgttttatatgatggtatttcggtttacagccggggaaaagatatcagtgattttgaccggttatttaataatgatgaccgctttaattaccgttttattcttgatgacaaaaaaatggaagaacgggatattaaccgtatctgtagtgtttttggtattaactacgatactttttcttatctggcactcctgacccgtgaagttatgggactgaatgtattaacccgcagccgggatgttatttctgcaatttatcgtcctgtggttttggctgacctgctgaaaataaaacccctggaattactcgcattaatgaaatcaatgaatcctgatgctcagtttggccgtttatttacagggataccggaaaaccaggtgtacggatcattcggacaggcggatattaccagtgcaatcagtgcactaatcagtcttcagacatggcggaaagagaataaactgtcagtagcacagatctttaattggatcacacctgcgattgtcgatgaccaggaagataaaactgagcgggaactgttccgccagattaaagaaaatacagacagtgcactattcagtaatgaagtcttgtatcttgccggtgtaccgaaggatataaactgggtttcggcattacaggaactggtcgatgaccagggaattctgaaggatgctgatgatggtctcgactgggacagttataaaaaaaatgcattaaaaataattacttccaagtcggaagaaaaattaaaaaatttaacatcggaagaaagaaatactattgttaatacgattctgtccgtccttttggaaaaaagagcagcacagtggaagagtgtgagtggattactggaaggatatcttggaaataaaactgacagtattacaccggcattgtactggtgtggtagtaatacaggtgagtttctgaaaaatatcagagcactgcctgataataatatgttgtccgctaaagataataacgtcatggtgttattgtcatctctgcggcgttatagtgatattattgcacacttccgtcttgagccagctatgatgtcacagttattatctcatgataataatcagaactggtacaaactgaaaacagaaaaacctgatttacagttgctttaccggctttcagtatatcggaagcttattgatgatgctaaacaaccggctgataaattattaaactatctttctcttattaattcactcccgatagatagccgcagtgatgaaatacgcctgtatcgtgatcaggcactgaataaattatctctttttatgggatggagtattaatgagttattaactgcagcacagtatgtcgcgccggaaaatgccatcattcggacattgccgcaaattcttctcgttaaacaaatccattccgtctgcctgaaaacggggttgagcgcccgcagtgttatttcgctgtttaatctggatgaaagcagtgaatcatcactgtatcaatctgttgccggccaggtaatggaaagtctggcacagcaggatgtatcactttacagcaacgatgaatccagtcagggagacctgaccgcaagtgtttcagccgggaagacaacactgctggtttacagtgaaaatcagcaggaagaagaggaagagaacggggaagataagacattgctgacagttaccttacagacactggaaagtacaccgttggagggagtacccgttgtatggaaaaatatatccggactgggtgaattaactgatactgaaagtaaaaccgatacatcaggccgggcatcggtgacattaaaagcggggaaaaagcagggagttgcattaattaaagcatattatggcgtgaagaatattccgctgcctcttatccggattgactgcgacagcagttcgttgggtgctaccgatattcagaccgtaccggaaaaaccggtagatattccggcagacgggatatcagctgttgaaataacagtacttttcagagaccaatacgataacccgggtatggataaaaatattcgctgggaaacaaccggaggccgttttatccataaggagaacattacggatattgatgggggctgtcacgcgacactggtcagtgataatcctgcagatattgcggtgaatgtgttctatgaaaataatcctgaatactcgatgagagttaatatctcttttatttaa

SEQ ID NO: 277952 - DNA, 4569 bp, Morganella morganii
atgcctcgtaatgtaaaacagattttgaatcatctcgcagagaagaaacgggatgcatatgttgattactttactaattatgtagtgggtaaagatgaaaatacagcaatgctgggaattaccgatgcggatgatctgtatgattactttttaacggatgtaaaaacaagtgctgattttgaaaccagctatgtttcggatgcactggccagtattcagcaatatattagtaacattcttaatcaaaaagaaccgggttactcaggtgagtttagtgaggaacttcagcagtggtggtcaggttatctcgggcatatttcactgtggaaagcgtatcagaaaatggaggattatccggaagattataacttaccggatcatgttactgaaaaaacaaatctgtacactgactttgcatcagaccttggcagtgacagtcttaatgatgccgctatacaaacggctttccttaaatatctgcggggttatgaagcagttaatgcgatcagtgtcatttccggatatgttgattatccgggagagcgaaatgatcaggatacattcaaagggcatggttttctgaattctgactattttttcatcggtaaaaataattcatcaccagccggattttactggcgtgaagcaaatataagagcagataaatccaccgaatatatttctccccgggcgtggcaggagtggcaacctctggtcatcactgaagatgcaaaagatattttacaaatgcggattgtcaaagtgagtggttgccttttcattgtgtatctggcctgtaaggaagaaataattgcggatgaagcaaaaccagagaaaggaagcagggttaaaaataagaaacaatataaggtcacacttaagctaagccgtatggggctggacgggaagtgggatattcctgagcagttatatgaaaaaatctttgatagtaagcctgtgaaaaaaccggaagataatgcggatccgttccggttaatatccgttgtattcactcaggatgaacagcgggatgattatctggttattgcatggctggataatcagaaaaatattattttttccaatgttttaaatgtactgagacaacagttagctatcgacagcaagggtattctcggcaatggatggcaggcgaaattagcatcacgattttttaccggaaaaaatatctgtcagcaccgtatctttggtattgaaaaggatataagcagtatccggagaatagacagtgatccgaatttatcgctggaggcattctatagtctcaaaggtaactatcatcagttacgggtcagggggacttgccatcgttcagctaaaatacctgatcttatttcacttaactttcaggcaacggtcagtcagtggagtaatggccgcattattgtcagcggaaaccgggacaatattactgtcagagcagaggcaactaaaggagcagaatatttagcattattactgtccggtgaaaaattgattgagttcaataagggagactttaaggaacacaatggctggttttcagcagaaaaaatattctcactttctcaggaacaatgtgacctgatagccgtaaaagattataaaaaaatacgcagtggtgccggtttttcctatcagatagcatccgggggggcggaaagttcactggcgcatgttaaaaaccgcatcagtacggtgatgcaaccggttgttgttcctgctgagttatctatttttgctgacgaactagccggactgaaaaaagaagactggaaaggtgagttgatttatcagaaggatagtcacacaccttggtgtaccttcacctggagtaatgacgaaaatgataaaaacaatgaggatattaatgttcgttttaaatttggattaacgaagaaagatgtaagcggtgagttcagcgttaaaatcagcaaattatcaaattcgattccatatattgagacctttccggaacatcagcaatttttaacgcttaatcagtcagatgatgttaagctaaaaaatattcgtcttaattctgttcaggttcgtgatcttatctatcgcgctcaaatcgcagtcagacatatttttgactgggaagcacaaattacggaagaaccgaaatatgaagaagataaagaagataaaaaagaaatactcgacttacatggggctaacagccggtatctgtgggagttatttttctatttaccctatctggtggcaagtcgtttttcacaaaatcgtctttattatcaggctcgtcagtggctgcattatatattttcaccttatgacggacaccgtttatccgtaaaagatggtaacgaattattacctccgccatattggaactgccgtgtattaacgcaggaagatttacaatataaaagtaatgactatgcattacctgacccttatgcgatatctgaagatgtgccttctcattatcgtaagtcggtctatttaatgtatatcgataccctgatttccgaagcggatttaaattaccgtcagctcagccgtgacagtattacccgtgcctggggattttatcatcaggctcagggaatgctgggttatataccaaaggagcacagcttaccgaaatggcagccatgtactgttaatgaactgcttgataataaaacctattctgtacaggaaagtaccaggcctgaattattttcaggaatatatccggaaaatatgcccaaaaagctcagaggatttttctggtacggcagtctgggcaatgaacgattccgtttgcccgttcagacaagtttactgagcaggcagtcagttctggagcaacgcttatttaatttacgtcattatctggatattgaagggaatatgatgaacctcccgttatatgcagctgcgtttgatccgttcgatctgctgcgttcgcggctgggaggaacctctgaactggcatatttacagtccgggtcattaagtattccgtcatattgtttccggaccatgctggaaaaagcaaaagaacaggcggcggcactgattactttaggggataaacggctcagttattatgagcaaaaagaacgctatcacactgaaaatatgcaattaaaggatgcggttgcgcttgcggatgccagtgctgcgattcagtcatcgctgcgtgaccagcaaaaatctgctctggactctctgaatgaagccaggacgatggctgagagcaaaaagacatattacggaagcctgagtacgagtacaaaagaatgtcaggccagaaatttattagtgagttcatctgtgtttcatggggttatttcaggtgctgctgttgcggcaggtattgcggctgcgattccgcgtgtatttggtctggcgcaggataccggcgaccatggtaaaacagcactgctctctgctgtgggggggactgctgcattaggtgcggaacttatgcgcggtactgcggagtatgttcagatagatgaacaataccgtcgccgccaggaagagtgggcatttttggcgtctcaggcagaaagtgaaataaaggtactggataaacaaattgatgctcagaacgtggctattaccgcagcagaaaacagtgttaaatatacaaagcttcttcaggcgcaggctaaaaacctgtatgactatttcagtcagacccgtcaggttaatgaaagtttgtacgaaaaaatggccaatattattggcttattgcatgaccagttgtgttcactggtcagaacattttgtgcattaacagaagcatcctggcgttatgaaacggatgattataaacggcagacatttattccggccgatctgtggagtggcgataatttaggtattctggtcggcgttaaattacagaaagcgttgctggaaatggaaatggcgtatacacagcaaaatacacgccgcctgaatatcacaaaaacgatttcactgaaatcacttgtcagtaatcatctggttaaaacagatgaaacagcgctgacaacatgggatgacgtaaaagaagcattaaaaggagcgaaaaaactgtccttcgggttatcccatcaattttttgatacagatttccccggacattatgcccgaaaaattcactctttatccgtgacatttccgacattattaccgccatatcagaatatgcgggttcttctggagcagacatcgaatacgttattagtttcaccggatattgatgcggttaaatccctgtatacatcagcagaacaaaaaaacagtgaatcaattatccgtaatttgcgggtgaaccagaaaatcatactctcccgtggctgcgatgacagcggagagtttccggaagatgcctttactggcggacaataccatagttttgaacacagcggagctatttcacactggctgctgtccgttccccgtccgcagaatagcacagagctcattgataatcttaatgacattatcattaaacttaattatacggcgaaaagtggtaatgatttctttgaagcggcggtcaatgaattactggaaaatacggaatcaataataaaagagtgcagcgacaatgattaa

SEQ ID NO: 277953 - DNA, 2832 bp, Morganella morganii
atgattaaaaaatataaccagaatgaagttaagggacgtaactttatatcagacccttgttttgatgaatgggataatgaagtctgggataaaggtgagccggggaaatatgcaaggaaagaggacggagacaaaacttatcttcgtattcttggcaagggaagtatttcacaatcagttattttaccgaaaagaaattctggtaatccggtattgcctccttcttattcattgtcttttgattactttattgaattcaaggcggctgcatcaataatactgaaatatataagagggggggatgagagaaataaagaagagattttcttacagaatgaaaaagagtggtgtcagaaagaattatcacttaatgtatcagaggaagataccgaaataaaatttgagttttatgccgggaaatcaggcgggaataaagcattgaatctgactgccgttgatatgcagttacatattggcggatttagtccggaatccattgtattcgatcatgaaaatatcccggcagataagccacagttacggcttaactatgggcgtaaacacattctcaatatcaggccgtctgatgacagtgcatggcgtgatcttgactgtgtactgaagtgggggagtgagactccgccatctaactatccaatcagttttgatcctgaactgaacactgtgcaatccttaaaaaaagagggaagtgattggaaaatatcctgtttggctcaaaaagtcagcggaattccggagacattcaacataatgctggcgtcagaatacagtgcagtaccttttgttttcgatgcggaaataggcgattacctttataaatttacggaaccgaaaatcaccgggattgccgttattgctcaaaatataccggctgaagtcagtattcgtgttgtttgtgattatgatgaagaatatccggataagccgggcgtacccgatgttgatgttctctggaaaattgacggcggaaagagtatcagtacgaccaaaacagataatgatggtatggcggctcttacatttttacctgagcagggcgggaattataaacttgttgccgtaataaccgataaagcagggcgcaaaagccgccatcagtttgatattaatgtttatgaccgttctccatggctggatgatacccgtattgatattaacagtaccggaatcgactatcaggatgatgcggtttatctgatgaccgggacaacgacggttattcatcttaactgtgaaaataacgaaaatattttcggccgggttaagctcgaaaataaagagggaaatacaggtaccagtatcataccggcggaaggccgtgatatttcaccggaaggattgtcctgggatgttaatatcacaggcagagacagcagagaactgacactattattaaccagtgatcagtttgatatttcacaggaaatcggtgttattgcattgcagcctgattgtgataaagaaattcagtcgttgaaagtgaatggtgaggaagcgaataaaaaaacaccgttaattatcattccggcaacaccggtaacactcaattgcagggtcaataaattattgtcccgtttgcaggctgaactgaacagtgaagaaagtaaattgctgacagcagaaccggctttcgggcaattacaggtactgaacaataatgcagcagaatgggtattaagaagtgccggcccgcagggaggattctttaatctggatctgaacattccgccactgacaattccgctgacgctttccggccgtgcactgccgcaggaaatcgcctcaggaattgagctcattacgctgaataatacgccgctaacaaccccgggaaatttatttcttgcgccggggcggagctgtacactgacagtgaaacctcatcctttactgaaggatattcctgtttcattagttgcagaaaccagcaatgaggtttcggttatcagtaatccgccgtttggtcaggaagtcagtctggcagaaaacggaacctcctggcagatatctgctgacccagcttctgcacgcggaaaattctcattgcagattcagagtcagtggggcggagcaccggttcatctggatggtgtggtattgtctgcggatttacaggatgaaggctctgtctgtgtcattgatggtgacatgggcagaaaatacgatattgattttaatattggttttgcttttctggctttggaactctattcactggatctgaaacttctgccggataatttaatcagcggacaaaccgtttcctgggaactgacggaaggagacaatcaccgggatactgtttcttttgatccggagacaccgataatattagattcaccggaaactgattgggaattcagttattccgaagaagaaaacactcaattcgatttagtattaaacagtcaggataagttcagttataaaattccgtgccatatttttagcgatgaaaaatatctggaaaaaagtcaatgcatttttatgttgaatgattcggttattaccccgggtataaataataacaaccttgaatataagaaagagatatcacttaaactgaaattatcacaagaaatatcagcatttctgaatggaatggtattggcattagttgttcataaaacagatgatgaaggtgatagtctgaatataacctcagataaattaatcactgttgataaaaataaacctgaccttgagtggagcgttgaaaccgatgtggcagtcggtcaccgttttacactggagattgttttggaaaatttaaaaaatatccgtgctgttatgaaatttacctcagtgtaa

SEQ ID NO: 277954 - DNA, 2979 bp, Morganella morganii
atgtcagaaaaatcaaaaagtatctttggtaaattaatagatacagcagataaaaaccacacatgtatttatattaatttttcttcaggtgaagatattaagatcaatgttattcaaaaaaacgaaaaatcagcggaaataaacgatgataataataaaaagctgacattattactgtcagatattcagtctcagtttaaacaacaaggcatttcgctgaacagggttcaggggcaaccggaagggaaacgtaaattaactgcggagctgaaaacagataaagtatcgctgtcagaaactgaagtggccttgcaaaaaatgcagttccgggcactggagctgggggctgaactggtgttaacggatcgcccggcggagatggcaaatgaacggtggcggttaccggcggtttccggtcaggagaaccgttctgagagcatgacggcggcagagggactggcgaaactggccgttgccgttcaggcggtgacggatcagtgtccgttacagattacactgatgattcagcctgatttacggccacaggtgatactaaacgtctctgccggtgaggtgaactggatttttgcggcaaaagagggccgttatccggtgaaagatttactggccaaaatggccggtaaaacgatcacgaatggctgggatgcggttgtggtataccagcgcggtcaggccaacatgctgcttaaacagcagcatattaagcggtttgttaccggcaatgtattagcgccgctgaatgaagatatcgattcatcagacgccacccggttacagacacataacctgacactgagtgccccgtatctgtcattcgacgctgcagacaccggggattcaatggcacgggtcggttgggattttgtcaaagggatgattatttatacacaggaagcggatgacggatcttaccgtgttaagaagattgaaaagatcaccccgctgaattccccgtttatcggtatgaaggtaccgttgtcaagagcgcccggctcagtaagtaagattggtgaagtacagtttgatattaaagagggggaccactttaccaataacctggtggtaaatggtatggggcaggaaatgatcagcaattttttcaagcggagatttgttgcaaccccggacgaccagcggatctataagctgggaaccatcagtaattatgaaaatcaacaatttcagcctgaaaaatttgatatccgcaccatgggggcgccgaatacagaatcccgcgggtcacaggatgaaggtgatggtgcggtggtgttatttgtgcagatgaaagacagtgactcgaaaccggtggaaaaggaaactgactggttattagcggatggttatagttcagcattgatcgtttctaatcgttttttatttgacagaataatcagaagaaaaacagaaaactcgttgggtaattatttagaatttaagccatatcaggaaattagtggaagcaataaatcatggcaattagtagcgaatagtggatatttggagtcatattattataaggtgattaatttttgctcggaagattcttgtcctttaggtgctcatattgttatgtcatgcagttttactctgaatttcggagaaaaagataaggctttagtaccgttatgtatttattctgatgaggaaaaatataatattaagatgaaatatggttttaatacagagggtatgacttatgaatttcagtatattccaagtgataatgaattagatcctgacaaagaagtttcagcgggagtttgtaaattaaaattgaatgtggaaacgtcatatgaaacaaaaattgaaaatgatttaattgtttttcagtgtgataaaggtaatattaaggttgaatcagagtgtagtgggttcaattctgaactgattaccagatttgatggaacagcaaaatacagtgatactattaatgaaggcattaatgaaagggtagtaaaaataatttcagagtttaagctgaatgacattaatacctttgtattgcgaaatttattgtttcccgatagtaattacttccgctctgaaactgcttttgttcccggcgatctgttgcttcaggggcagttggctcccggctctgaatcatttgctgttacacccactgaaattaccattgttgccggttcggaatatcagtttacaaccccccctgaagtcagcggtgtgaaatggagcctctctgattctgaaaaaggcaataccaacgcggatttagggcatattgatgccaagacagggaaatataccgcaccacaagctaaggcaatcacagaaggtgtgcgccatgtggtggtttgtgctgaaaaaggggacaccaaagtgtatgccctggtctctgttcttgctcatagtgtaaatatttcaccggcgtatcaggttattttgccgggcaaatcctccgcgttaacggcggaatcactgaaccccggggaactgacctggacactggccgataacccgcagggttcagcactgacaaaagtcagcaataacgaatatacctatacagccggtaaaaagaacaagaaattaaaactgaatcttgaacgtatttcagtgacggatggaacgggtacaacgactgaagcaatgattttagtccggaatgtgctgttaaccggatatatccgggcatcatatgacaatatgccggaaaacagtgtacagctcacctatttccctgaccctgaaaatgcggaaacggcaataccggtggatgaagtggaatggacactgctggaatccggtggtgcaacgcttgatcctgaaaccggtattttatcctgcaaacaggcgacagataacggttttgcggttatcagtacaaaatatttcgacgaggatgaaggtgcgctttattgcgcgattgcgatcccgctgccgctgaatacctataaagaaacaatactggctgcctattctccggagcagtcataa

SEQ ID NO: 277955 - DNA, 4494 bp, Morganella morganii
atggaaaatactatctggtccggcgacgctgttacgataacgccgccgtctttaccttccggaaatgtcactccgggagggatggaagaaaccgtggccggcgccggtgctgacggtatggctacagcaaatattccctttgcggtatgtgccggaagaggaattgcaccatcatgctctctttattacagctctgcatcgggcaacggtgaaaccggtatcggctggtcattgcagaccgcctgtatctcccgcagcacattacacggcgtaccgcgttatcaggatgatgatatttttcttgccccggatggcggggaattaacggaatatcgtgatgataacgggctgcctgaagtcaggagtaacattcaggtttgtcagggaataacccttgaacaaccttatactgtccggcgttaccgcgctcagactgaaaaccgttatgagcggatcgagtgctggacaggcgaaaccgataaggcacaacagttctggctgatctgtcacaacgatggtgcagttacctgcttcggtcattccgccggtgcacgggtagcggatgaaactgatgcgctgcggatcagtgaatggtatcaggaagagtttctggccgttaacggcgaacatatctgctttcactaccgccgggaggatgataccggggtaagtgacggagaacggcagggcggaaataaccggctgtatccgcagcggacagattacgcgaatgtaaaagctcacggaagcctgtattgcctggcgggggatatgcccgcgccggacgcttttttattacacattgtttttgattacggcgaaagaacattacagaaagcggaagttccgccgtggacagccgctgccgaatccggctggttgctgcgccgtgatccgttttcactctattctgccggctttgaaacacgctgccgccggttatgccgtcagatcctgatgttttcccgcaaagcggatgatctgaaacgtgactcggtgatggttaaccgctacctgtttgagtataccgaaagcccggtgatgacctgcctgagccgcattacccggctggcgtatgaaacggttgatggtacgctccgtgttgcagaaaaaccaccggttgtttttacctataccgatgcaaaactgaccaccggtcaggcggattatgttccgctgatgaactggccggaagtggatcgcgcaaccgggcagctggtcgatttatacggtgaaggctatgcggggtggttatcccggaatgaaggtgtgtgggggtatcaggcaccggtacgtagtgaggttacaccggacggaacagaatatgcggactggcagccgctgccgctgctcccctctgagcagggagatgaaaacctgctggcggatattaacggtgacggattccctgaatgggtggtattacgcccggatctgaacggcttttttaccctcaatcctctgcagaagaacaccggttttaccccgttttctgcttttccgccggaattttttcagcctcagagccagtttgctgatttagccggtaacggattgatgggaattgcctctatcggcccgcataccgtgcgtttttatgccaacaaccgcgaaggttttgaaccggcagtgatcacctgtaatgacgaatgtctgccgttaccggcttctgatgcccgtgaatgggttgcactggcaaatccgctcggcagcggcggagcgcatttaacccgcatccgctataaccgtgttacctgctggcccggtaatggttacgggcagttcggcaaagcggtcgaactgcatctgccgggggagattgataaggaaacgcaattccgcccgcagcacctttatatgacggatattgacggcagcggtacagatgatcttctctatgctgcgccggcggggctgaattattaccgtaatctgtccggcaacggatttgcggagcctctgctgatcaactggccggacggtttcgcctgggatgatctcaatacactgcaatttgccgcactgagcggacagggtgtcagcctggtggtcagtgagcggcacatgaaagcacgtcactggcggctgaatctgacatctgagcagccgtggctgctgaaaactatcactaatcactgtggattttatactcagctcagttaccggagttcggcagattactggctggatgagaaactggcagaaccatcacgccggagccggctcccgctgcggttatccctgctttccggtatacaccgccgggatctgatcacccgtcaggaacagcatacaacctataattaccggggcggacgctatgatacggataaacgccgttattgtggttattaccgggtcgatgaaacggacgactgcggtgagagtaacaaacgcaacgatacgccgttgcaaagaccgcgtctgcggcgccgctggtatcacactggcgcggcaggtgatgctgtaaaacgggaaggatatttttcatcaccggtaatatcagattctttactgacacgctggcaggagcgtaaagaccggatcattgcggataacagcgtcccgtctctgcattatgccctgaaaggcgcactattaagggaagaattatttgattcggaagatactgctgttccgttttctgtacaggaacaccgttatcagatccgtctgcttcagcaaaacggggatattatctgcgcagcgccgctgttactggaaaccctgagtattaattatcagcagtcagaaaaagacatcgcctgtcagcagcaaattgtgatggattactctgagtacggtgaagcgttacatgagataactgttttcctgccgcgtcagagcggcgttgaggaaaatccgtatccggcggtcacaccgcttcagtggcagaattcattcgatgatgctcagaccctgtgctggttcactgaaacccgccgcctctcactgagtatgatcacgcctgaccgctggttgccggttctgccggaatgcagctggcaggaaagcgtttctctgaccggcaatgaaatgaacggcaataccatattcagccgggaaatattacaggcgaaagacaatccgctggcgggaaaaccccggacattgctggcgtggcagaaagagtgttatcagcaggacggcgcagagattaattatccgccccgtgttaccgggcaggaacaggcggtatttaatgacatcacactgcagccataccacgcacatctcagtgatgatgaactgacacagcaactgagtgcggcaggctatcagaagcggacaccagaagaactgaagcaatctgtctgggtttcatcaggaaacacactgacgtatctggatgcggacgggttttatttaccggcggaaagcaaaaacccacgcggtggcattcagatttttcattacaacacctattacagaatggcggatagtttcaccgatgaatttggtcagaaaacacaggtgacagaaattgatgagcgattctggcagccggtacggatctgcgatatcaacaataacaccagtgaagtccgtttaaatgcatttggtgatatcaccgcaaccagtcagtatggtactgaaggggggcaaccaaccggatttaaaccggtatctgaatttataccaccggagcggcttaccttagcgcaggcgattgagaaatcagaaacgctgttaggcgggcagttttctgtcacgctttatcatgaaaatgagctcagtggtgataatccgcagccggcgtgggtgatgactatcagtgcgtcagattaccccggaacaccggacatggcaccgtgccgcattgatattacctattttgatggtacagggcatccgcggcagcagtttagtctcgatgagcccggtgcggcttatccctgtgccggcggtgtgttattgcaggatgataatcagctgaaagaagtggtggctgatacccgctggcggatcatgcaagcgccggaaaccacattatcaggtaatgccatccgtcgtttcagagcctggttttctgacagttatgaacccgttattgatacccgtttgtcagatcttattccgtgcgaagtgattggatatgacgcacaggataagccggtatttgtgcaggatgcggaaggatatctgcgttatcagcgttatttcccctggtttaatctggactatgatgagaacgatactctgtcttccggttttgatcttctgcggctgtttcagcgtcaaagtcatatatctgccgggcccggtaactatgatgaattatttatggaacggggtatttacgggcaaatgacggaaatagacaagccgtattcagaaaaaatatatgccgataatattcagcgatattattttaacggcggacgggaaacctggttgccggatgctggtattactctgacaccggggccggatattctcaggccttatgcaatgcctcaggtatggtacggagggaataataatgatagctaa

SEQ ID NO: 277956 - DNA, 1344 bp, Morganella morganii
atgctgactaccagtaatgtatttaaccggattgactggtcggaagggaaaattatttcaaccgggagtgatggatatcgtgaaatttatcaatacaataaagaaaatggtaatatagagtgtgtatggtctgtgattaatggggtggtaaggtgtttttgtcaatcgaaatatgataaaaataaccgtctgagtgatatttatgttaatacgtatgtggctgatagtatagaaaatgaatctctgctatatacaaaattacgttacagttatgattataatgaccgggggaatgtaaatacaacgaaaatttcatcaggcaatatactacttgatcatttaggtgtaaggaagggtgaggactgggagagattaggtacattgatttttaactatgatgttaatgatcgtgttgaaatgacagaacttaatctattttcacctcctgatggcagccgccatagtgagcaaaggagtgagcgtaattataaagaatcacgtcagtttaataacttaggtaaactgacagattgcagatatagtggtgatttgtcactgacaaataatatgggcaggatactgtccggtcagagctatcaatataatgaaaatggattagttattcgcagtatccggcgtttcagttcgggtgtcagtgatattattcgctattgctataatgacaaatcactctgtttgagttcattgacacattgtccggttaatatgggatggccggaaacagaaaaatatacgtggaataaggatggtcagctgatttcccgtctccgcccggatgggtataaagaagagtatgaatatgacggaaaaccaaatattaccagaatgacgataattaatccggaaggcgggaggaccataaaaacgtttctttatgatagtcacggacatcaggttattcagactattcagtttccttcggaatatccgggggggccggctgtttaccggcagattaatgatacttacaataatgaccatcttatgacccggaagatttttaatcaggtagttactgatacttcagctgtcccggaagaaacacatttttatcactggtttcagaatcaggttattgcggtgtctgtgcagaacaattcgggcaatatcaaaacacattttaattttaaccacccggatggtacggcaatatgccgtttttcaccaataacgcagagccagaatttaaaatcgggagtctttaattatagttttagaatgcagtggattgcacaggatcagcagggattattttatcagccggaaattattgagttacagcaggcatgttttgaaatgaatctgactccgccgaaagtataa

SEQ ID NO: 277957 - DNA, 2799 bp, Morganella morganii
atgaatttatctgaaattggtgaactgtgcgcagacaccccccggatgacggtatttgatcccagagggctgacagtgcggacagtggattttaaccgcaaaatcagtacagatatacccgaagcactgataacccgctatcagtacggagaaagaggtgaaatgcagatgtgtgctgatccgcgtttcagtgtctctgcactgggaaatgaacccggatatcagaatctcgtttctgccacagatttactgcagcgccctgttcatcaggtcagtatcgacagcggtgaatcattaagtctgttgcatgcggatggccagcctgaatggacaacaggaaatccgggagaggaggcagtcagccagcgttttacctacgatcgtattggacgtttgctgtcacagcacagtcttaacggaacagaagagatcttattacagacccggcgttacagtgatggtgttgataatgccgaagaatataattgccgggggcagtgtacagagatacagaataacgccggaactgaaacatttacggaatttgatatctccggcaaaaataaaacattcagccgccgtttctgggcagtacgtgaccggagtgctgatttgaatcatccgcctgaagcagaaatgcggatgtggattcaccgtaatgatttatcggcatcaggtaaagtccggcaattatcgttgtcctgtcatgaatccggacaggaacgcgctgtttatacacgccgcaatgggtacaaccggcgcggacagcttatcagcagtcatctgactgatgagggcggaaacctgcatgcattactgatatcggcagattatcatgcgaatggtgcgtgtcagcaggaaatgctgggtaatggtgtgacccgttattatgcacaggaacatttcacaaaacggctgttgcgtatttcaacctggcgtccggggggaaataaaaaacgttacccgattcaggatatttcgtatcagtatgatcctgcgggaaatgttactgagcgttatgatctgggccgggaggatcagtattttgataatctgcggatcacggcacataatcagtatcactacgattcctgctaccgcttacgccgcgctgaaggccgtgaagcgctgaatggcggaaaaagtacaataacgccgcttatcagcggatcacagcagttagtgaattatcagagatggtataactatgataatgcgggcaatatgacgcagcttcgtcacagtgccggacataataactggactcaggttttttctgtctcgccggagagtaaccgcagtttaccgcagccggtttcaccgtatgaagtggaacgcttttttgatagtttcggtaacctgaaagaaagtaacggcgtgcattttacccgcgactcacagcagcagcttgtccgcgcggatggtgcacggcgggcaaatggcgcgtcggactatgagttttatcagtatgacagcagcggtcagcgttgcagtaaactcagcagccggattgctgacggtatcactcaggcccgccgccgggaaacggtgacatatatttccggcatgcgtttgtgtgagtatgactacgacggtaaaccacagggtagtcattattcactgagctttccgctggccgggcattcagcggtggtatgcctgtctgagcgggagccggaaaagaaagaaatgcccctttctctgatgcgttataactgccttgatgcgcagggctcggtcgcgctggagctgagtgcagagggcgatattattacgcaggaggaatattatccgttcggcggcacctcactgttcagttcgcggagtgagagtgaagcagactataaatatcaccgttacagcaataaagaacgggataatcttaccgggctttacgattacggattccgttattatgcgccgtggttgtgccgctgggtctcgccggacccgctgggaatagctgatggtatgaatgcttattgtatggtgcgcaataacccggtgacatacagggatactgccggcctgatggccggagctgaggaatttgaaatgcgggaactgcagataccgtccactcagcgaagcatggcaccggcggtatataatacatcgcatccgttgcagcaaagccgcggggaacagttgcgcgctatcagcagggtactgacccgtcctttagcagctgtcgcacggggaatcgcccggatagggcgggcaatcagaagtgttatcagcgggctccgttctgcattacagcgtttcagggggacaggtgatggtgctgatgagcagggaatgcagctgttgctaccgatggaaactgagtcagaagatttttcaggcagagttcgtatcacagaatcagttttgacgtattcaccggaaaataatgaggaagatctggcctgggatggctttctgccggacagcgacggagagcaggaatatctttgggacgaaagtgatttcgccatagattacgggtctgaggccggtactgatgaaatatttggtatcgggggacttgataaaaataactatgaggatgatcagttatccgattatagctgggatgatattagtttgagatcggaatctgatttcggaggggataacgttaattatccatatgaagcgtttaatattacagaagggccatacgatgacacaacaccacttctgaatggttcaaataacagagcaacaccggcagctatttcatcactggtattatctgcctcgattttcagcttgctgtggtggtatcagtctcagcatacctaccgccgctga

SEQ ID NO: 277958 - DNA, 2772 bp, Morganella morganii
atgacatttaataattcagtgctgattgcactgttttccgcttctttcagcgcttatgccacggaaccaccaccaccttatcagtcagaagttgaagttcctgatattaataccattctcagcagtgccactgatggctggccgaccgcaaaagataagtgggataataaatatcagtcaattatcaccggtaaccaatatattaatggtcagacattaaccagaacctggttcccggaacaatttctttatgttgagaataattcttacagcctgaataacaccattgattccttccagaccacattccggagcggcagtgtcgctatcggaaatatagtcaaaggcggaattaccaatccgtccgatccttccaaagtctatcgcggatttatgtcgatgatggaagactccatagcgtataacactattgttgaagataacggcagcctcagcctggggaatgacgccaaagcgtataacaccacagtgaataccggcggcagaatggttgtcggtacacggggctatgcacaggcaattttgatcgacggcggttatctggagcaatccgttaccagcacctcaaataccaaagatgtgattgtcgtgaatggcggacagcatattatctacggcggtacggcaaccaacagccatatcggcagcggcagctatcagatgagcagcggcaccacgatagataccgtgctgtatgacggtgcagttcagcagatttatgccgggaaagatggtgtgactgaccgcaataccatcgttaaccacggtgcattacagtttgtgacccacggtaatacagaagatacccgtgtttacggtacccagattattaccggtgttgacggggaatgggaaaacggcgagtggacatccgacgattctttccggattgatgatcagacagccaaaaatgccaccatttatgccggcggtgtgcagcgtattcagactggcgaagccattgatacccgggtttacggacagcagattgtcagcggcaaaaaaggcggctggagcggcggacaatgggttgagcaggacgcctggattggcaaagatcaggttgccaccggctcagtgatccaccagggcggtgaacagattgttgaatactatgccgatgcggttggtacgctggttaacggcggtacacagctggtcaaggagtttggtcatattcaggatactaccgttgagaacggaggttcatcctttatcgcttacggtgcctactccaccggtgacctgaatgttaatgacggttcagtaacgatggaaggcggtagtcttcacagctggaccggagctctggacggcaaaggcgcttatattacccgtcttaatctggccggtgacaatgcgtttatgtatctgaagcataatgacaccaccagcgaatccgaagcaacgattgaaacactggctaacaacggtaccgtggtattcggcagcagcgacggcactgacgccggtaaatacagccggttacagatttcagatctgaccggttccggcacctttgtgatgaacaccaatattaacggtggtaccggtgatttcctgaatatcagcaacagtatcagcggtgagtttaatgtcagagtaatggattccggtcaggagctgaaaagccgcggcggtgtgaatcctcatcatctgatctttgccaacggcagtgacagcaacagctttgcactggtgaacggcagtgttgacctgggtgcttataaatattacctggtacagggtgatgagcaggacagcgataactggtatttatcaccgaaagcaaccgatccggcaccaaatccggatccagagccgggtcctgatccgaaacctgaaatctccgaaagcgggaaaaacgctatcgcgatggccaacgtgacgccaactatctggaacagcgaattatccacactgagaacccggctgggcgatcttcgtgataaccagacggcacaggatggtgtgtggggcaaatatatcggcagccgtaaccgcatctcaaccagtaatgtcggttacacccaggatatgaacgggctgatgctgggcggcgaccacgcgattgcgctggaaaacggccgccttctggtcgggggaatgttctcctatacccattcagaactggatgcccgcaccagtgacggcaaggtggacagcttaggtcttggtgtctacaccacctggatgcataacagcggttactatgtggatggcgtgctgaaagccaaccatttcagaaccaaaaacagcgcacagtttaatgacggcaaaaccaccgccaaagataacaccaacggcatcggtttctctgtggaaggtggtaaacacatcaccgcaggcagttactttatcgagccttatgtactgggatcttacttccgcggcgaaaaaacagcctaccgttttagcagtgacatgaaagtgaaagcggatgctgcagaatctgttaaaggtgaaatcggtaccaccttcggtaagacgtttgtcactgaaagcggcggtctgattaaaccttatgcccgcctggcggtcagccacgagttcaaaaagaacaatgatgtggtgattaatgacactgaatcattcagcaatgatatgtccggaaccgtcggtaaatacggcgtgggtctgacagcgcagatgaataatcagtggtccgcctatgcagagttcaactatgccaaaggcagccatgtggaaaccccttacagcggcaacctgggtatccgttacagtttctga

SEQ ID NO: 277959 - DNA, 1590 bp, Morganella morganii
atgacccctttgttattcctgttatggctcgcggtaagctcaggtgtcagtcattgggaacatttactgaagtatgtgttgcctgatgcgatactcaataccctgattttattacttggtgtcggcgtactggtcatgcttattggtgcgggttgcgcctggttagtcactgcattcgatttcccgggaaagcggctatttagttgggcattgctgcttcccctcgccatgccaacctacatagtggcatttgcctggcttgatttactgcatcccatcgggccggttcaggaagtcattcgcagcctgttgggctatagcaacccccgtgagttcaggcttccggatcttcgctccatgaccggcgcgattttgttattgggtctggtgttatatccgtatgtttatctcaccatgcgggctatgtttatgagccagccggcgcatttactggaagcagcccgcacacttggtttaagttcaaccggctcatttttccgggtggcgctgccaatggcacgtcccgcactggtggtaggaacaagcttagcattattggaaacactgaatgatattggcgcatccgaattccttggcgtgaatactctgacagtcacagtgtataccacgtgggtgacgcgttctgatttggcggcagcagcgcaaattgcgtgctccatgttgacggtaattattctgttgctggccctggaatattatgggcgcaagaatcagcgttataattccggccggcaaatgcgggggattttaccggcacgattaacgggaattcacgcatgcctggcgactttattgacttctctgcctgttttactgggctttgttgcccctgcactatttctgggttgggaaagtatcaggcgttttagtgatagtatggaaatttctgccagcctcctgcaatcattacaaaactcattattattagcggcaggagttacccttgtggtgacttttgtcagcctgattgtggcgtggtatgcgagatcaagtgcgatttcggggggggctccggaggccagacgtacattgatgaaagttgcctcattgggctatgcggtgccgggaacggtattggccatcgggttattaacaccgggtatgtcgttggataatatactggccgaattgttcaattatcgcggtttaccgctgctctcttcgggggttttattagttatctgttgttctatccgctttatggcgatttcagtcggggcgattgatgccgggttaacccgtattccgccgggcatggaacaggcctcaagattacttggtgaaagtgagtcgggaacctttttccgcgtacatttaccgttattgcgtccggcattagtgacaggtgctttgctggtttttgctgatgtgatgaaagagttaccggctactttattacttcgtccggttaactttgaaacattagcaacatctttgtatgcagaagcggcgagaggtacctatgaggagggggctgttgcagcattactgattgtattggccggaacgctcccggtaatactattagcacgtagtcaattatcttcatccgggccaaaacaacgataa

SEQ ID NO: 277960 - DNA, 1491 bp, Morganella morganii
atgcaactacatgattttggtttcgttaattatgcagtgctgtttggttatttagcagcaatgctactcgttggtgtttatttctctaaacgccagaaaacagcagatgattattttcgtgccgggggacgggttcccggttgggctgccggcgtttctgtctttgcaactacattaagctcaattacctttatgtctattccggcgaaagcttatacctctgattggacttttattattggccaatatttagcgatcgccattttgccattagtattttatttctacatccctttctttagaaaattaaaaatcacctctgcttatgaatatttagaagcccgttttgatatacgaagtcgtttattcgccagcctgtcatttatgttatttcatattggtcgaattgcaattatcacttatttgaccgtactcgcattacgtcctttcatagggatagatccgattatattagttgtactgattagcctgttatgtattatttatacatggatgggagggattgaaggtgttatttggactgatgtcattcagggattattactttcaggtggtgctgttttaatctttatcatgatctgttttaaagttgatggaggaattagtgagatttttaccacaacagcacaagctgataaatttttcccagaagcacagttacgctggagctggactgacagtactattcctgtattaatgattggttttttatttgccaatattcaacaatttactgcaagccaagatgttgtccagcgctacattgtgactgattctatcgaacagactaaacgtactttaatcacaaatgctaaattagttgctgttattcctgttttcttttttgccattggttcagccctgtttgtgtattacaaacaaaatccaggtttgttacctgaaggttttaataccggaggtatcttacccttatttattgttacagaaatgccagtgggtatttccgggctaatcattgcagctatctttgccgctgctcaatcgagcatttccagtagcttaaacagtatttcaagttgctttaattctgatatctatattcgcttaagtaaagttgaacgacgttcagaacaaaaaatgaaagtcgccagattagttataattattgctggagtattcagtagcttagcaacaatttggttggttttatctgacgaatctgaaatatgggatgcttttaacagcttaatcggtttaatgggtggtcctatgaccggactatttatgttaggtatttttgttaaacgtgctaatgcaggtagtgcggtcgcaggcattatagtaagtatcattgctgtattagcagcccgttatggcagtgaccttaactttttcttctatggtgtaattggtgctatgtcagtagttattgttggtacaattactgcgccatttttctccacagcaaaacaaatttcattggatgatagtgaaatatccgggaactaa

SEQ ID NO: 277961 - DNA, 699 bp, Morganella morganii
atggcattaattgaaaaaatgactaaggatattcaacaaaaaggagggctgatcgtttcttgtcagcctgtcgataatagccctatggataagccagaaattgtggcagcaatggcccgggctgctgtaaatgcaggtgccgtagcagtacgaattgaggggatagataatttaaaagcaacccgcccccttattgatgtaccaattatcggtattgtcaaacgtgatttaccggatagtccggtcaggatcacgccttggttaagtgatgcagaagcattagcgacagaaggtgccgatattatcgcttttgatggtacggatcgtgtacgtccagttccaattaatgagttactggcttgcatacaccaccttaataaattagcgatggcagattgctccacatttaatgagggaatgcattgccggaaattaggagcagaatttattggttcaacaatgtcgggctacacaggtggcgaaataccgaaattacctgatttacaattagtcactgcattggctgaaaatgggtgtcgtgtaatagccgaaggccgttataacaccccaataattgcagcaagagccatacaagccggagcctgggctgtcactgttggttccgcattaacccgacttgaacatgtttgtggttggtttactcatgcgctcaagttacagcaggagttagttaaatga

SEQ ID NO: 277962 - DNA, 447 bp, Morganella morganii
atggggctgagttacaatcataagataaataataatataacgttacaaccaggcttaatattcgaaacagttacggacacatcaatttacaaaccttatttaaaggcacaatataattttgataatggtttatatgttgctggtcgttatcgttttgattatgccagaaaaacaaaacaaggtgttgacgacgagaaaacaaatcgctttgatacttttattggttataaatatagtaaatacaaagttgaatatgactatacacaaatgtatagcgatgctataaaatatgataataagaaacgtaattatgaacataatgtctctttttcttaccaattgaatgacacatttactccttatattgaagttggaaatgttgcagtgagaccgaccagtgacgcccgtcaaacccggtatcgcttaggattacaattccacttttaa

SEQ ID NO: 277963 - DNA, 1155 bp, Morganella morganii
atgaaaataataaataaaataccttatctctttttcaccataatactgtcttcaccaatattctcatcgaccagctttgctgataaactccctgaccttcctgtggcattaaaaaatggaaccggagtaattagccaaaacattatttacataggtttaggtagtacaggaaactcatggtataaacttgatcttaatgaaaataaaaaatgggaaaaaatagctgatttcccgggtacgccaagagaccaggctatagcaattaatttaaataatgatatttatatatttggcggagcgggaaaagaaaatattgagagtgaaacaataagctcattaacagatgtttatcgttattcaccaagtgaagacaaatggataaaaataaacaccagctcaccttatggcttggttggtcatgcaggagttagtatcagcaccaataaagccatcattctaggaggagtaaacaagcaaatatttgataaatatttcattgatttaaataatactaaaaacaattcacccatgaaaaataaagttattaatgattactttaacaaacctatagaaagctatttttttaatagagtaatactaacttataatgcagataataatcaatggaattcattaggtactattccttttaatggaactgcgggttcttcattagtaaaagataacaatacaataaccttgattaacggcgaattaaaacccgggttacgtaccagtgaaatacaaacggctctattagaaaataatcaactacagtggaatactactgtacagaaacttcctccaccatcacctgagcagcagcaagatggcttagctggtgcatttgcaggttatagcgctcatactttacttgttgctggtggtactaactttccgggctctcaggctaagtattcacagaaacattattttgcacatcaggatttagataaaaaatggcataaagaaatttatgggttgattgatgatcaatggaaagtaattggtgaactgccgatccctcttggttatggaatcactattgagcatggtaattcactatatttaatcggtggtgaaactacaaaaggtgaggcagttaattctgtaatcactttaacaataaaagataaagatctaattattaactaa

SEQ ID NO: 277964 - DNA, 171 bp, Morganella morganii
atggcacttactgacgctaagattcgggctgcaaaaccgcaagaaaaaccctataaacttgctgattccggcaacatgtttttacttgttcatcccaacggctcacgttactggcgactccgttaccgctttcagggaaaaaaaaacatcggctctgggaatttatcctga

SEQ ID NO: 277965 - DNA, 495 bp, Morganella morganii
atgacaacatttgacaaaatcacccgtttactggattcacgggcggtttcctttgaggtgatcgaacatccggcggaaggccgttctgatgcgataagcaaaatccgggggaataaactgagccaggcggcgaaagcgatggtgttacaggttaccggcagcacaccggacatccgctatgtgctggcgattgtgccgggcgactgcaaagtcaattttaaaaatgccgcgaaactggcgggcgggaagaaagcctcatttgccgcaccggaaacagcacaggcgctgaccggctgcccgatgggtgcggtcccgccgttcagctttaatgacgaactgacgctgtatgttgataagcgtctgaccggtgccggacgggtattttttaatgccggtgaactggtgagatcggtgtctctggcagcggatgactatttcagtgtgatcggtcatgatcgcattgcggatattgcggtacctcccgccgcagaataa

SEQ ID NO: 277966 - DNA, 183 bp, Morganella morganii
atgagaaacattatcggcacctaccgcgcaccgaaaggccattgggtcggcgacggattcccggtcagccagatgttttcctacagcaatcacggcaaacatctgaacccgtttattctgctcgaccgtgccggtcctgcggatttccccgccatcagaaggcgccaaccggggagttggtga

SEQ ID NO: 277967 - DNA, 126 bp, Morganella morganii
atggcactaacagatgtgaaggtaagaacggcaaagcctgccgataaaggatacaaactaactgacggtgaaggaatgcacctttatgtgcatgctaatggttctaaatactggcggttacaataa

SEQ ID NO: 277968 - DNA, 1218 bp, Morganella morganii
atggcaagcgttcttctcactgatagcaagatcagaggattaaaaccgaaagatactgcttattatacatggcaggcatccgccacccgcggtaccggccgacttggcgtgaagacctatccatcagggcgtaaagttttcgtttaccggtatttccgtgaaggtaaaggaaaattcatcacactcggtgattatcctgcgttgacactcgctgaagcaactgaaaaatcccgcgaggcggcggagaatagcgcagcaccggaaagggtcactatagagtatgcgaccgtaaaaaacctctttgatgattatattacagatcagaagcgcagagggaagcgttcatatgaaaaaacacaaaaccgccttaatcaggttcttgagagtaaatttatccgtcctgatatgcaggcccgtgacgttacccctgatctgataaagagagttctcgccgaatttatctcccgcggcgcggtggccggatcaaataaggtacgtgcaaatctgcatgctgtttttaattttggtctgttcgcagataatgatccggcaaaattaaatgagaacgttgtctacggcctggacagaaatcctgtatctgtggtgcctcgccaagagggagctgacatagcactggaccggttcctgtcgtgggatgaaatgaaagatctgctttccatatttaaagtaagtgtcaaagactcgcctatagcacctgattactgccgactgttgttgctctgcgtattcactgccgggcagcgtccgtgggaattgatggcgaacaccaaagataactgggacaagaaaaacagtacgctgacggttccgcctcatatttcaaaaaactcggattatcatgtaataccgttgtcaaaatcagcaacggcggttttacaggctcaggcaaaactctatccggactctgaatttttattcccagcaaaaacacaggaagggcatttgctgccatcggaatatgcaaagcagatcaaaaaattctgtgacaaaggcgagatcgctaagttcaccccgagagatatcaggcgcacatttaaaacactcgccggtgatatggggattagttctgaaatgcgtgacaggctccaaaatcacaaaaagccgggggtatcatcaaagcactatgacaggtacgactatctgaaagaaaagcgcgagataattaacacttgggaaagtaaattaatctcactttaa

SEQ ID NO: 277969 - DNA, 285 bp, Morganella morganii
atgctccgtattgaagttattttcagcagcaaccaaaaagagatgatgcctcccggcacatttgaggcactggaaaaggaaattgaccgaaagttacgggctcagtatcaggatatgaacgttcgtattgcgaggggaaccaatgcgtcgatgtcagtaaccggcgggaaaaatgataaagacaataaaaaaataaaagagatactacaggagatttttgaggacggcagctgggtgcctgaaacagaagacattcctgataatgtcggagattttgatcgataa

SEQ ID NO: 277970 - DNA, 282 bp, Morganella morganii
atgaaaaagacaaaaaaccatgtaagtaccagtgtcggccgtaaaattaaagaaatacgaaagtcaaatggtatatctggcaatgacctcgccaaaaagctggggctgacacaacagcagatatcccgttatgagtcaggtcagtcagtaatgagcatagatactgtcgttatgattgctcatgtgcttcatgtttctgtaaacgagttactgagtgattaccttgcctcagagtacagtgacatcatgcttttaatgagtcatcgtaatacagacaaatag

SEQ ID NO: 277971 - DNA, 498 bp, Morganella morganii
ttgcccttcacacgaggcaagaccattgctcctgcagatagagttgatcggaaagtcacaacgccgcaggacgatgaattaaccaagttaaaagaaggactgaaagcctgcaacgagcacagagaagggaaaataccctttgtcgatattctggatttttccatactgagctgcatgcggatcggggaagtgtgcaaagttctgtggtctgatgtggatgagaaaaaccgcagcgtgctggtaagagacagaaaagatccgcgtaaaaagaccggtaatcacatgtccgttccactgcttggcgatgcctggacgatattacaacgacaactacggacagatgaaagagtgtttccgtataaccctaaatcagtatctacgggttttcagcgggttcgtaatgtattaggtattgaggatttacgctatcacgatttacgccgtgagggtgcaagccggttatttgaagcgggattcagtattgaagaagtagcctaa

SEQ ID NO: 277972 - DNA, 651 bp, Morganella morganii
atgccggaacattacgccgctggcttcctgcggccggaattgtctggcgcagagcagcgccgacactgcgtatccgtgacccgcataaagaggaaaaaaaccgctgcaataaatgaagctctcgggcaatgcagcgcagcacatccggtcttttatgaagatgaagttgatattcaccttaatccaaaaatcggcgcagactggcagttacgcggtcagcaaaaacgggtagtcactccgagacagaatgaaaaatattatctggcgggtgcgttacacagcggaacaggcaaagtcagctatgttggtggtaacagtaaaagttctgtgctgtttattgaactgttgaaacacctgaaagcctgttaccgcagagcaaaaaccatcacgttaattgttgataattatattattcataagagccgtgaaacgctgcgctggcttaaattgaatccgaagttcagggtgatttaccagcctgtttattcaccgtggattaatcacgttgagcggttgtggcaggtgttgcacgatacaataacgcgcaatcatcagtgccggacaatgtggcagttactgaaaaaggtccggcattttatgacaaacgtcagcccgttccccgacggaggacatgggctggcaaaagtgtag

SEQ ID NO: 277973 - DNA, 1323 bp, Morganella morganii
atgaaccaactaattgtcaagaatacacctacattaccagctcttcctgctacagtcttacctgctattgaacaactagtttctacacttggggttccgagaaatgttcttgcaagtgcagaggaaattgaatatgcatggcgagatcttcctagagagctacgggaaattcctgaaaatttaagaggtgagctaattgcgcggatgtgtgttgctgtcagtacagggttattcgacggagcaatgaattacatttggaatgcggcaattttacatctccgcgacaaaataagaatttttggtttgcctgtggttgctcagatactacagaaggattttgaagaaaaacacttgttagagcaacaagacagccgtctattagagctttgtttaaagcttaatattgtcgatgaggatggcttcttctttttagaccaatgccgagatgtcaggaacaatttttctgctgcacatccaactttaggtaaagttaatgatcgggaattcacaacttttttgaatcgttgtgttcgatatgcactagctgactcatcctcacctaagggagtagacataggagcatttatctcaactataaaaggcccacgatttaatgatcaacaatgtgacatttgggttgaaagactttcaagtacacatgatgctcagaggcaaatactcgcatctatggctcatggaatttactgcgatcctaatacacctgagcaggctcgtcttaatgctcttgatatatgccgaggcttgcttccttcttttaatgcatcaatccgctcagagttaatcaacaatcacacagagtatgttgctaaaggctatcaagataaacacgctgcatcactacaattttttgaaaagctttgtttacttaatttgctcaatgaatctgaacaacatcatatttttactagggcgatagtcaggttatgggatgttcataacggaatgaataatttctacaatgaacctgcatttgcggaaaggctgttagaacttactagccaaggtgctgtaccagaaactgctcaggaacaatatgtccaaaccataggctgttgcagggttggtaatggttatggggtatctaatgcagccatcaaatattatgatcaaatgatacgtaatttttcaccaagagaaatatctgtgcttattcactcagcgacccaaaatactaatccgtttgggagacgtgtacaggcaggtggttcatacagagctaacttcaaaactctgcttgggctaattgacccagctagcattcccaatgtagttagaggagcttatgctcaatttatgcgttaa

SEQ ID NO: 277974 - DNA, 1815 bp, Morganella morganii
atgattgatagattagagcttaccaaaaacattcaattctataatttaattataccagaagataattcaaatagaacaataacagacttagaaataaataatattttagaggcttcagatgaaaatatcgaacctaatagtgattatttattagacgagttcagagttgataataggttgattgaaagtaatattccttacaagtattcattgaggatcttcccaacactgaggccagtatattttatcggtgaagttgaggagggagaaaattaccaagataagatctatgcatttatattaattcttgagtttgataatagcatagcaataataaagaaaagttgtgcaaatatttcagataaggttgaacggaactttaatttagtctcaagtaatctattggcaggcacatttaatgattctgaagttttttttcaaaaaatatccacaagaacaatgactaactcagacaaggcaatacgaaatagatcagcagaatcagcagatcttaaaggttcttactctactcatgctgctggcaggtcaataccttactacttgaagctcaggcaaggtgccgtaataaagacaatatctggctcgggaagattagtcgaagcttcacagagggtaaatttcgatgaaattgcggcatggtcttataatcaactttgtctgataaggcaaggtgggggggttaaagattttcttgatttttttgcaaaacagaaagatttaagcgaggttttaggctcaaccgtgccaaatgcattattgattgaagttacttctttatatgagaaattacaatcggaaggttgcataataaaatataaattgcctgatggaacagattatattctaaacgaaatacaagttaatcgactatttcgtaagcttgagagagtttacgagataaaaaatgatctaactattccagttccagttggtaaggctagaattagaaaaaacaacaagacactaaccattgactcagtttttctaaaaaaattaaaagtatcatcaaacactaaagatgtaactttgcaaagttttattttaaaaaacggcttttacagtatcacattcactgatcctcgttatatgtattttatggggaattgttttgaagactcttcaggaatatcggaaataaatagtatattagagatgcttacccctaaagttaatataaaagatgtttcaagtgaaaagggcttgttttttaaaggtatggttaatttctctgagcactcgatgtttgatgtggtagaaaatattcataatggtgacgattacatattttgcgatgacttaggaaacgaatgggcagatcatataacatttaacaaaatggaatcttgtatttgttttattcattcaaaacatggtgatagaagcacatccgcaagtaagcttcatgacgttgttggtcaaggaataaaaaatcttggatatatgtattttagcactggagatttcactgaaaaaataaaaagcaagcttaataaaaattatgttggggtttataaaaacacatcaatatcgacaaaaataaaaagaataagaaaaggtaacacaaggcacataaaaaattatcttgatggactttttaaggatgtgaaattacataggaaatgcattctcagttgctcatttatatctaaaaaagagataaagcgagagtttaataaattacgggaaaaaaaaccggttaaacctcatgtagtccaattgttatggatattgtcatccttttctcatgctgtaaaagaggctaatgcagttccagttatttattgtgacaagtag

SEQ ID NO: 277975 - DNA, 2169 bp, Morganella morganii
atgaataaagtcatatctgtatgcccgtattgtggcgccggttgtaaactgaatctttgtgttgaaaacggaaaaataatcaaagcagaaggtgctgatggtgttaccaaccaggggcagctgtgtctgaaagggttatatggctgggattttcttaatgataacaagttactgacagccagaataaatcagccgatgatccgcagagaaaaaggcgcaccgtttgaagttgtcagctggcgggaggcgattaattataccgctcaccggctgaaacagattaaagaaaagtacggtgcaaaatccattatgtgtacgggctcctcacgcggaaccggcaatgaaaccaactttgtgatgcagaaatttgcccgtgcagtattgggtaacaacaatgtggattgctgtgcccgggtgtgtcacggcccgtcagtggccggattacaggtgacattaggtaacggggcaatgagcaattccatcgcggatattgaacactccggttgcctgctggtattcgggtataactgtgcggattctcatcctattgtcgcccgccgggtgataaaagcaaaagagaacggggcggaaattattgtctgtgacccgagaaaaatagaaacagctaaaattgccacacaataccttcctctgcggaacggtaccaatatggcgctggttaatgcgttcgcctataccttaattgatgaaaatctgtatgacaaaaattatgtcagccggtttacagagggatttgaggagtacaaaaaagccgttcaggattacagccctgaagtggttcaggatattaccggcattccggcctcacaaatccgtcaggcgatgagaacctacgcgcgtgcaaaaaccgcaaccattatgtgggggatgggggtgacacaattcgggcaggcggtggatgttgtcaaaggcctttccggactggcgttattaaccggcaatctgggaaaacccggtgtgggggttgcaccggtcagagggcagaataatgttcagggtgcctgtgatatgggggtactgcctaatatgttccccggctatcagaatgtgacagatgaaaatgtcagacgtaaatttgcgcaggcatgggggatcccgtatgaatcccttgaccctgaggcgggctaccgtattacggaagtcccgcatctggccattgagggaaaggtaaaagcctattacatcatgggggaggatccgctgcagacagaagcggatttacaactcgtccgcaatgggtttgatgccctggaatttgtggtggtgcaggatatctttatgaccaaaacagcggagcaggccgatgttattctgccgtcaaccagctggggtgagcacggcggtatctttacctgcgcggacaggggctttcagcggtttgagaaagccattgaaccacagggaaatgtaaaacgggactgggaaattatcagtctgctggcgacagagatgggatacccgatgtcttatactgacaacaaagagatttgggatgaactcagagaactgtgtccgctgttttatggtgtcacctatgaaaaactggaagggctggcacatattcagtggccgtgcccgtcagaagatcatccggggacaccatacctctatcagaataacgtcttcgataccccgtcaggcaaagggctgctgtttgccgcaccgtggcggaagccggcggaactgccggatgatgaatatccgctgatcctttccactgtccgtgaggtcgggcattattcatgccgttctatgaccggtaactgtaaggcgctggcatctctggctgacgaaccgggatatgtgcagatgcatccggaaaccgcaggaaagctgggaattaaagaccaggatattgtgtgggtggagtcacgcagagggaaagtgatgtcccggtgcagtatcaatgaaacgattaataaaccagcggtttatatgacatatcagtggtggattggtgcctgtaatgaactgacacaggataatctggatccggtatccaaaacaccggaaactaaatactgtgcggcgagagtgatcagaattgataatcagaaagaggccgaagctctcgtcaaagaaaaatatgctatcatgcggaaccggttaatcggtttagttgaaacagcagaaagccagattcaataa

SEQ ID NO: 277976 - DNA, 705 bp, Morganella morganii
atgaaatcatatctgttatttatcgggtattttatcagtgccttttctttcgctgacggtatcagtgcgaatagcacacggtatatttatccgaaaggtgctcacgatattacggcacggataaataatgaatccgccactgcggcatttgttcagtactggcttgacccgggcgattccgaggctctgcccgcgaaattgcctgtcacaccgtttgaactgaccccgccgatttcacgtattaatcccggcgcaaaccagatactgcgtatccgtctgttggataaaagcgccataccggccgacagaggaagtctgtggtggctgaatgttctggatattccgccggtcagtgaaacatcatcgctgaaggaaaaaaattcaggacaactggccgtccgttcacggtttaaagtcttttaccgccctgccggattaagtgacagaaacactgcctcacagcgggtgtcatttcagtccggcagtcattcaatacgggtcaataatacatcgccgtaccacattaccattacggaaatcaccctggcggataaaaaacaaatactgcataaatcctttatgctgcaaccgaaaagcagttcggaaatagctgtaaaaagagcggttaaacgcggtgatcacctgacggtcagtaatatcaatgatcagggcggtaacgtgacctttaccgccacggcagaataa

SEQ ID NO: 277977 - DNA, 945 bp, Morganella morganii
atgcgtgttcttttagcaccaatgcagggggtcttagaccccctcgtccgtcatctgctgacggcggtgaatgactatgatctctgtatcaccgagtttgtccgtgtggtggatatgctgctgccggagaaactgtttttccgtctctgtccggagctggaaaacggcggtctgaccgaatccggtacgccggtgcggatccaactgctggggcagttcccgcaatggctggcggaaaatgccgcacgtgcggcggaactcggctcgcacggggtggatctcaactgcggctgcccgtccaaaacagtgaacggcagcggcggcggggcgatgcttcttaaagacccggagctgatttatcagggcaccaaagctatccgtgaagcggtaccggcacatctgccggtgtcggtgaaagtgcggctcggctggagcagcaatgcgcaccagtttgaaatcgccgatgcggtggcacaaggcggagcaaccgagatcacagtgcacgggcgcaccaaagaagcaggctatcgtgcggatctgattgactggccggcgatcgcggctatccgtcagcggctctccattccggtgattgccaacggcgaagtccgtgactggcagagtgcgcagcaatgcctggctgtgaccggctgtgatgcggtgatgctcgggcgcggggcgctcaatgtgccgaacctgagctgtgtggttaaatataacgcgccctttatgccgtggccggaagtggtggctttgttgtaccgctacacgcagctggaaaagcagggtgataccgggctgtaccatgtggcacgtatcaaacagtggttcagctatctgcacaaagcctatccgcaggaagcggatgagctttttgctgtgatccgcccgctgaaggattctgcctctatagcacaggcgattgcccgggctcagggtgcataa

SEQ ID NO: 277978 - DNA, 1746 bp, Morganella morganii
atgatcaacaatcaacaacctgacggcgcacgtcttattcaggcactgacagatattgtcagtcacaaacacattttaacagagccgcgtaagacggagcgataccgcaaaggcttccgttccggagaaggcagcgcgctggcggtggtgttcccgggcacgctgtatgaactatggcaggtgtttaaagccgctgttgaagctgacagaattgtgatcatgcaggcggccaataccggtctgaccgaaggctccaccccgagcggggatgattatgaccgcgaaattatcattatcagcacattgcgtctggataaaattcaggtactgacaaaacagcagcaggtggtggcactgccgggcagcactctgtggcatctggaaaaagtactgaaaccgctgggccgtgagccgcattcagtgatcggttcttcctgtatcggggcatcggtggtcggcgggatttgtaataactccggcggttctctggtgcagcgcggtcccgcttataccgaactggcgctgtacggccgcgttaatgcggacggcagcgcagaactggttaaccatctggggattgatttaggatccacgccggaagaaattctgaattgtctggaataccggcagtatcaggatgcggatattgaggacacggataaaccggcctctgaccatgattatcatcagcgtatccgtgatgtggatgcggacaccccgtcccgtttcaacgccgacgaacgccgcctgtttgaagcctccggctgtgccggtaagctggtggtgtttgcagtgcgccttgataccttcccgtctcagggagagaacaaagttttctatatcggcaccaatacgccttctgtgctggaagatatccgccgtcatattctcgcggagtttgagcatctgccggtggccggtgaatatatgcaccgcgaatgttatgacatcgcaaaagtctacggcaaagacagcttcctgatgattgataaactcggcactgaaaaaatgccgaagctgttcacaatcaaagggcggatggatgctgttttcaataaaatcccgctgctgccaaaaaacctgattgaccgcacaatgcagttattcagtcatctgtggccgaaccatctgccgcgccggatggaagagtaccgcgataaatatgagcatcacctgatgctgaaaatggccggagaggggattgatgaagcccgtaactggctgagcagtttctttgacaatgcagagggtgctttctttgagtgtgatgccaaagagggggcggatgctttcctgcaccgctttgtggccgccggtgccgccatccgctatcacgcggtcaacagcagcaaagtggaggatatcctcgcactggatattgcactgcgccgtaatgatcaggcgtggctggaagtcctgccgccggaaattgagagcaaactggtgcataaactctactacggacattttttatgccacgttttccatcaggactatattgtgaagaaaggcgtggatccgcatgcgctgaaagaggaaatgctggaaatcctgaacacgcgcggggcggaatatccggcagagcataatgtcggccatctgtataaagcgaaacctcagctgaaagccttctataaagccaccgatccgaccaacaccctgaacccggggctgggcaaaaccagtaaattaaaatattggggggaagggcacgaaggatgtggctgcggaaagtataatcagtaa

SEQ ID NO: 277979 - DNA, 804 bp, Morganella morganii
atgaatgatgtgtcattatccatagcaagaagtatgtttcatcttcagatttatgaatctgacggacaacgttttgaagacttattttctaaaataatgaactataaatccccagattttcaacagataaagccttatgggaatattggagacaggaagaatgatggttttatcaaaaatgagaacacctattatcaagtgtatgcaccagaggatgtttctaaaaatatttcaacagcagtccgaaaaataagaagtgactttaatgggttgatggaacactggttttatttgtacccaattaagaagttttactttgtcttaaatgataaatataaaggttcgcccccacagttacatcaagaaataatggcattgaaaaatgatttcaacctagaagatacaggtattttagtagcaaaagatcttgagttcgacctttttaacttgcggaatgatataattctttcagtggttggccacgttcctcatattgataatgaagaatacatgtttgtatctggttttacttgctttatctctgcttggattaatttcgaaaaaactgcacgaaataaggtttttctaattaatccaaaatgtcgaaggctggctattaaagggataataacgattctaaagaattcggaaataatttcagactgggaattttcttttattatggatgtttctcatcgaaggaaccttattgtacatggagactctatggcaatacctaagaagagtgaaattgatgctttaatcatcattactgagaaaatacaattttccagctgctgctga

SEQ ID NO: 277980 - DNA, 1023 bp, Morganella morganii
atgtctaatattaatttattcgatgatgtagtgcctttagaaaaacaacatccaatatatataatgatgaaagcagaacgctacaaaccggagagagaagtaattaaccaatgggcaaaaggatttcaagaccgagataataaatttgctaaagaatttcaaacaagttttgagccttgcctatgggagttatatctttttgcttatctgaaggaattgggtttaaggagcgacttttcatacgacgcacctgactttgtcatcaatgatccagaattttgcattgaggcaaccattgcacttcctgcgcaaggagatgtcggagcgcatggtttcagtatggaagatatgccgagagattttaataaatttaattctgaggcatctattcgacttagtaatagctttatatcaaaggttaaaaaattaagatcgagatattctctgcttcctcaatgtaaagaaaaaccttttgtaatcgccatagcttcattcgacagaccttttgcacactttgcggcagctaggcctataattgctacattatatggtctataccatgatgaagaagcaactattgaatcagggtcaaagagtataatttcttataacgttgatgctgtgaaaaaaaaagaaaatgttaatatagatatggggttattctgcacacctgaatattcggatgtaagtgctgtgatttatagtagtttagctacttgggggaaagtaagggcccttgcagacaatccttcagctctaacgatttatacgtcatttactccaaaggaaaactcattatatcctaacgttcatcaagccataaaaagtgactatgaagaacatctagcggatgggttatatattttacacaacccatttgcaaagcatccattacctaaagagacgctaagtcatcctagaatagcgcaaggctatgttgaaccagatggatatgttaattttatagcgccagatgattttcttttattgcgttttttacaatcgttaaatcctaaaaagtag

SEQ ID NO: 277981 - DNA, 1224 bp, Morganella morganii
atgaaacgtacatttattatggtgctggattcattcggtatcggcgcagcacatgatgccgctgatttcggcgacaccggcgctgacacgttaggtcatatcgcacaggcctgtgcccgcggtgaagcagataaaggccgtaaaggcccgctgcatctgcctaatctgtcccgtctggggctgggtaaagcagctgaggaatccaccggacacttcccggaaggtctggataagaatgcggaaattatcggcgcatacggctatgccggggaattatcttccggtaaagataccccgtccggccactgggaaattgccggggtgccggttctgtttgactggggctatttcagcgatcatgaaaacagcttcccgcaggaattactggatatcctcgttaaacgcgccaatctgccgggatacctcggcaactgccactcatccggtactgtgattctggatcagctcggcgaagagcatatgaaaaccggcaaaccgattttctatacctctgcggattccgttttccagattgcctgtcacgaagaaacgtatggcctggaaaaactgtatgagctgtgcgaaattgcccgcgaagaactgaccaaaggcggttacaacatcggccgtgtgattgcgcgtccgtttaccggtgaaaaagccggttcatttgaacgtaccggtaaccgtcacgactacgcggtcgagccgccgtcagcgaccatgctgcagaagctggtggaagagaagcagggcgaagtggtatctatcggtaaaatcgcggatatttatgcccatgtcggtatcaccaaaaaagtgaaagcgaccggtattgatgcgctgtttgatgcatcactggaagagatgaaactggcgggtgataacaccatcgtgtttaccaacttcgttgatttcgattcctcgtacggtcaccgccgtgatgtggctggttatgctgctgcgctggagctgtttgaccgccgtctgccggaaatgctgaagctggtgaaagaggacgatattctgatcctgaccgcagaccacggttgtgacccgacctggccgggtaccgatcacacccgcgaacatatccctgtgctggtgtacgggccgaaagtcaaaccgggctctctgggttaccgtgaaaccttcgcggacatcgggcagactgttgcatcctattttaatttatccccgatggattacggcaaaaacatgctgtaa

SEQ ID NO: 277982 - DNA, 1263 bp, Morganella morganii
atgaccgatttttcctatctgaaacaagccattaaacaggcgggtgtcacactccagcaactggcggatcagtgcggggtgaccaaagggtatctcagccagctgattaacaacaaaatcaaaagtcccggcggccagaagctggccgggctgcacagtgcgctggggctcgattacccgctgaagcagaaaattaccggggtggtgttcgggaaattttacccgctgcacaccggccatatttatctgatccagcgggcgtgcagccaggtggatgagctgcatgtgatcctctgtcacgacgaaccgcgtgataaggcgttgtttatcaacagttcgatgtctcagcagccgaccgtcagtgatcgcctgcgctggcttctgcaaacctttaagtatcagaaaaatatccgcattcactcatttgatgagcacgcttatgatccgtatccgcacggctgggaacactggagtcagggtgtgtgtcagtttatgcgggaaaaagggatcacgccggattttatctattcaggcgaaaaagcggatgtgccgcgttaccgtgaatcgttcggcattgaaacagtgcttatcgacccggaacgtacctttatgaatatcagcgggcggcagatccgtcaggcgccgttccgctactgggactacattccgacagaggttaaacccttctttgtgcgcactgtggcggtgctcggcggggagtccagcggtaaatccaccctcgtcaataagctggcaaatatgtttaataccaccagtgcctgggaatacggacgcgattatgtgttttcccacctgggcggtgatgaaatggcgctgcaatattccgactatgacaaaatcgcactgggacatgctcagtatattgattttgcagtgaaatatgccaataaagttgcatttgtggatacggattttgtcacgacccaggctttctgcaaacggtatgagggtaaagagcacccgtttgtgcaggcactgattgcggagtaccgctttgacctggtgatcctgctggaaaataacacgccgtgggtggctgacggactgcgcagcctcggcagtgacaatgatcgcaaagcgtttcaggatctgctgatcgatatgctgcgggaaaacggcattaagtttgtccatgtgacatcggcggattacgacacccgttttctcgagtgcgtcgagctggttcagcgtctgctgatgctggatacccctgaaattcgtgacggggatcagcaaaaataa

SEQ ID NO: 277983 - DNA, 1254 bp, Morganella morganii
atggcattaaccgatacgaaagttcgtgcagctaaaccagacgaaaaagcttatacgctgacagacagtgatggcttgtttctctatgttcaccctaatggctccaaatattggcgttttcgttttcgctttggcggcaaacaacatttaatggcttttggtgtataccctgagatctccttagctgatgccagagagagaagggattcagccagaaaacaggttgctttaggcatcgaccctcgcgagcataagaaagagttaaaggaagaacaactgaaggagtttaatacctttgagaagattgcccgtgattggcacgcgacgaataagaagtggtcggaagggcatagccatcgagttctcaaaagccttgaggacaatatctttgatgctattggtaaacgtaatattgccgaattgaaaacccgagacctgttagaacccattaaagccgtagagatgtctggacgtcttgaagttgctgcacgtttacagcaacgtgtgacagcgattatgcggtatgcagtacaaagcggattaattgactataaccctgcgcaggatatggctggtgctatatcagctggaaagcgcatacatcgcccagcccttgaacttaataggctaccagagtttttgcaaaggatagaaaattattctggcagactactgactaaactggccgttaaactgacattattagtttttatccgttccagtgaacttcgttttgcaagatgggaagaaattgatttcactaatgcaatgtggacgatcccagcagagcggcaaccaattgaaggtgttaaattttcttatcgtggatctaaaatgcgtactccccatttggttccactgagtgaacaagctataaatatattaaagcagatccaacagttaagtggcgatcatgaattaatctttatcggtgaccacaatccccgaaagccaatgagtgaaaacacggttaataatgcactacgtgctatgggttatgacacaaaaactgaagtttgtgggcatggtttcaggacaatggcatgcagttcattaatcgaatcaggaatatggtcaaaagatgcagtagaaagacagatgagccatcaggaacgaaattctgttcgtgctgcttacattcataaagcggaacatctggaagaaagacgattgatggtgcagtggtgggctgactatttagatgtaaacagggaaaaatggatatcaccattcaattataggaagcgcggttaa

SEQ ID NO: 277984 - DNA, 174 bp, Morganella morganii
atgtccgtttattttgtgatttctgtactgattatttttctgattatcctgctgattatattaattattaccaacaaaattgtgatcagccggaagaaaatagtttatctgtcactgattgcgctgtttagagtactatatgcgcctgcagcagtgggccaccgaaaatattaa

SEQ ID NO: 277985 - DNA, 225 bp, Morganella morganii
atgcacaatatcgccaacctgcctcaagacgaaaaagacaaaattaatgccgatttagccgcatccggtatcgcgtacaaagaaagactcggactgccgtatgatctgtacgaaacagaaagccaacagccagagcatttacggccgtacttcagggagagactggagcactacagggagatcgggaaaaggtttccgcgcgggttcgagtatgaaaaggagtga

SEQ ID NO: 277986 - DNA, 1425 bp, Morganella morganii
atgcaattcgcaaaaaactgtaaaacatcagctattatcttatgtatgtatatgataccaatttttatatttggaacatactacagagatgataacggaagagttgtatctcaatattttggatgggatgaggacggtcgcccgctaacaaacatcataattaaatttttaaattttggaggcagacttacagatttagcgccgatgtcgcaaatactttctatcgtaatatcagcaataacatgcggcatcatttgctcttttgtcattaaaaacaatagattatcagtagtgatatctactacattcctattcttaagtccattttatttacaaaatattatatataggttcgacgttgtaacaatggcaatatcaattctatttgccgccataccatttttatttatcaagatacagaatatatatgcacacatgctgatatcattcatatcggtgatatgtttactatcaacataccaagcatcacttccggttttttactctctgctgctactttcgtttgtatttaatggtgatgttaaaataaacatatgcagagcattatctggcgcggcatctttatttgtatattacttcataatatcaccaatgtatgttggcggtgaatatgcaaaatacagagcagaatcaatagatacaaaatcagaaagtgtcataaattcggtgatacttaacttttcaaatctatttgataatttgcatgttattataaattacaagttttttgttatattctctatggtgctagcagcactattaattaaatcaacatactatttaatcaacaacaaaaataatttaaaaggatttattttattttcgtttttcttattagcatttatgttttcatttggcatattctttttattgaagaaaccagtctatgaaccaagggtaatgattggaataaatgccatcataatgatgataagtattgcagcggtgagcggttgggatagaagactgtgcaatgtttatagtattatatctatcatcccaccattattattctttttctctatggcaacaaattatataaatgcaagtaatgcatatgttaaatatgaagaagacaccatccgctcgatgtactatgactataaaagattagatatgtcaggagtagcatacattgatggttacctattacctccatacataacagagcagatcttaaatgaaaaaccatttttgaggaatattgttggaagccgtattggtggtctaacatcatatctcagtaaatcagactttcctttatttaatttttcagccagtgataagtcaatcgacagcattgtttcatgtggtgaaatattatcaccgtataatggcgtatacacaacaatcaggattgatgataaaaattatttttcattaaaggaagtaaattgtaaataa

SEQ ID NO: 277987 - DNA, 1968 bp, Morganella morganii
atggctactatccctactcaaaatgcagtaccgagtgaagcaccgcgcgacctgaaatttaactcaggcaaaattgacgagttcgtgacatcgctggaacacgaatataaagaccggtttggccgctgccatatgactatcgaaggcatgaagtggatgttcgaccagcttgttttgcgattcaaagtcgatatgaatcaggcaataatttcagctggttacatcaccgttgatagtttccagcagggtgcgcaactgccagacaatgagatcacccagcgtaatcagattctgcgtgatgaaaccaccggtgaatattatcgctgggatggtgatttgcctaaggttgttccggctggctcaactcccgaatcaacaggtggtatcggtaaaggggcgtggattgatatcggcggagctaacctgagaactgatttgaaagcggataacggattcacctttgttggtggcctgactgaaaactaccttcgcgtgttcgataatgtcgctgaaatggtagcggaaacatcactgccacttggggcaacggttaaaacacgcggatattacacgatcaatgatggtggggaggctgagtatacagtaaccaacgttgcggctaatggcatcattgatattgcattgagcaatgggttaacggcgtctatgttaacctacggggatgttgatatcagaactgttggcgctgtacgtgatactgatattggcagcattcttgtatcaatgcaggatatttccagaatcaagacagtagttattcctggctattcatttgactgtaacaaaaaaataaatgtcaaaaagaattttctgtttaaatctggcgctcagataatcaatagaacattacgtgatgatatgtttgtatttgaaacggataatctattttttaaatctgaaaaaataggtggtggtcgcattgcagtagatactccgttgaaagcatggaatcataacgtcgccctggtattgggtaaaaacaatcttcgtaatttgaatattgatggtgtcagattaattccaaattattcagacagaagtggaacagctctaaaaattcgctgcaataacgtcatggatggaaccaatgaccctgccagaaagcaaaactcaatctgttggtgtcattttgataaccttaatcttgaagaaggtgagtatactctcgtcattgaggtttatgagccaacagatgattttgaatatgaagttgtaaccaactggattacggcatgtacatttaagaaccttgtgttgaaaggaaactatgggccaattttaaactgcataccaaaaatacaaggtaaatacgcttatcatactcaaattgcaaatttagaaatagattacgttcaacaatggactgatacaagtatatgggctcttatgatagatggggcaggtgctaataatatcacttcatacatttgggactattcatattacggaaatcaaggtcagtaccttgtcgacgttaagggggcggatgggcgagataacagaattgagacaaatctaaaaccgtcagaaataaatttcaatggtttcagtaatatctacatacccaaaaatacagctcaagaagttaacgcggtaggattaaggaggttatgtcatatctttaaaaaagacgggtcatttataattaatagatcatattacttgcctatgggtattaagtcggtaatggttagcgaaagtgactcgtttgcattagttgttgaatatgaaaagggtattggttcttgggctccatatatatttacgcagtcttataaccagtcaaatgggtttaaatatacgctaataccgttttataatcagtctccatcatcatcaggaaaagcatttttctatataataaacaactcatcacaggagcttgtcaggccatctgacatgcctaatgggtgtgagtttgggatagagataatatgtactcagtaa

SEQ ID NO: 277988 - DNA, 2472 bp, Morganella morganii
atgccggtaattgaaattcagcgcctgccgggaacgccaaaagagagagtcgaagtaaaatccggctctcttttttttgactggctgaaagaacagagcatcagtagtgacgttgtgatcatggtcaatggtgtgcagctggctgacagcgacaaccttgattttgttgtcactgaattgcatcacattcaggtatttgaccagccgaaaggtggcgcaattggaagcctgttgagcccgatattcaaactggtgtcgaaggtgttctcttttctggccccgaaaacgccgtcattcacatccgcagacgcgaacgttaaagacagcccgaataaccggctcacagggcaaactaacgttgccagaacataccaggcacgaccggaaattcacggacaggtgagggcatatcctgatctgattcagcaatcactgtttgagtacatcgacaacaagaagaaggtcacagagtggatgaatttcggtatcgggaaatttgatatcgaaaacgtgaaatactcggaatcagaattaaccgcactggatggtgccagttatcagatatttcagcccggtgaaaatatccctgagatatttgaggggtttgaatttcacgatgttgacgggcaggaagtgccgggaccaaatgaaagtgatgaaataccgcagtatcaggcaacggcgaatgaggttatttccggtgagataaagggcggcgaggcgatgattaaaatcgccaggcaagatgagttcgattatttctatgacatcatcaaaccacgctcagtatccatgaccgtgagtgtttcgtacagcacaccaaccggtaacgtgacaaaagacatcaaagttgatgcttatctatctgaggcgaaaaaaacagatgacggatcaatcgtgttgccgaaaaagtattacgagttcttcttcaccagcctttccggtaatgaccttgccgcactgccgccgaatgctgttgttaataccacgaagttcattctctatgataaccagtatttgacagtcgggccgttcttctcaccaatggaaggcgggcaactgtggatccatataaacgcccagcttggcgagaatgattacgcgaatgccagaatggaattctggaaggtaaacgacgacaacgaggaaattccaggcaccagggaatcatataaccgtggattcccggcagcaccaaagacaaaaaactattacaaaacggagaaattcacaccacaaggtgggtacggtcgatatgcattccagttaaccagactggaaaacagtaatgaccacagcatcctgaaactggagaaggcccacatcatccgccgcaggctcaatgagaagcataatgacgatactcttgtccgtgtgaccgtaagggcgacagagaacccgacaagctcgcgtgagcgcaaatataacgcgctggtgactcggcatgtgatcagttatgacatggtcagccgtaaagtgggttacacagaacggccgtcacgctcatttgctgatgccgtggcacatacgtggctggttaccggcaagcagccggagaacactatcgacctgcacggactgtatgagatttacgcagggctgtctgacaagcgcctcgggtacttcgattacacatttgatgatgaggatgtatcgctcggccagcgcatcgagacaatctgcaacgtggcgcgggtgacagcattctttgacaacggcgtgctgacattctcccgggaggaagaacgaaaatatccggcagcggtgtttaaccggtcaaatatcaccggcaataactttcgtatctcatacgatatgtcgctgccgggcgggaatgacggcgttgaggttgaatacgttaacccgcgaaccaacaaaaaaacctatctgaagtaccgtatcgaaaacggtgcagtggtgaaaggagcagcaaaaagtccgaacaaaatcaccctgcacggatgccgtaacgagtatcaggccactgaccgtgcattactggaaatggacagactgatcagccagaggacaagcatcagcctgcaaacactggcagacggtgactatgtttatcccggcgatatggtactggtggcagacagctacgacagcaatcagcagggcggacacatcaccggcagagccggcaatgtattcagcacaagtgagcgtattgagttttccggcgacatggtggtgagcatcaccgatcacctcggaaacacatccggagaatatccggcgcgggcgcgaactgatacggataagggctttattgccgatatccctgatatccagctcaatatctatgacggtcataatgttcagtcgccgtcacgatacatcatatcaaccgtcactgaaatggatgccatgcgctgggtagtctccgacaagaaaccggacgcagacggcacattctctatcaccgcaagtgagtatttcgcaccgaaagcagactataacgtctga

SEQ ID NO: 277989 - DNA, 393 bp, Morganella morganii
atgacgacagacgaatttacagacaggatgatcggggtgccgtgggttaaccgggcatgttcgtttactgcgtgtgactgctgggggctggtaacgctctattaccggcacgttgttggtgctgaaattcatcacgacagcggttatgaatcagacagtgattttatgacctgttatcaaaatgaggtgaatttctggaagccggaagaacatccggtaagtggcgggatatttgtggcctatgacggttcagtgccggttcatgtcggcgttgtgctcggcggaatggttctgcacagccgtggtgataacggacacgtccgtctggacagattgctgaccattcagcggatttacagcaaagtggagtttatgacttatgccggtaattga

SEQ ID NO: 277990 - DNA, 471 bp, Morganella morganii
atgccgacattgcgtgagttccgcgcacaacgaccaaaccgcatcctgtacgaaacacttcagctatcacacccgtcattcggcgacatttacctgatcactcaccagattttcccgaagatactcggcggaattgaatacctgccgtgtaactttgagatgtcggagagtcagcagagtaaaacgccgatcatcgacgcaagcgtgaaatttagccgtgtggcgcatgagtttaagcagaaactgaaagcatggcggtcatattcacggatggtgccggtcgaggtgacgtaccggctttttgatgaggcagacaaaggcacagcaatcgtgcgctggaagctgtttgcaaaggatgtatcactggacgcggaagcggtatcaatgacactttcgatgaccaatccgctgaacaagaatgtcggacgaatttatgagccgcaggagtggccggggctggaggctgtatga

SEQ ID NO: 277991 - DNA, 477 bp, Morganella morganii
atgattatcgactatcctgactggcttcctctggcgcagaagtcagacaaaaacatgaccatcgacaccggttacatgacagatcagccacaggtcggcgcgccgatattccagaaactgactgatgacctgaaaacggtctggaatgtcacctggatattcacgctggtacaggagcgggcgtttgctcagtggctgcgccatcctgattatctggataactgtaaccggtggttccggatgaaaatcgacatcggcggcagcggattacaggaacaggaattgcactttgtgtcatacccggtgcagaccagcgttaacggcgcatcagttacatggaccggtcaggttatctgtaaaaacttgcataacgatgatgatgaattcggtgatgtgattatcgagttcccgccgccgttcggcagttggctggatgttattgtcactgaaacactgccacggtgtaaggagggataa

SEQ ID NO: 277992 - DNA, 3462 bp, Morganella morganii
atggcaaacgtcggtgaaatcgtatatcaggtgcagatggatgttgctcagttgctgacatcacaacgtcaactggatcagcggctgcggaatatggagggcggatttaaccgcacaacgaccgccgtcaatggcactgagcgatcaatgtcctcactgtcgcgggttgctgcgtcactgtctgcgtatttatctgcttctgctgttgccagctacgccgaagcctggacggttctcaacaacaagctatcgaactctgtccgtgccagcgaatcgttagttgaagtgactgaacgtgtattcaatatctctcaggacacccggtcaagtcttgacgccacagcgacattgtacgcccgacttgagcgcggaacacgacagtacaacacatcagcggaagatctggcgaaactgacaaccattattaaccagggcttcattgtttccggcgccaccgctcaggaagctgaaaatgccatcattcagttatcgcagggtattgcgtccggcgttctgcgcggtgaggaatttaactcagtttctgaacagggaagtcggttgatggtcgctctagctgattcaatgggggtcagcatcggtcagttacgcgcaatggccgcagaaggaaagctgaccactgacgtggtagttaacggacttttgtcgcagggcgcagccattggcgaggaattttcgaaaactactcagaccatgtctcaggcattacaggaggctggtaataacatcactaagtttttcggtaactcatcgacagttcagtcgttcatcggcgggtttaatgactcagtggtgatggtaagtgaaaaccttgattacctgacaaatattctggttattgccgccggggttattggttcaaggtacgccggtgcactggctctggctggtgctgcgcaagttaaaaaagctcgcgacacaatggctagtgcgtccgcatcaagacaggcggcagtagctgaacgtgacgcggcagctgtgcttgttagaaaaacagtggcagacagagacgcggcaatgtcagcgctaaatcttgccagggcagaatatcaggtcgccagagggtcggcggcagaggccacagcgctggctaacgttacaaggttgaagacggcgtacagcaatgcagccatcattgcagcgcaggctaacaatacactgagcgcatctcaggctagggtggccgctactggtttgacgatggctaatgcactgaaagccatgaactggttgcttgcaccgataggtggaccggcaggtgccgccatgttggcaggtgctgcggtttattactttttccagaaaacggaagaggccagacaggaggcatcaaagtttgctgatgagcttgagggactgacggaaaaaatgcagagcatgaaccgcgtccagcttgagggaatgatagcgaaagccacccagcatatgtctactcaaaaagatgaaattaaagagcttggcagcgaaatagacagcctgaatgagaggtacaaaaaagcaggtgaaaggaactacagccttgccggggcggaaagtgacagagccaaaatactcaatgaaataaagataaagcaggctgaattagatacaaaaacaactgagtattcgcgcacattaaactcaacaggactgatgcaggctaaactcaacggtgagttactgcaaggcgctgatcttctcaaggctcaatcaggctctgtgttgccgaatgccagtgcagcacttaaagcgtacgggttaaatcttgaagacgccacaagggcaaagcagagatttaacgcaacatcattgactgttgagcgcagtcaggatggtgataagttactggaaaatcttcgcaagcaaaatgagctcctggcaataacagatgatcgtcagagggctatcgccaccgcaaagcagaaagctgaagaagcaggagtcaaggctgactcgactcaaatgcagcaaatagagaatgaagcagccagaagttatgatcttgctgatgccaaaaaggaaacagttcgtacatcgaaagcagtagccagcgcagcagcaaaagaagccacagaagccgaaaagctcaaacagaagataactgacctggctaatgcgacgaaggttgcagagttggaaactaaagggctttcccgtgaggcagcaatccttgaggcagtgcagaagcttgggtcaaaggctaatgcagcacagatagccgaaataactgaacttgccggcaaggagtacgacctcactcagaagataaaagaccggaaagatgcctttgagcagaatcctagggtgaaagccgatcaggatatgaaactggctcaggagcaacttgagcgacaactgaaaggtaagttggtgaccgaagagcaatatcagcaacgcagggcggcgatacacgcggagtattcgcgcaaaatatcagaagaaacatcaaatggccaggtgaatattgtcgctgagaatcgggcaaaaattgacccaattcaggcactggctaacgaaaatgctcagaagctggcactgatggaatcgtactatcaggcagaacaggcattgttgaagaagtcgcagcaggacgggcaaatcagccatgagcagtacgtagccgcaaaacaagctacggacgcacagtatctggcgctgaaaactgcacaggataaacagtatcaggagcagcagcttgccgcgcagtgggagttactgagtcagcaaagcctgggctatgacatgctcacatcggcggttgattctctctcagggaatgcgtccaacgctatcaccggcctgatcacacaaaccatgagctggagtgacgctgcgcggtcgctgggtaacaccatgcttaacagcgtggtcaactccattgttcaggttggcgtggagatggctaaaaacttcatcctcggccagacattaggcgttgccactcaggcggcaaatgcatcagcagctgttgctggcggcgctgcggcattagctgcatggactccggcggctattgcggcatctatcgcaacaatgggggcggcatctgcaagcggtctcggtgcgtatactgcggcacaggcgactggcgcagcaaccagtatcgggatgaaagcactgacgattgccggagcgcgtaaagatggtggccctgtatctgctggtgaaatgtaccgggttggtgagggcggaaagccggagatattcaaagcgtcaaacggcaaccagtacatgatcccgggcgataacggcaaggttatcagtaaccgtgatattggcggcggacaggtgccggtgacggtgaatatcaatgactattcatccggcggcagcaggattgatgctcaggccagacaggacagtaacggcatgaccatagatgtgtttatcgctgacatggacaacaaagggccgatgcatagcgccatcacacgaaacacaacagcatctgcgagggtgagatga

SEQ ID NO: 277993 - DNA, 693 bp, Morganella morganii
atgacaccgcgtttagaatacggcgagatggtgatatccactgccgaaaatgattacctgtttcgcccgtcactggatgccatgacgcgaatcggtgagcctaaagagatcgtgagtgcgtttacgcgattaaatggctcagaggtacaacaaattatagcgtctgccgtagacgcttacggagtggttcctgaatggctgattgcactgttaaataaaccggtttatgggcgcagcattttatcgacagcaatggacgtgatgcaggcatgttgtaacgatgactgttctgaggttatcggtgaatggcgggttggaaaatccggcatggtgtaccggttcggcgctatgcattatcgcgatatcatcctgctggcgcgcgagctaatgacccacggcattatcggcaaggccaaggtgcgcaaactccagcgcaacgaaggtaaagacgaatactccgacgagttccgcgccgtcgattacatcagtgccgcccgtgtgcatttcaacatcacccgcagcgaagcggaacaactcacaatgactgagttcgtgatgatgctgaaggcgaaatatcccgatgagaaaggtttcacgaaagatgagtatgaggccatcaccaaagccgatgatgcacgcaacgatgacctgattaagggcaagcgtcggctggtgagcaggaagaagatttaa

SEQ ID NO: 277994 - DNA, 756 bp, Morganella morganii
atggcacaatgccctgatgataaaggcctggtgatgggtaatgcggggattctccgcatcgcgcccggttgccccggtacggttcctgaacagtccgcgtttctgcgtctcggcgcactgaccagtaaagggctggattacggtactgaaacagttacttccaaagcagacgacacaaaagggctgaccgaggccatcgtgaccggtctggacttgaccattaagtttgatggtgagctgaagcgcaaaggtgctgatggttccacgtctgcttttgatatcgccaaagaaatccttgctgaagtcaaggccagccgtcagccgtcatattgggtgcagctcgacatgaaaggcgacggcagtgatgtgattcagggttacatgaacttcacatcatggtctatggagttcccgaccaaagagatcgccacgtattccggtgagttgaaagtcgcagacgctgacagctttgagtggctgcaggaagaaatcgtggtgcagagcgtcactgccaaccctgcgacactgactgtgaaagccggtgaaactgcaacattcacggttggatttaatccggttgacgcgacaaacaaaaattacgaggtggtcagcgataagcctaattttgctaccgtcagtaaattgttgaatgttgtcaccgtcaccggtgttgccgctggcgccgcgaatatcactgtcacatcggaagatggcggtaagacggcgaaatgtgtcgttacagtcactgcggcctaa

SEQ ID NO: 277995 - DNA, 369 bp, Morganella morganii
atgatacacgaagcgtttgagcgttatctgaaccgcgtcggcctgctggatgacttcactgttcagtacctgacgtggacagaagagccggagtcacgcacacagcaatatgccgttattcagcctgacggcggcagcggcaggttttctgaccttggcgcagatgacaatgtaatgctgattctggtgtccgcacagaatgatccggagccggtgttaaccagggcgaaagacattctcagtttcgtatccgagtttccggacgattgcgaactcaactcagtttacaaccttggcggcatgcctaagccggtaccgacagaagaaggccggttcatcatgcaattggctttccgctgcacatcctga

SEQ ID NO: 277996 - DNA, 369 bp, Morganella morganii
atggcagcgaaaatcagaggtatcgcagaggtcagcgccaatatcaatgcactggtcggcaatatcacagggcgcaaagttacacgcgcaatacaggcagcaatgctgattggtggcgctcaggccacgctgttcacgcctatcgacacatcaacacttatcaactctcagttccgtgaaatcacagtaaacggcacccgcgttaccggtcgtgtcgggtattctgccaactacgcggtatttgttcatgacccgaaagttaagcagacattccggcgtgccactgcgcgaaaagagttcctcacgctgggatttgaagagagtcgcgatgagattgaagcagccatgcatcaggagatgcgcatatga

SEQ ID NO: 277997 - DNA, 342 bp, Morganella morganii
atgagttcagttgctaattgggcgtatacctcatgggctacgttgtggcggcttgccggaaaggacagatacggtaagcccgaattttcggagccggttcatttcctgtgtggctatggtagtgagcttaagggcggaaagattgatatcggctctgaaatcactatcaaactggtattctggactgagtatgctgatgcgaagaaaggtgactttattgctatcggcaagcactcaggtgatccggtatctgccggtgctgacgaaatcaaattcatcaagcgtgatgaggacgtattcgagcatatagcggatgactacaccctgataacggcggtgtga

SEQ ID NO: 277998 - DNA, 372 bp, Morganella morganii
atgcagataactcttgatgacgtaaagccgatgattgcggaactcgggtttacattgcctgattctgtgctgtcgctgttactgagtcaggttaatgcaaagtccgggtgtctcgaagccaactacgacgaaaccacgcagaaactgctgctgatttacaccgctgtccggttggcctcgctgtctggcgcacgaaagatatcatcacagagcgctcctaacggggcgtctcgttctttcgcatatgattctgccggtactgattatctgctgaaccagatccgcgcatgggacagtgccgggtgtctctctgatttgccgttgtcgagcaaaacggttggcttcttcggtgtggtcggggggtatcgatga

SEQ ID NO: 277999 - DNA, 252 bp, Morganella morganii
atggcactggtaaaagtagtttcaaataacttcttcgccggtgccggtttccagcctgtggaagccggtagccaactgaaaatgtcagatgaaagcgcgaaagaatgggaaaatgccggtctggttgagattatcgcatctggtgatattgaagtcgcatcgcctggaaacgatgattctgaacagcctgaacagcctgaacagcctgaacagcctgaacagccaaaggcaaaacctaacggtaaaaaataa

SEQ ID NO: 278000 - DNA, 1077 bp, Morganella morganii
atgttttatttttcaaccaaaaaagcgaccgaaaccggcaaccttgaagcaaatacggcgcagtttggcgaactgcagattgcccgtgacgcatcctcgcaggctgttgctgagttcattatccgcgccaattcacgcggtaacggcgcaatcagagttgatgccgctaacgcagttgatgacatccgccgcctgtataaagcatatgaccagactgttctgtccgagtttcagccgaataccgagtttaccctgctgaatgacctgatggggctttctcgctccgtgcgtctggaagaatccgtgtatgaatatgcccgtaaaggcagcggcggcgtggctcatacgtcaatgtccggccagattggtgcgttgcttgatgccggtgcattcacctttgacggtacgatggtgccgattcacgataccggctttaagttcggcttccgtgacccaatcttcgcgaaaggttctgcgctggcatctctgtccgatgcgcagtctgattctgttgatactgttcgccgcaaatacgttgactttatctggaacgggttccgtgattccgaaggtaatttcatcaagtttgatggcaaatcatggaagggcttccgtgctgatgagcgcgttgcgcaggtgacactgactgttaactttgccaccgagcaggacggcaaggtgatccgcgcagaaatcatcaaactgcgtgatgtgctgaaactgaaaaacaaacaatacggtgagcagacctggtatgtgtcaggtgaaatcctgtcaaattgggaaagcgtgtatttcgatgtgaaccagacccgcaccattctggaagaggtgaagaaaatcaccggcatcaaagacatcaaagaagattgcgagctgaaagacaatgaaatgctgatcgtgccactgggtgccggtgttattgctccgattgtcggtcaggcgttcggtactgtcgcagacccgcgccagttctataactctgattacgtatggcgcacatggggcgctgccggtctgatggttaaacaggacatcagcggccacttctcagttgttcacgcgaaaggcgcataa

SEQ ID NO: 278001 - DNA, 438 bp, Morganella morganii
atggcgaacaaaacaaaacgtgtgattcatgcgggcggtattttccctaacccgctgttaaatcgtgaaggcgaggcgttagcagacattaagcccggcacggtaggctttttcgatggcggcaagttcaaagcctcagtagatggtaaagagtcggcaattctgtacgtggcaaacatggattatctgcgctgcaaaggtgtagatgacgacctgaaggccggtgattgggtggttgcaatccagccattgcagggattattcctgaacgtccgcgctgctgccggcacgtacaaaaaaggccagccggtgattgttgccaacggacagatcacagcggccaccgctgcggaaggtgaagttgtattcgcctatgtcgaagaagattcagcactgaccgctaaggcgggtgagctggttcgcgttgtgttcaagtaa

SEQ ID NO: 278002 - DNA, 1404 bp, Morganella morganii
atgaagctttcgggtattcatgttaaatcgctggctatcaattcctccaatatttcaactgaaaccatcgacggtgacgagcatattgtcattcgcggcgttgtgcctgtcgttgatgacgttgtgatgaacggggggctatatccggccagcgaaattaacaaaagctttcagtcgatggaggggcggcaatgcccgtacggacatcccaagatcggcacagattacgtatcggctgacacgccgagagcagtaaaccagtttcacatcggcgcatgggctgagaatgtccgcaaagatggtgaaagagtcgtcatggacgtgaaggtcaaccgacgtttcgcggatgccacagagaaagggaaagagttccttgcccgtgtggatgacatcattgccggtaacagcacagacccgatccacgtctccaccggattactgctgcagcgcgagcagaacaaaggcaagtcaaagggcaagccgtatacatgggtagcccgaaacatgcactttgaccacatcgccattcttccggcgagtgagcccggcgcggccacacctgatgacggtgtcgggatgttcgttaatgctgacgggcagaaatgcgatatcgaaaatgtcagcctggttgatgcggcaaattgtacgaaagcggacattctcagcaaggtgaaattcttcttcaccaacgggtcaaatctctctttcgatgatatccacagtgcattacgtgctgcattaaggtcgaaatttcctgatgacgactggccttatccggaagcagtctggcctgacaaattcatctactacacatccggtaaaacctaccagcaaaagtatctcatcgacgacaacggcgaagctgatcttgtcggtgagcccattgaagttgtgcgcaagccaacagagtacgaagtaaaaaccaataaggaaaacgacccgatgaaacaactcatcacaaacgcgctgaaggcaaaaggcatcgacacagacggaaaatccgatgctgagctgatggatgcgtacaaccagatgatcgccaatgaatccaacggcgaagaaacgccggaagagaaagcggcgcgtgagaaagcggagaaagagaccaaagacaaggccactaacacagatgacgtcaccgcagcagtgaatgccgcactcaagccgctcactgatgaaatcagcgcacttaaaagccagttaaacgcaaacgctgacaaagaaaaatcagccatgcgtgaagcagttaaggccaaattcggcttcacagaaacagctgtgaatgcgctggacggtgatccgctgaaagaactgtacgcacagtgtgcatcggttcaggggctgaatggctcgttccattctcagcataactcttccacctcagtatcagaaatgccggagtaa

SEQ ID NO: 278003 - DNA, 912 bp, Morganella morganii
atgtaccgcgatattgaaaagcggtatcacggactgaaaaaagaactccgccagctgttcgatctgtcattcaccggcagagagcgaaatcagaactcactctacagctacatcctcgctaaaaacgcacagaacgaaccagattcgcttatcagggttaacgctggtgtttattcgtatgacctcactgagcgtcctgacgagtacgcgcgtttccttgagaggctgcaatccattctggatgaatatctgcttgatggcgggaatgaaaatctgtgggcgttcagccatgtcgcagctgagtatgatcgcggtacgctgaatgcgtacaccaatctgtcgctacagtcagaggtgtatgcgtcacagacaacgctcacttacctgatgtcgcagcctgcatatcagaaccagctagccgcagcgtttatctcaacgttcagcgactggaaaggtatttctgatgccgcccgcgctgacctgtcgaacattatcggcatgtcgatagccaggggtgtcaacccgagagaaacagccagaatcgttagtcagaggctggatgtctcaatgagcaacgcaaagcgcatagctcagacggaacaggtaggcgcgttacgtcgtgcaaactggaatgaaaccacgtgggcaagtgagcggctcggtttgcgtaccggtctgctgtggctatctgcgctgaaaccgactacacgcagctggcatgcagcacgacacggcaaggtgttcactgtcgaagaggtcgaagcgttctatgccgacggcggcaaccggtttaactgctactgcgcgacacagccggtattactgaatgatgacgggacgatttacaacaaaggcattattgaccggctggcagcagagcggaaagcctggtcaacagacaaagattcataa

SEQ ID NO: 278004 - DNA, 1446 bp, Morganella morganii
atggaagtaaacagagacaggctgtcattggcggtgaataacgctatcagcgcggtagcgagagccagaatgacatatgcaaccggcggcatcggaaccggtaacacaaagcgtccgcgcatctggcgtgagttcggttatccggaagtgctgacgtttaatgacttttacaacgcctatgaccgtaacgctttgggcggtgcagcggtagaccggtatatatccggctgctggattgatgtccctgaaatattcgaaggggacgaaaaagcagaccaggacggctctactgactgggataacaagctgaataagctgcttaaatcacactgggagcagatcaaggaggctgataagcgcaatctggttggccggtattcaggtctgattattcagttgcgtgatggtcgcaagtgggatgagccggtcgataaagccgtaatttcacgcctgaaagacaaggctattattcgcatgatccccgcgtgggaagatcagcttgatgtgaaactctggaacgaagaccagatcagcgaggattacggttatcctgcgctgtactcatttacagaaatgcatgttggtaaggaatcggacggctctccggggcggattgttgatatccatcctgagcgcgtaatcatactcgcagatggggccgctgatgggaagctaacatccggaaccccattgcttagaaaggggtataacgaccttcttgatattgaaaaggtatcaggcggtagtgctgaggggttcctgaaaaatgccagtcgtcagctcaactatgcgttcagtaaagaaactgactttcagcggctggctgaggctcttggcaccaatatggacggccttgccgatgcacttgatgagcaagttcgcagactaaacgagagcattgacgcatcagtgatgatgcaggaagggacagcaagtgttctatcggtagctccggcagacccggagccatcattcagaacgtcactggctaagtttgcagcctcaatcaatatgccggttaaggtgctgattggccagattaccggtgagcgggcatcaactgaggacatgaaggactgggcgaaaacgtgtatgtcacgacgcacaggttttctgaaatcagtgattgagtccgtggtatcgcgattctggtcactcggcattatcgagccaagagaggaaatcaccgtcagttggtctgatctactggcaccgagtaaggctgagaaaatcgattcgatggacaaagccgccgatatcgccgttaaaacgcaacaggcattcggtcattcggtattccaggagaacgaaatcagggcgttgggggaatatccgactctgaccgagtttgaaagtattgaaccaccggaaaccgggcccaaaggagacccgttaactgatgataaagaaccagagaacagggtcgccgataataccgagaaataa

SEQ ID NO: 278005 - DNA, 1482 bp, Morganella morganii
atgaagccagagcatttagcgttactgcgtaataggcaatggcgtctgaataatctgtactggatcaccgataaagaaggtcgcccggttcgctttaaaatgacgcctgagcaaacggaatatttcgaaggtattcacaaccgcaacatcattctgaaagcccgtcagcttgggttcacgactgaggtctgcatcatccagcttgacgcagccatatttgaatccgcgaagtgcgccctgatagcgcatacactgccagacgcaaagcgcttgttccgagagaaaatcaaatatgcctacgagcgcctgccagacgaaatcaaagcagccaaccccgcgagtaatgactccgccggtgaactggtattcagcaaaggcggctcagtgactgtgtccgtgtcgtttcgtggcggtacgctgcgttacctgcacgtatcagagttcgggaagatatgcgccaagcagccagagaaagcccgtgagattgtcacaggggcgtttgaggcggtatcaacggaatgctttacgacgattgagagtacggcagaagggcgggccggttatttctttgactactgccagctggcagaaaaagcactgatgcagggcaaatcattatctccgctggactggaagtttttcttcttctcctggtggaagaatccgcagtacgcaatcgaccctgttgagcaacttccgcaacgcctgtctgattattttgctgagctatccggcaagtacggaattacgctcaacgaccggcagaaagcctggtactacgccaaagaaaaaacactcggcgacgatatgaagagggaatacccgtcgataccgtcagaggcatttcagcagtctgtggatggtgcgtattacgccaagcaattccgctggctgtacgagaataaacgcattggcgaaatccctgataactcacacctgccggtgcatacgtactgggatatcggtgtgggtgactccacttcaatctggtttgttcgtgaagttggtgaagaatttcacattgtcgatcactactcaaacagtggcgaaggtctgcggcactacatgaaggtgctgaaagacaaaggctatgactatgccagccataacggaccgcatgatatcgacaaccgcgagtttggttctgatgcgaaatcacgccgggagctggcgcgggaagggtacgaaattgacgggcaaacctactccatccgcttcgaggtggtgccgaagctgtccgttgatgagggtattgaggcagtgcgcgaaatcctgccgctctgtgtattcgacgagaacaaatgtggcgaaggtatcacccaccttgaggcataccggaaagagtgggatgacaagcgcgggtgctggaaagacaagccgcttcacgactacacatcacacgatgctgatggattccgttatttcgcagtcagtcgccgcaataagaaatctcactcaggcatgctggttcgtaaacgttaa

SEQ ID NO: 278006 - DNA, 603 bp, Morganella morganii
atggctaaaagaccagactgggaggccatcgagtcggcttacagggctggcgtgatgtcactccgtgaaattgcctcacagcacgacatatccgaaggggcgataagaaagagagcaaagcgtgacgattggtcacgtgatctgaatgcgaagataaaagccaggtctgatgacatggtacgcaagcaggaggtacgcaggcaggtacgcagtgaaacggcgctatcggaacgcgtacttatcgaagccaccgcagaggtaataaccaacgttcgcatggagcatcgcggcgatatccggcgggcgcgtgaattggctaacgtgctgtttgatgaactgagcgcagagtgtgccgatgtggccgcactggagaaactcggtgagctgatgattgagcctgatgacaacgggcgagacaagctgaatgagctttaccatgcggtaatctctctgcctgagcgggttaaatcagcaaaagcgctgagcgaaacactgaagaaccttatcggtcttgagcgtcaggcgtatggccttgatgacatgcagccaaataaaacagccagccagctatctgacctgatggacgaactatcgagcaaataa

SEQ ID NO: 278007 - DNA, 198 bp, Morganella morganii
atgactgaaaaatacgaagtcacagcaaccaaaaaggacggcacgacatatcacggattgatgacgacgaaagagccgcgcattactaacggactgattggtatttctggtctggatggctcatggacatatatcgcaccggatgaaatcagcgacatcagatacattccggtggttgaggaaaagagtaaggaatag

SEQ ID NO: 278008 - DNA, 690 bp, Morganella morganii
atgaataaattaatcaaaaaatcacacggccagccggtagtaacaactgacgtgatcgccaatgagtttggccggcagcataaaaacgttcttcaggatgtcaggagcctggtcgaaagcgggcatttaggagggcttgatttcaagccctcctcatatatctcaaagcagcggaaagaattaccttgttatgagctgactgagcgcggattccttatcgttatgccgtttattggcggtgagaaagcaaaagacgggcaggttcgcctggttgacagtttcatccagtttcgtgaaaaggcagcgaaagaagcgcaggtgcagattgagcgtaatgttgccagagtggaatacaagcctatgactgatgctgttaagcaaagcaaggtggatgaaggcaaagatccggcgccgtaccatttcagcaatgaggccgacctgattaaccgcattgttctcggtacgtcatcagcaaaattccggaaggacaaagacatcgggaaaacagagccgatacgtgattacctctctcatcagcaaatcagggcgattacggagcttcagcgagcgaatactgtgtttatcacgatgggatggggcttcgatcagcgcaagggcacgctcaccggactgttcgataaaaaccacaagaaagcattgctggaagaaacgcatttgctgaatgcgtaa

SEQ ID NO: 278009 - DNA, 189 bp, Morganella morganii
atgtcaaatccaattatgaaatattttgaatacctgcatctgccgcctcatctgcaggaagtgagcaagcctatcggtgatctggctaaacagatggatgaacagttaccagatggtgcggagaaatccgccggcctccgtaagttgcttgaagccaaagactgccttgttcgcgctaaattaggttaa

SEQ ID NO: 278010 - DNA, 378 bp, Morganella morganii
atgaactggaaagaagcggtaattgctgcgctgtttattgttgccgcctggtgggtatatgacacctaccgggataaccagcaactgaaggtgaataacacaacgttgtccggacagctgtcagcacagcggacgataaataccatcacgctttcagccgttgccatcagacaccgcgccgcactcgacaacatcaaagccaaagaaactgagggcacggagaatgtcaaagttaaaaccgttatcagaacggagtttaaagacagtgagtgtgctgttactcctgtttcccctggtgttgttgggaagttgcagcaatacgaaagagacattcgtgcccgcgccggtggtgcctatcccgccacaactgaccgctga

SEQ ID NO: 278011 - DNA, 141 bp, Morganella morganii
atgctgatcatcattgctatcatcctgctgactactgctctgttggcgggttgttatctgtattcactcccgaatcactgtaagccgctgccgggtaacccgctggacggtgtgatccattatgagtgtgaagcgctatga

SEQ ID NO: 278012 - DNA, 477 bp, Morganella morganii
atgaataaccgattatttaaacaagtcatggccgcctgttctgccggtgctattgccggggcgctggtgctgatccccgcatacgaaggtgttgagtacagaccttaccgtgatgtggccggagtgctcaccgtatgttacggccataccggcagtgatattcagcccggcaagctgtacacggacgctgaatgtaaggcgctgctgcacgacgatctgacgaaagtccggcgcgcggttgacccgatgatcaaagtgccgattgatgataatacccgggcggccatctattcatttgtctacaacgtcgggcccggtgcgttctcgcgttcgacgatgcttcgtaagctcaataccggtgatatcgccggtgcctgtgatgaaatgaaacgctggacatatgccggtggtaagcaatggcagggtttgattaaccggcgcgaaacggagaaagcgatatgccacggaaccctttaa

SEQ ID NO: 278013 - DNA, 189 bp, Morganella morganii
atgcgtatgacagaaaaatactcaagcccctttgcttatgcgtggggattcattgctgccactttcggtgtgatgtccctggatcagtgggcggtacttatcggcattatctgcactgtcgggacgtttgccgttaattggtattacaagcgtaaagagttcctgcgtaaaacgggtggggaatcatga

SEQ ID NO: 278014 - DNA, 822 bp, Morganella morganii
atgagactcgcagatttaccaaaatacttttcacctaagagtccgatgtttagtgactctccagccgcaacagctactgattcactttcaattaccgatgtcatggcctcgcttggtttggcgaccgcaaaagcgtggatgggtattgaattgtttttggcgaaacacggaatcaatcagccggatgaagcggtggagggcctctatcaatatgcattaactcaggcgcataaatacagcgttatccaaaagcttgatgaggatgttagagcatcagttctgcaaatactcgcaaattatgcatttcaggattacgccagaagcgcggccagtaaaaagacatgccctgattgtgatggcggcttcatcgaagcggaggtattcactactaagtatgccaccaaagccggttcatttgtttcttcacgtccgctgtcaccagggcgtaccgtaagtagcatgagagaggtgcgcgagataaccaaggtagcctgtccaacctgtaagggtaaggcggttatcagccattcgtgccggtgtaatggtcgcggtgaagtgctggataaaattgaaagtgaaaaacaaggtgtgccggtatacaagacgtgccctaagtgctcagggcgcgggtattcacgattaccggctgaagatgtgcggcgggcaatatgtgaatccctgttcgatattccggaaacatcatggcggagaaacctgaaaccattctatgaggcattgatacaggaatgcttcaaagaggagtctaatgcggaatcaattctacaaatggtaactaaaagagaatgtgtttctataaattag

SEQ ID NO: 278015 - DNA, 201 bp, Morganella morganii
atgccgaaaagctggagcaaaaagaaacgctccgaaatggacggcactccgcaccaacaaaaaccagacaaagataatctcgaaaaggcgctgcttgatgccatttttgatgatgactcccgcgtgtgggacgggcgcgtgactaagcggtggggcgaagaagggaagataatcgttgatacactgccggaggtaagatga

SEQ ID NO: 278016 - DNA, 291 bp, Morganella morganii
atggcgaatttacgaaaagaagcgcgcggcagagagtgccagatccgaattccgggagtgtgcaacggcaattctgaaacggtggtgctggctcattatcggatgccgggattgtgcggcaccggaattaagtcaccggacatttttggcgcatgggcgtgcagtgcgtgccatgacgaaatcgaccggcgtacacgcctcacagacgctgagtatgcaaaacagtgtcaccttgagggcgttatccggactcaggcgcagctgctgagggagaataaaatcagaacgtga

SEQ ID NO: 278017 - DNA, 432 bp, Morganella morganii
atgacaagacaataccttcacaccaatgagcagaagcaggatatgtgcctgaaaataatccggtcacttcgccaccatgacaccttcacggtcaagatggttgcgcaggccaccggtcttggcagcatgatagacgctaaatttgtccggctgttgcaggatatcggcagtgtccacgccgtgcgcaggaaaggcagtcaggtttattacgcttttgatgaccgtgcggcatccaaagtcagggcgtatttcagcagcctggccgaaaagcctacaccggtagctaaggcaaggatgacggtagtcaaggagaaggcatcacgtccaaaatccagaacccgcccgtttgatcctgggttcgggtggtcgttcatcaatgaaattgacgcaatgctgcgggaggtgcgctgtggaatgccaaatgtgcagtaa

SEQ ID NO: 278018 - DNA, 444 bp, Morganella morganii
atggaagcagaatttctcttccacgaaacaaccaaagatgcagcctggcaacacctcaaagaagcactcgcaacaaacaaaccccaccgagtaatcatcaagccctggaaatctacccgctcactatctcagaacgccacgtttcatatgtggtgcggcgagataagcaagtacctgtgtgacaacggctctaaattcacgcctgagacagtcaaggaaatgcttaagcatacatttctgggctacgaggtcactgaaatgatagacgccaccacgcagcatacagagcgcgtaaggactatgagaaaaacatcaaagttagacaccggggaaatgttccacttcatggggcaggttgagcgctgggctacaggcatcggttgttttgtgacgatacccgagaattcggaatatatgaaactcaaaatggagcaggacgcatga

SEQ ID NO: 278019 - DNA, 357 bp, Morganella morganii
atgagtgatacagaacgcgagttaagcaacgtagtcgcatttccttccggcactgaccccaacctgaaaagtaaaatatcatttgttcacgaagacgacgagccgagaggttgctgtttgcactccgggtatctggtcaatgaacacgaacgcagagttaaatgcagggaatgcggaaaggttatcgatgccttcgatttaatgctgaagatggcaaaaagagaaacccggctggtcagtgatatcgaagcattgcggcaggaagaaaaataccggcgtgaaaatatcgaaaagcttatccagattgagcgcaacgcaaaagccagaatccggagagccaaaaaatcaggaggctaa

SEQ ID NO: 278020 - DNA, 204 bp, Morganella morganii
atgagcattattcacattacccgctatcgtatgtaccggttaaggctgaatgacggccgctatatctacatgacctggcatccatactgtgggccgacgtttttcctggataaatacgaatcacgatggattgaagactggtacgaggataagcaaatatgcgatgccgtcgaatggttcgtgaatcgaggaaagaaagcatag

SEQ ID NO: 278021 - DNA, 219 bp, Morganella morganii
atgaaagcgaaaccaatgtttgtcaacggtgctccatccacagacggtgattttaatccggtgcgcgtaaccgaaacacaggcgaggaaaaaagcagcgcagatgcaatcagcaatgcgtaaaaagccatggggtaggtcagctgtgggaatcgtctttgatgccggcagtcacttcaatgtatcagtcggattccctgagcgtaacaaggtggtttga

SEQ ID NO: 278022 - DNA, 189 bp, Morganella morganii
atggaatggattaagtgctcggaaaaaatgccggaagaccgcagtggtgtcctgttatgggatgcagaccttgaagaagtaatcagcggccactacagccataaaacgcagttgttctatcaccacgggcatcttatcgaaaatgagatcacccactggatgccactgccacaaccaccggaggagtga

SEQ ID NO: 278023 - DNA, 225 bp, Morganella morganii
atgaagggtaagggaaccgatttcaaagcgctgatgtgggtgtacgcaacagaaaggatgtcgcagcgtaagcgttacatcaaatccggcggcggcagggttaactacaaccgcaaattgcataaaccgtaccggtgcgagcgggtactcgacaaattactgagaatcgacgcacggggatttatcatcagcataaagcaaggagccaccaatggaatggattaa

SEQ ID NO: 278024 - DNA, 207 bp, Morganella morganii
atgaaaccaacggattttgaaaagtggtgtgctggtgagttgatacgcccggtcgaatttattctgttcttcaggatagagaagcaggacggtcattggacttatgcacacgatgaaattagaagattgtaccgcgcctacatggccggagttcgcagcagactgccgtaccagacaccgccaaaaggagatgaagatgaagggtaa

SEQ ID NO: 278025 - DNA, 138 bp, Morganella morganii
atggaattaaccaaagaagaacagactctcgttatcgagttactggagcgacttttcgaagagggattcggcggagaagttgaagaccgcttgtttgaaaaacttattgccgcggtgaatggcgaggaggaatcctga

SEQ ID NO: 278026 - DNA, 729 bp, Morganella morganii
atggcaacagcagcgcagactctggcgcggttaaaccgcatgaagccggagcatatcaaaccgaaattcacgaatgccgctgagttgatggcgtggcagcgcgaacagggcgctatcgatgcaaaacggatcgccgatgaaaaccgcgttacccgtctcaataaaatcatggggcgttccggtatcagcccgttacaccaggaatgcacgttcgagaactatctggcgacaacgccggaacaacagcgtgcgctcagtaaatcacagcagtacgcagctgagttcggcaaatcatttggcgggtttattttcagcggcaacccaggcaccggcaaaaaccatctggcagcggctatcggcaaccagataatccggaacgggaaaagcattctgatcgccactctgccagacctgatgatgcgtgtccgtgagacataccagaaaggggcaaaaactactgagtcgcagctgatcagcgacctgtgcgaagtggatttactggtgctggatgatgtcggcgtacagcgtaataacctgaacgaagagttgattatctttcaggtggtagaccgtcggttatcgaacaaaaaaccggtaggggtgctgaccaatctcaattttgacgaactggcaaaagcattgggtgatcgggttattgaccgcctgagaatggggtcgccgaccgttataaatttcacatgggaaagtttccgcagacaggttaagtag

SEQ ID NO: 278027 - DNA, 780 bp, Morganella morganii
atgagcatgatattaatggcgaaagccatgcagttaaaagtaggtaatccatcaagaaagctcgtgttaataaaattagctgataatgccaacgataaaggcgaatgtttcccatcttatcagcatgtagcagatcagtgtgaaattagcagaagaagcgttatcaatcatattgatgcgttatgtgaacaaggtttagttagaaaggtttatcgtagtggcgaaaaaggtaattcatcgaatatctatattctcaacttagatggtgcaaaaactgcaccacatagtgaaaatattgcaccagaggtagtgaagaagtttcaccaacctagtgaaataactgcaccacatagtgaaaatattgcaccactacctagtgaaaaatctgcacccagaaccagtcactcttttgaaccggtcaatgaacctatcattgaacctaacacccaagccgaaaaaccggcttgccctgacgagcaaaaaaataacctggcaagtattcaccagatgtcgagcaagtatgcattcgagggagaagtgatccgcctgaaccacaaagacttcgctgagtggagcgggctgtattcgaatatcgacctggagcatgagctgaaacggctggacatggaatttcggtctgaaaagcccaaaaactggtttatcactgcaagtcagaaactcaactaccagaacaaaaactcagtgcctgcccgtcgccgtgtcggtgatcgcattgtgcagccatcgagagcgagtgagttcataccggaggatttctga

SEQ ID NO: 278028 - DNA, 687 bp, Morganella morganii
atgaatcaattgaataatttagtaaatactggcgaaccaacgatgagtagtttagaaatttcagaattggttgagtcaaggcatgacaaggttaaacaatcaatcgaacgcctttcaaaacgaggtgttatcaaactccccccaatgggggaagttaaaaatcacttaaaccaaacagtttctgtatatcaaattaaaaagagagatagttacgttatcgttgctcagttatcacctgaatttacagcaagattagttgatagatggcaagagctagaatcaaaacagtccctcattcctcagtctctaccagaagcattacgcttcgctgctgacttagcagagcaaaagcaaatagcagaacagaaattagcaatcgcagcgtctaaagctgaatttgttgatcgctacgttcaagcaactggcttacttggttttagagagacaagtaaattattaaaagtgaaagagaacttctttagagagtttctgctttcaaaacgaattatgtacaagctggctggaaaattaacaccttattcagagcacctagaagcagggcgttttgatgtaaaaacaggtgagaatcaaatcaacggccacgcttacacacaagttaaattcacacccaaaggaattcagtggatcgctggtttattggcagtggagcaattggaggcagcatga

SEQ ID NO: 278029 - DNA, 348 bp, Morganella morganii
atggaattatcaaaaagtatcaaagtgaactgctcattcaatgaattagcgagtttctatcaccggcaggcattttcaatcgggaataacggactggctaaaaagcttggtattcacccgtcaacatccagccgcgacaagaaccggatatttgaccttgcatgcctgatggtaactgagatggggcttccgcctgactctgtaaatgtcagtgatgaaccggcaaaggttgtgatcgtcggtgacagtgctgagaaattgattcagatgctggcagggaagggaaaggtcaaaagaaaagccccggcggtaaccgaggctcaggatcaaatcgacttagcgatttaa

SEQ ID NO: 278030 - DNA, 207 bp, Morganella morganii
atgagtacactatcggaaagagttaaaactcgtcgcgtggcgcttaatcttacccagtcagaattagctgagatggttggattaaaacagcaatcaattcaacagattgagtctgggttcatcaaaagaccacgatttattgttgaaattgctactgcactgaaatgcgacccaagttggctgatctgcggcgcagatgcggcataa

SEQ ID NO: 278031 - DNA, 687 bp, Morganella morganii
atgtcgatctcagaacgagtcaaaaacaagagaactgctctcggattaacacaggctgagttagccgaacgagcaggaactacacagcagtcaatagaacaattagaaagcggtaaaaccaagagaccacggtttttgccggaattagctgcggcattaaattgctcagttgattggttaataacaggaaatcaggaagattcgattcctccacaatctgagtggggaaccgttgcgacatgggacagcggaacaccacttgaagatgatgaggttgaagtgccatttttaaaagacattgagttggcatgtggcaatggcagttttattaatgttgattacaacggctacaaattaaggttttcaaaatccacccttagaagaattggtgcgccgtctgatgggtcaactattgtctgtttcccagctaaaggagatagcatggagccagttatacctgacaaggcggctgtagctattgatatttctaataaaaaaataattgatgggaaagtttacgcaatagatcaggatggattgaagcgtttgaagatgctttatcgcagaccagggaacaaacttattattcgtagttataaccgtgatgaatacgaagatgaagaagccgatgaaaatgaagtccagatagttggcagaatgttttggtattccgtacttgattattga

SEQ ID NO: 278032 - DNA, 1155 bp, Morganella morganii
atggataactttaaggcaagactgaaaaatcatgttgagcatgtgaaacaggttggacagcattgctctactgaagagacaacaaaacaagcccttattctgccattcttggatatactagggtttagcccgtacgatccacagaaagtaaaagccgagtatggtgccgatttccctggcgcaaaagcaaatgaaagggtcgattatgccctattctgccaggatgttccggtgatgtttatagaggccaagggttattttgagaaattagacaaccattgtcctcagttatctcgctatttcaactcaacgcctgaagttactatttctgctatcacaaatggccttgaatggcggttttttactgacctaaaacaaaagaacgtcatggacccgactccgttcctccggattagaatggatgaagtaagtgattctgatgctggtcagttattccgattcagacatgacaaattcaaacccgaagcattgagaaccttagctgaagaaagtgtttatttatctgcatttacaaaaacaatcagctcaagcctgagagatgtggacagtgagttcgtaagatatgttgccagcagatctaatgtagaaaggcagcttaaccagcgatttattgattctattaccccattagttaaacaagcagtagaacgctctgttagtgcaatggtggtgtctggcctgtctggtaaggggctctctattgatgagccaactgagttggcagatccaacagaaaccaagcaggataaagagtttgagaatattatcgacccagataacccaaacattatcacaacaaaaaacgaattagagctttttgaaaaaatcaaggcaataaccggttgtgaagatattcaatacaaggataccgaatcttatttcgggatattgtatcaaggaaaaacaaacagatggatcgtaaggtattacgacaaaaacaatgcttttatccaggtaccaatagaagtcactgacatccttgccaatgaaatagccagagccggattagaattaaccaatggccgtatttctcttgggtgtccagaagacatcctccgtataacagggatcgtgcttgactcatttgaatacgttaaaaatgatgagaatttcatccgtaaaaaacaaagttaa

SEQ ID NO: 278033 - DNA, 282 bp, Morganella morganii
atggcaacaattactgttattccaaagaaagacaacgcgaagaaccgccggctagcaaagcaaatggcgttctgggacaggaagcgtgcggagtatgcagcgaagcctaaaagccgctcagtggaggaaatttttgattcagttttcggccggccggcagacgaaacagatgtgtttgcagagttgattatcgggctgaaagatgcaccggaagcaccacgcaagcaaccacggctacgcaagccgattatgcaggatggtggcattacggccagagcgtga

SEQ ID NO: 278034 - DNA, 426 bp, Morganella morganii
gtgagtaaatacggatatgcggaaggcgatatttgcctgcggagcgggtgccaaggtgtggtgaaggagcacccagttgagaattgttcatgccacattaacccaccatgcggtgcctgcacctctcctcgcggttactgcgaaacgtgcggatgggaagagtcggaggacgagattataaatgactatgtcgtcagtgttaataaagctactggtacataccggtcatgcgaactaagaccacttgaccccacaaagcttgattaccacaacaaaccacacactaattccacgatgattaaagaaggcgtttatccggaaggaatgacgttgcaggaagttaagcgcaaagtggttggcaccttcggcggccgctttgcatatttcggcgatggaaagtttaaatacattgcttacacagattaa

SEQ ID NO: 278035 - DNA, 165 bp, Morganella morganii
atgccgatgtttaaagtaacgtgtaaatggaacgggaagccatgggaaaaggatatcgaggccgaggatgaagccgactgtacagagcacatgtatctgttcggtgtgctgattggcaaatccgatatccaagacctgaaaatcaccgaaatcacacagaagtaa

SEQ ID NO: 278036 - DNA, 132 bp, Morganella morganii
atgaacatgcttaaacagcaggagcatcgctacaagctttgtagtgagagtttcgcacgtaaaaaatcaggcttaaagccggtgttaattacatttctggcgctgacggttgttctgttgttcgccagatga

SEQ ID NO: 278037 - DNA, 273 bp, Morganella morganii
atgcagcaacacattgcaatcacatacgtcaactcctgtcactcacgggtgacattgcagcgtgaacaggaacttcactttgacgaaaccagcaagctcagaatcagcacaggaagtgcagaggctgtaatcgctctggttgaaagctacagggatgtaatcacggaagatacggtaaagcgcatggatgcggccgacattgtcgacatgctacggaaagcaggtttcgacatggatgttatcgcacaacttgcagggaggagcgcggcatga

SEQ ID NO: 278038 - DNA, 474 bp, Morganella morganii
atgaagccaatattggacatgtgctgtgggtcgcgaatgttttatttcgacaaagaaaacccaaacgtacttttttgtgacatcaggcgcgagcaacacattttatgcgatgggcgtgagttggatatcaaccctgatgttattgccgatttcagaaaccttccattcccggataagtcattcgagatggttatttttgacccacctcacctggttcgcgctggtgaaaatgggtggcaacggaaaaagtacggagcattggataaagagtcatggcgtgatgacttgaccaaagggtttggtgaggcaatgcgagtattaaaacctaatggaatactgatttttaaatggaatgaaactcagattaaaacatcggaagttttggcgttaacagattacaagccggtattcggacacccatcagggaagcggtcaaacacacattgggtgacgtttatgaaggaggcagcatga

SEQ ID NO: 278039 - DNA, 210 bp, Morganella morganii
atgaatgcatacgcagcacaggatgctcaggaagagcggcggctggagcatgcagcatggcaggatgccgtggacacggaagttcagcagataacatcggatgttttctttggtgtggagcagtcaattttagacaaattcagtgacgatgcgcaggacgcgctttttaactcgctgtgcaaacaaataaaaaggagattcttttcatga

SEQ ID NO: 278040 - DNA, 738 bp, Morganella morganii
atgagtaactcactggtgtcgatggctggttctctcgcccaaaagcttgatctggcaatcgacgagaaagacctgattaacacactgcggtctacggcattcaaggctgaggccacagaccagcagtttcttgcgcttctcattgtcgccaatcagtacaacctgaacccatggacaaaagagatttacgctttcccggacaggacgggaatcgttcctgttgtcggcgttgacggatgggcgcggatcattaacggcaacaaaaattttgacggcatggaattcgaaatggatgacgaatcgtgcacatgcaaaatttaccgcaaagatcggaatcacccgacatcagtaacggaatacatgagtgaatgtaatcgtggaacccagccgtggaaatctcaccctaaacgcatgctacggcataaagccatgattcaatgtgcacgtctagcatttgggtttgctggaatttacgaccaggatgaagcggagcgcatcacagaaaatacaccggctggggttatcaacggacaggagaaccatgaaaaccggcctgagctcatcgcacgctgtgaagaggctgcaaaaaacggaatggaagcatttaagcatctatggacagagcttactcccgaagaaaggacgatcgtcgggtcagcagataaagagcgaatcaaaaacagtatcgccattgatgccgaatacactgaggtgacagatggagcagagaacggatga

SEQ ID NO: 278041 - DNA, 597 bp, Morganella morganii
atggagcagagaacggatgagtggtttgcggccaggctagggaaagtcacggcaagcaatattgcaaaagtaatggcgaaaggcggcggagcgacaaggaagaattatatggctcagctggtttgcgaaacactgacaggccagaaggaagagacctttaaatcagcaagtatggagcgcggtaacgagcttgaggcggtggcaagggaaatgtactgcctcaacgaattcgacgccacggtaacggaaaccggctttattctgcaccccaccattgagcttttcggagccagcccggacggccttgtaaacgatgacggattaatcgaaatcaagtgcccgaacacagcaactcatattgagaccataaaaaccggaaagccaaagcgtgaatacatccttcagatgcacggtcagatgatgtgcaccggacgcaggtggtgtgatttcgtcagctatgacaaccggcttccggaaaatctcgcctatttcaaaacgcggattgtttttgatgaaggtcttgccagtgaaatagaaacggaaattcgcgaattcacgaaagaactcagggaagaaatcgagtttttaaccaaataa

SEQ ID NO: 278042 - DNA, 885 bp, Morganella morganii
atggctgcattttacaacgaaaacgatccgttcgctgctcagtggttacggaatctcattgctgccggtcatatagcgctgggtgtagtggacgaaaggagtattgaagatgtcacaccagatgacttacgcggattcacacaatgccacttcttcgccggtgtcggagtgtggtcactcgccctgcgtcgagcaggatggccggatgataaaccagtctggacaggaagttgtccgtgccagcctttcagcgctgcaggcaaaggaaatgggtttgctgacgagcggcacctttggcctgcattcttccacctcatcagcgagtgcaagcctggcgttatctttggtgaacaggttgcaagtaaagacggcctcggatggctcgaccttgttcagactgacttggaaacagagaactacgccgtcggcgcagttgatttatgcgctgcgggcttcggtgcgccgcatatcaggcaaagattgttctgggtggccgatacctttggcgggaagcgggcgcggagttggaacaagcggcaggcagggaggaatgaatattcaaacggccgcgcagctggcaggctggacaacagcgagcgcctcggatggagaacggggaggaactggaataacgccgggaatgacgggcagcagcttgacgcagcagtcaaaaatgacactgccagtccgacgaacggctactggcgagatgctgactggttactctgccgggatgacaagtggcggccagttgaatccggaacattcccgctggctgatgggattgccggtcgagtgggaaaactccgcgcctacggaaatgccatcgccgcgccggtcgcggaagaattcataagggcttatatgctgataacagaggattga

SEQ ID NO: 278043 - DNA, 285 bp, Morganella morganii
atggcaataattcagtattgcgttgcgtgtaaaaaagatgaagacccggcatccgtcactgagaatctccgctgtgaattatcagacgaccataatttcagcgctgatgatgacgacttcgaattttgcatagaaacatgcgcagaagattttcacgacagatgcgacgggtgggagcgtcattggcctttattattcatgctgtggattgacggtaaatatatcggcatgtttgaagttgagcgcgaatatgagccaacattctcagctaacaaggttaattaa

SEQ ID NO: 278044 - DNA, 363 bp, Morganella morganii
atggatatatcacgacagcagtttgaagaatacattaaattgcataccgaaccggcagggctggagcgtaaattaaaaacgtcgaataacggattaaattacgccgaccgggatgtcgatttaatgtggattggctggcaggcatcgcgtgataatttggatatcgataagctcaaaaagaagcgcaacgaagccatcgggcatttaatttctgtattcgaccaatatgccggtctcgaccattcatttatgtcagccggagaggatgcctgcgagtttttggaaaaattaggttacggaaccgacaccggtagagtttttgcattaagcgaaaagatactggaattaaatagcggcgactga

SEQ ID NO: 278045 - DNA, 222 bp, Morganella morganii
gtgaaagttagcttatttgacgatgggtgttatgcggctctagagaatattagcttcccggtgattgttgaggttaacaatcattatgacacaggggttgatatttccggagcagagctaatacgcatcggcggagatgaagagcgcatcgatattgatagagattactatttttctttcttcagtggtgaatgcgaggtagtcaatgaacaaatatcgtga

SEQ ID NO: 278046 - DNA, 324 bp, Morganella morganii
atgaacaaatatcgtgacaaatcagactttgagattaataaggctgtggctgttaatgttaatggcgccgacgctgttgtagagaaattcggcaggatatatatcattgatgaggacgggatagccatggtgagcttcgacccgtgcaacaacccggcggacgcatggccgattattaatgagtatggtattagccttatatatcaagagagagagttccagtttgcaactaacgacggaaatatagagtgcagcattagcaatccattaaaagccgcaatgattattttcctgatgatgaaagaggcggagaatgaaagctga

SEQ ID NO: 278047 - DNA, 540 bp, Morganella morganii
atgaaagctgattacggctggagcacaacaccaaaggaattgcgtgatttgtggcaaactcccctcccgttattctcagcactggacgctgaattcggtttttaccttgatgccgctgccgataaaaataataccctctgctctcattacctcaccgaaaaagacaacgcattaaactctgactggcaaagctacggctcaatatggtgcaacccgccgtatagcgacatacagccgtgggtaagcaaagccgcagaacaatgcaggaagcaattacagccggtcgtgatgctggttcccgcagatacatctgtgggctggtttaaatcggcactggataccgttgatgaggtcaggttcattaccggtggccggatatcgtttattaacgctggcacaaacaaaccggtgaacggaaacaataaaggctccatgcttttaatctggcgaccgttcacccagccacgccggataatcaccacagtaaaccgtgatgacctgatggacatcggcaaccggttactggaagcacaaatctga

SEQ ID NO: 278048 - DNA, 210 bp, Morganella morganii
atgacaccacaggaagcagagaacggacgcagacgaatagcaagggaatgcctgaaggaattaatgcagcacacatcagacgaacaacacaccgcaatactcgacaaatacacaccgaaatttaaaccacttaatcacctgcgctttccggcaaagagagtgctcgggtattacgtgcgtacgttacagaaggagatgaaggatggataa

SEQ ID NO: 278049 - DNA, 1164 bp, Morganella morganii
atgtcaatcttcaaacgtggtaactcttggtattgcgacttcgcgacacctggcggcaagagaattaaaaagtcgcttggtacgtcagacaagaagcaagcccaggagctgcacgacaaattaaaggccgagcaatggcgaattgagcaggtaggagacttcccggactatacctatgaggaagcctgcctgcgatggcttgaggaaaaagcagataaaaaatcgatagaggacgataagaactttatcgctttctggcttgagtacttcgagggtgtccggctgaaggatatcaccgagaatgccatctacaagatcatcagcaagatgacaaacaagcatgctgaaaactgttggaaaaggaaagccgacacagcaaagaggaagggaaaggaggtgccgctgtttacagcgaagcctgtcactacggccacaaaggcgcgatacctttctttcattaaggcgctgctcagagcggcggaaagggaatggaagtggatagaaaagtcacctgtgataaaaatcccctctattcgtgatcggagagtcaggtggcttgagcctgttgaggcgaaaaggctgattgatgaatgtcctgagccattaaagtcagtcgtcaggttcgcactttcaaccggcctgcggcggtcgaacatacttaaccttgagtggcagcagatagacatgcagcggaaagtggcatggatttaccctgaagacagtaaatcaggtaaagcgattggtgtagccctgaacgataccgcatgcagggttttgcgcagccagattggtcgtcatcacaaatgggtatttgtccacactgaaccgtcatacaggaatgacggaacaccggttgcggcagtgagaaagatgaggacggattctaataccgcatggagagcagcattaaaaagagccggtatcgacgatttccgtttccacgacctgagacacacttgggcaagctggctgatccagtctggcgttccactttcagtgctacaggaaatgggcgggtgggagtcgatagaaatggtgcgcagatatgcccatctggcaccaaatcatcttaccgaacatgcgaagcaaatagatgccatttttgacagttacgtcccaaatacgtcccaaggtgaaaaactggcatcgggagataatcgataa

SEQ ID NO: 278050 - DNA, 1386 bp, Morganella morganii
atgattacacataaatcgtaccggcttctgatagttgatgatgaaaagaatctctgccggatgttacagaccgccttttctattgatggtcatgaaacccgggtggcggaggacggcgaggcggcgctgataagctttgtgcaggataaaccggatgtggtgctgatggatatccgcatgccgaaactggacggtattgaggccctcaaacggatgcgggagctgaacccggaagtgccggtcattctgatgaccgcctatgccgctgtggaaacggcagtggacgcgctgcgtctcggggcgtttgattatgtaatcaagccctttgacctgacagagctgaaactgcttatctcccgtgcattacagctgcaggagatgaaacaggaaatcaatctgctgcaccgcgaactgagcgacagctaccagtggggacgggtgctgacccgtaacccgaaaatgatggaaatctgccgcgatatcgccaaagtctcgcgcagccaggcgacggtgcttatcaccggggaaagcggcaccgggaaggaagtggtggcacgggcgatccattacaacagcgaaagggccaacggcccctttattaaagtgaactgcggggcgctgcccggctcgctgctggaaagtgagctgttcggccatgaaaagggcgcatttaccggggcgcaggtacagcgtcagggattatttgaacgcgccagcggcggaacattgctgcttgatgaagtcggtgaaatgccggcggatttacaggtgaaactgctgcgggtggtgcaggagaaagaatttgagcgcgtcggcggcagtaaaaccatccgcgtggatatccgcattattgccgcgaccaaccgcgatatgcatgaacgggtacgggaaggccatttccgccaggatctgttttaccgcctcaatgtgattcacctgaatctgccgccgctgcgtgagcggccggaggatgtggggctgctggcctctcattttctgcagaaattcagtcaggaaaataaccgcgatattgtcgagctggcaccggaaaccctggcattgctgatgaactaccagtggccgggcaatgtacgggagatttccaacgtgattgagcgggcagtgattatgagcaccggttatgtgattttccccgaagatctgccggagcagttactggcacaggtccgcagccagccggtggcactgattccggtcacgcaggagccgggcctgaacctgaaagagaatattaaagcttacgagaaagagctgattatttccgccctggcggaatttcagaataacaaaacccataccgcatctgcgctggggatcagccgccgggcattaatgtataaattgcaggaatacgatattgaataa

SEQ ID NO: 278051 - DNA, 1776 bp, Morganella morganii
atggccattctgctggtcaccgtaccgacacttatcatcggttattttgtggaaacagaggggcgttccgcgttgttgcaggagaaacggaacaaactctattctgttgccgggttgctggaacaggcgctgaatgatgaatatgaccttgccgcatccctgccgcgtgaccagcgcctggcgctgatcagcgaaaagctgtatccggcggcggaaattatcacctccaccttcccgggggtcggcgccgggtattaccaccgtgagcttgacggtattgtgacctattctccgcgtgcccgttacggtaacaaaaccggcacccgaatcagtgaggatcaccccggccgtcatgtgatggcaacgggagagccggaggtcggctggggaagccaggtgcgcggtaatattatgaatgccatgattccggtcaggcgtaacggtgaggtgatcggctatatctgggcgaatgaactgacggatgatattgatcgccaggcgctggcgatggatgtcaaaattatcgctgtcattgctctcgggatcctgttcagcctgctgattattatcgtcttttcccgtcatttcagccgggatatcggcgcgattaaaagcggcctcagtgatctctcccgtgatctcaatacccatctgccgatgatgaaaggggaaatgggggagatcagcgacagcgtcaacgccctggcgcagacactgcgggagatgaaaaccctcaacgaactgattattgaaagtgcggcggacggcgtgatcgcggtggatatcaacggctgcgtcaccatgattaacccggcggcagaagagataaccggctatctggagcgggatctgcacggcaaatattacggtgatgtttttgaggggcgcagtttctccagcccggttctcgataccctgaagcgcggtattgagcacgtcagtctggaaattgcctatcccgcccgtgaccgcaccattcagataaacgtcagcaccagccgcatccgtaatgcgggcggggagcttatcggcgcgctggtgatatttaaagatcttactgcgcagaaagaggttcagcgccgtatgcagcaggcggaaaaactcgcgacactcggcgagctgatggcgggagtggcccatgaggtgcgtaacccgctgacggcgatcagcggtttcgtgcagatcctcaaagaactggaaaatcacccggataaactggaatacatcagtattattctcaaggaagtggattccattgaccggatcatccgccagctgcttgatttctcccggccgcagaccggcacattccgcccgatcagcgtcaaccggctgattgaggaagccctggtgctggtcaaaaccaaaggggtggaagcgcgggtcacctttacctgggagccggatgacacactgccgctgattgaggccaacagcgagctgctgcgtcaggtgctgctcaatatcatgataaacgcggtgcagtcgattccggccagaggcaatctctttatctccacctgttacatggaagagcagcgggtcatggtggtgatccgcgatgacggcaccggaattccggcggcgctgcagaagaaaatttttgacccgttctttaccaccaaagcctcgggaaccgggctgggactggctatcagccagcggatcattgccggtcacggcggtgatattttccttgaaagtcaggaacatcatggaacgacgttcaccataacgttgccgataacgcagggtaagaaaaatgattacacataa

SEQ ID NO: 278052 - DNA, 546 bp, Morganella morganii
atgaaagaacgacattgctcacattgcttccagtgtttatttagccagccacgtgctggctttttttttcccttttttccccggagccattcgcgccgcaggtgcgttggctttccccggtcacatactgatgtatgctcccggggattcactgcgtcgccgccttcctgcaacacgaatggcgtcggggaaacgctgccctgccacaaaccggatgattcagcagatgaattgtttggttttgataatgtaaaagttcattcgggaataaccggcaaaaaaaaggaaagcgtacagcgccatggatggagcgaaccgaatctgcgtcatcctccggtccgtggctgtgttggttgcgctcagtattccgggtcacatactggtgtatgctccccggaatccttcccttaccgccttgccacaaaccagatgattcagcagatttcgcggacagggatgtgtcagcgtctttccgctttgccggttatcccgccgcccgggtctgaaagaagatggtttgatgctgcacttattcaaattttttga

SEQ ID NO: 278053 - DNA, 297 bp, Morganella morganii
atgcaaaacgttgcgcttattggtatcgatctcggtaaacattcctttcatgtacaatcagggaaaacagtaaggcacagattaaaccatggtggctcacgtgaagcaaacaatgccctgtggacaatagcccttgtacgtatgcgtagcgatccgcgcacgagaatctatgtcgacagacgaactggtgaagggctatcgactaaagagatcctgagatgcctaaaacgctacatcatccgtgagctctatccattgattttatcggacctcgcatatgccaatcgccgctcttga

SEQ ID NO: 278054 - DNA, 207 bp, Morganella morganii
atggagcgcttcttcagaagcctgaaaaacgaatgggtaccggtgaccggctatatcagcttcagcgaagccgttcatgcaataacggattatatcgtcgggtattacagcgaactcaggccgcatgaatataacggtggattaccaccaaacgaatcagaaaaccgattctgggaaaactctaaaaccgtggccagttttagttga

SEQ ID NO: 278055 - DNA, 666 bp, Morganella morganii
atgaatgcaaaagaattaatcgcccgccgtgtggcacttgaactgaatgacggtgatgtggtgaacctcgggatcgggctgccgacacaggtggcgaactatctgccggaaggcgtgcatatcacattacagtcagaaaacggttttctcggtctcgggccggtaacaacgccggataagaatctggtcaatgcaggcggtcagccgtgcggcatcctgccgggcgcgtcgatgtttgacagcgccttctccttcgccctgatccgcggcggtcatgtggatgccagcgtactgggcggcttacaggtggatgaacaggccaacctagccaactgggtggtaccgggaaaaatggtgccgggtatgggcggcgcgatggatctcgtgactggtgcgcgcaaagtgatcatagccatggaacactgtgcaaaagacggttccgccaaaatcctgccggagtgcaccatgccgctgaccgccgtgaaagcggtggatgtgctggtaacggaactggcgttattccgctttgaaaacgatcagatgattttgtgtgaatacgcgccgggtacggatatcggtactatccgcgaaaaaaccgccgcgcattttattgtttcaccggctatctgtgaaatgccgctggtgactgcgggggaagccgtatga

SEQ ID NO: 278056 - DNA, 648 bp, Morganella morganii
atggttattttttcaaaaagaaaagtggcggtatgtgttatggcagcactcgccgctcaggtgatggctgctcaggctgcaaataaagaagacgtgattgtggttaccaccgcatccggcttccagcagaaaattgaggatgctgcggcgactatctccgttgtttcacgcgaacaactggaagataaagcctaccgcgatgtgactgatgccctgaaagatgtgccgggtgttgtggtcaccggcggcggcagctcgtcagatatcagtatccgcgggatggatccgaagtacaccatgatcctcgtggacgggaaacgggttgccagccgcgaaacgcgccctaatagtgataactccggaattgaacagggatggttgccgccgctgactgcgattgatcgcattgaagtggtgcgcggaccgatgtcttcactgtatggttcggatgccatgggcggggttatcaatattatcacgcggaaagcgcagggtgagtggcatgcgagcgtccggacagatgcaaccattaccgaacgcaaagacagcggtaacaccgggcagggcagcttctttgccgccggtccgctggtggataacctgctgagtactgatgaatcccctaatgatttttatcaaaatcattaa

SEQ ID NO: 278057 - DNA, 285 bp, Morganella morganii; identical to SEQ ID NO: 277114

SEQ ID NO: 278058 - DNA, 1581 bp, Morganella morganii
atgatttatacagacggcaccgtagccattaaagccggttcaccgattgtgaccggcaccggtacacagtggaaaaagaacattcacggcgtggcacccggccagcttatcagcatcgagaacggtacgacacctgtcagtatgatgatccgcgcggtaaacagtgataccgaactggcgttgtcattcaatgctccggtaacactcagcggcgcgaaatactctatcgccaccacggtaccggacaccatttcagatgcggcccgtaccatgtcagccaatcagggctatattgtgtattttctccaggccatgcagcagtggatgacagacaccggacaagtggaaattgagttgccgaacgggcagaaggtgacactggaggatgtaaaagggctggcttcgagggaatgggtcggggagatgctgtataagccaaattccgctgttacccgcgtacaaagtccgaacaaaaggaatgttgttcagctggaagacaggggaacagtcggttttaaagacaccgtcacagatagatatcgttttgcgttgatttcggatggctccacccgctgctttagtgacggagaatataccggactggatttagtaaagatcgatggccgctatgtgcgactggagacaaatcctcatgcgggtacagcatcaatgcttagcattgtgtatcggcaggctaacggcgaaaaccagcacattgtgacgataccatatgacaccggcgtagttgcgactcgctcctggattcagcaggcaaccggatgggggtcagtatacgcggactatcctccgtatatgacaaatttcactaacaccaatttgcctaatggtatgtatagatttgaccagaacagtcaaaatcccccttctgtcataggagacagatttggaagcgttataaccaccaggtattccggagatattggacaaaggatagtccttcccaactacggtgcgacgcacatggcgatacatcggtatactggttctgcatgggaatcggtaagggtgttgacatccaatatgtatatcgtagacggtagcggatattataaaaaatcgtcgccaatcgttcagatttaccctgatggccattacgagaccaatgatgaatccgaaggtgcagaagtccgccgtaccggcaccggccagtatcatatcaccggtatactcggttataactcagatggcgcatggggtgtaaacggtggtatctcagtaccgaaagacaataacggccttgagctggtttatgtcgatgacagggtgcagagtgacggcagcctgattattgaaacctatcaccgtcagcatgcgcatttaccggaacgtttccagaactggcgactgaaagaggtcacgccggaaggtgagcgcatcttctatcaggacggtgaaccatgtgatctgccggaatccacccgcctcgatgttcgtgtcgaaatgccgcagggctctgtgtggaatgtgaaacagcgtgaactggctgaacagatggaacgtgagcaggcagagcgtgaggcgcaggaagcagcggagcaggccggagaatcagaggaataa

SEQ ID NO: 278059 - DNA, 552 bp, Morganella morganii
atgtgcgtgatccgtgaggtaagaccggatgaagaatatgaggtaaaggaggatacatctaattatgtcattgtgcatgcgctgaataagaagtggtatgttgcgccgattagtcatgtaaccattccggtgcatggcgtgggactggagatattcaacgcagatggcaggtgtatgttttccagctcagtccggcttgtgccatttgtttcctggtatgacgtgaacatgaatacggcaggcagggggcaaattactgtcaggggaaaagcaggccatcgatacggttacattccgttgcggtcaatggggtatatctggaacagaaacaaacaatcatatattgatccgacgacctttgatgaggtatgggagtgggatgtttattctgaaaaatatgaactgataaatgatgttggcggactgacgtttaaatacgcttacgatatgaccggcaggatggacggatataccagcccgcctcctgacagggaaggttccggactgatgcagcagggctggatgatagatgtctctatgcttgaggtctga

SEQ ID NO: 278060 - DNA, 363 bp, Morganella morganii
atggggatagggctggaaatttacgataaaaaaggaaggcttatcattgattctgaatcaataatcccgcgctttttgggaaaatttgaactgccgttaaatcggtacggaaccttaactatccccgaaattctgtttggcggcgaggtggtttgtcatttctggattactttcagaagcagacagagtggcggctacatgaaagcatttccgaatgaaagaactgagtggacagttaccggagataccattaaatacagttctgattttaatgtgtatcgatgggaaaatgacggagccggaggtggccagacacagacgtatgattcttttcaccattacgtgattgtatgggcgttgtga

SEQ ID NO: 278061 - DNA, 579 bp, Morganella morganii
ttgcaacgatttggacgccgctttgatctgagtgtcagaacggctgctgaaggtattcatgggcttctgctccagctcccgcagttacggcagcgtatccgtgacggctggtaccagatacggatcgccggcagtgatgtttccccggatgaaattcaccggcgctttaatgagccgcttccccggaatgcggtcgttcacatcgtcccgcgtatcgggggggctaagaacggaggtgtgtttcagtttatcgccggtgctgctgtgctggcaatcggatggtggaaccccggcggctgggctatcggtggtgcgctgatgtcggccggtgcagccatgatgctgggcggtgtggcacagatgctgacaccggtagcgaaacagccggatatgtcgcggggtgaggaagagaagggtaatacctatttcagtaacctcgaaaatactgtggcacagggcgtggccgtacctgtggcctacgggcggattatgtgcgggtcgcgggtgatttcacagtccattgagattatggatgacagcgacggtactaatattgatgccggtaaacacggcgggtaa

SEQ ID NO: 278062 - DNA, 2928 bp, Morganella morganii
atgagccagcagatagctgatctggtcattaatctcagagcggacagcaccacattcactgagcaggttggacgcgtcgagcgtcagttgctgcaggccgccgccagtgcggatgcgtcagctgagcgtatgcgtaaatttgccgaagggcagtcagcagcggttaaccaggcagcgaacagcacacaggccacactgaaaacgctggatgagtctcagatattcagtgctgataagtttgttcagaaatggaaagccgcggcgcgtgaaattgacagcatgcaccgccggatgaatgaacagatcaataacagcaggcagaaagattcggccggtcgggatctggcgcggcagcaggatgccatgaccgaaagctttttccgtcagattgatgcggtaaagaagaccggcagcgggcttgaacaactggccgtcattcagtcgaaactgaaccaggcgcagcgtgccggaaccatatcacagcaggattatctgaccctgatctcatccgtcacgcagcgcacaacagagttacgccgtgcggatgaaaacctgacacagcagaaaacccggtttattcagcgcctgaaagaacaggtagccacacagaacctgtcccgcaaagaaatgctgcgttaccaggctgcacagctgggcgtcagttcatcagcggatatctatatcaataaactccgtgacagcaacaaagaaacggagaagtttaaaggcaataataagatcctgtccgaaggcctgcgcagccttgccggtcatatggggatgagcaagttcacctactttggcggtatgggggcggtagtcggcggaatagctgcggttggtaaagcggcctggaatgctgagcaggaggtgacgctgctcaaccgtcagctgatcgccaccggtaattatgccggtaaaacatcggcacagcttcgcctgatggcagatcagatgtccggtggctggataaccaggtcggatatgactgctgcgcttacaagtgcagtcggttccggttatttcttcggtgaccaggtgtcacttgtggccaaagcagccgcacagatgaaacaggccaccggacagtcggtggatgaaacagttaatcagttcaaacggcttaaggatgatccggtcaacgcgattatggaaatggataaatccatgcacctgctgaccgcatccgagtatgaacatatagctgcattggaaagatccggaaaaaaccgtgaggcgtcagaatatgccattaccaaactggcagaggttaccaaccgtcgcactattgagatgagtgaggatgtgggtatccttgaacgggcatggaataaccttacaacaagcataaaagaagctggtgatgaactggcgaaaatttggagggcacctactgaagcggaaaagttggctagtgtgaatgaacagatcgcatctcttgaaaacggtgatgggtggatgaccgactccgctcgtaagagtagtttggaaacattaagaaagaacaaggccgaacttgatttcgccgttaaatcccagcaggggtatctggataataaaaataaaattatccaggccaatgaccgagaaaagaaaagccagcaggatctcaataagtacattgaggcgagcctctctcaggcagaaaaaagaacgcgggagcacgaaaagttaaaccgtgaaattgctgccaatgcaaaggctgcaaaagataccgcctctgcatctgacagtgaaaaaatcaggctatggacacctgatgaaatagcgaaagccagagccggtattgataaaaaatatgccgaccctaagacgccaaataaacgcgattatcgtgttgatgaaggaacaaaagcagaagaaacggcattaaaagagcaaattgcacttgaatcaaaattgcgcgtgctcagagagcacaaatctgttacggatgtaatcagtgctgaacgtaaaaagctttgggaaaccgaggctcagattgccattactgaagaggccagaggtaagcgccagttaaccaaacaggagcagacgttgctggcaaataaagcggcagtactggctcagcatgagaaattggcactgcttggtgatgaagttgtcgcccaggaacgcctgaataaacttcaggatcaggctgataaatacgttaagcagcagactgaaaagcaaaatgcaatccgcgatactatcggcaaatcttcgcgcgaagcgcagcaggctctggagaggtcgcaaatcctctccgctcatcaggacaatccgcggctgaatgaaatgctggcggctcaggcagcaacgtatgcatcggaagaggaaaagcgagctaactggctggccggagcacaaaccgcctggggggattaccgtgatgccgcactggattcaaatgcgcagatccagaatgcgactatggcggcactgaacggattctcaactgagctgacatctgttctgacaaccggtaaggctaacttccgggagttcaccacatctatactgaaaatgctgacagagatttttgttaaaaaatcgattgttatgggaatggatgcgatggggtttaattttaccccaaatgccaaagggggcgtttatagctctccgtcactgagtgcgtacagtggccaggtggtacataccccgacaatgtttgcctttgcaaaaggtgctggtgttatgggggaagccggaccagaggggatttttccgctgcgccgtggtctggacggaaaactgggtgtagtggcgaaaatggctggtggaggtgatggtgtagttcagcattttaatatcaccattcaaaatgacggcagcaacgggcagatgggcccgcaggcgacacagcaaatcctgaagctggttgagcaaaaaaccaagcaggttattgcatctgaacgtcgtccgggcggagcaatggggtaa

SEQ ID NO: 278063 - DNA, 528 bp, Morganella morganii
atgaaaaaggcaatcacgatattacttaacgggtgggtgtgggctgttttgtttttcggtctgtggatgttcagcatgctgtcagccgaacaaacggaaagccaacataaagataaggttatcactgaccagcaaaaagtgattgataacgcctacaccagtatcgaaatctttgatcgcgtggccgcggcgaacgccaaccgtaatatgcgcgccgatgctcaatcacaggagaagcagattgaataccgcacaatcatccggaaagaggctacctgcaatttgtatattcctcagcctgtttctgacgggttgctcagccacgtctacaccatccgtgaatcagcaatgcgttccgctcccggcatcactgacacaaccggtactggcaccactgccacccgccgcctgacatattgccaggcggttgaatggatagagccactactgaccgcactggataaggcgaacgggcagttaatggatatccggaaagcggatacagagcgaagcgggaagccaagataa

SEQ ID NO: 278064 - DNA, 660 bp, Morganella morganii
atgcgcatgtctgacaaatattccagccctacagcatatgcctgggggcttataacctctgcctttggcattttatctctggatcagttggccattgttgccgggatcatctgtaccgtcggtacgttcctggttaactggtattacaaacggaaggaattccagttaaagccggagaacatcatgaataagcgattggttaaaaaggtaatggccgcttgtactgccggggcaattgccggtgcgctggtgctgatccccgcatatgaaggtgttgagtatatgccttatcgtgatgtggccggagtgctcaccgtatgttatggccataccggcagtgacattcagcccggcaagttgtatacggatgctgaatgtaaagcgctactgcatgacgacctgacgaaagtccggcgtgcggttgatccgatgattaaggtgccgattgatgacaatacccgggcggccatctattcatttgtctacaacgtcggccccggcgcgttctcgcgctcgacgatgctgcggaaactcaataccggtgatatcgcgggtgcctgtggcgaaatgaagcgctggacatttgccggtggcaagcagtggcacggactgattaaccggcgggatacggagaacgcggtatgccacggaaccccttaa

SEQ ID NO: 278065 - DNA, 276 bp, Morganella morganii; identical to SEQ ID NO: 275992

SEQ ID NO: 278066 - DNA, 450 bp, Morganella morganii
atgtataaaaatattctggtagcgattgatatagctgaggatgatatttttggagaaggactgacatcaaagcttccgccacacgttgaatatatggctgataaaacacatacgaacgtacacttttttacagtaattccatttttcccgaatttcgcatcttatgcgcgggaatatgacgtattgttggatgaaagaaataaaatcacagacaaggcactatctaaacttatttcaattactaagatttttaatattaacccggccaatacccaccaccatgtcaaaaccggcagcccgatagaccagatattaaggctatccacagatataaatgcagacctgattattatcgggtcacgccagccgacaataaccaccagactactcggctctaccgcagcagccgtagtccgctatgcaaaagcctcagttttagttgtccgctga

SEQ ID NO: 278067 - DNA, 678 bp, Morganella morganii
atgattgagcacgattttcagtacctgcgggatatggcgaccatcgcaatgactgatcacagcagcagaaccaaaggccagcttgaagcatttgagggatttgtattgggaaacacaacgcgctacccacgaagaaagccccgtgatattaccgtgaacggcagaaagataagccgggaaaccgaggcggtatcctgctggtcaacacactattccgtgctaccgatgccacttattgaccgggtggactatcagaactgctcctggcggcgggcaattatggaactggacgaggcagagcagtcctggctgctgtattgctatggtaaggaactgaagttctcacaccagaccaccatcaccgcctatgtatggaatgaaatgcaggagcggattaaaggccgccgggtatcgaagaaagtaaaagaacgactcagggcgctggtatggctggcagtacaggattacaccctgaacaaagacgggtattactatcagtctgaactggccgagctggtgggtgttgagcggaataactggaatatgcactatgaaaagcactggcaggaactgcgattgatttgtaaaaccctggactgtggagcgctgcggaaaatgagaagcaacagagcagagatatggcgcaaaaatacagctaaaacttgcaaaagtgaataa

SEQ ID NO: 278068 - DNA, 1017 bp, Morganella morganii
atgaattacctgttaaccggctttgttcagaaagatacccggatcctgatgtttaaccccggtgctgaaatttgcaacttccggaacggtgcccgttatgttgtcagtgcggctccccgttcaatggatggcattccgtccggccgcgttccggcagatgcacagccgctgctgacagatgagcgggtactgcgtttcctggacaatcctgccgtggtaaaagctgccggtggtttacagggatttcgtcattacgtttcatcagtaaatcattgccagattgacgatgaagcagatccgtatcatcaccatgaactgaccatgacccgccacaaaggcggttttatccggacgtgctggcatcatgacaatattctcaggaagggagagtactgccagcagcaggcggacaaaattctgttacgcaaccagcgggcatttgtggcacgcagtatctttaccgacctgcggctgcccggcggccatcttctgaatccttccgatttgttcacctggtctgtgatgcatcgtgtcagtgagcatcttccggcctttatctgctcttacattctgatgcagtcaccggaagaagagataaccggcaccatgacggagcattccatcgttcaccaggcgcgctcacacagccagattgttcaggacatcgtagagcagataaaaccggtcgttactactgatatagaaccggagccaccagcaagttttatgcggatcccgaagttaaagcgctgggagtgtccgaagtacctgcaatgggtgaagagtcagccgtgttgcgtatgtggtcagcaggcagatgacccgcatcacatcatcgggcacggcaccggcggtaccggcacaaaggcacacgatattttcaccatcccgctgtgccgtattcaccatgacgagttacaccgggatgtgaacgcctgggagcggaaacacggcagccagctggagttgttatttaagtttatgaaccggtcatacgggatcggtgtttttggttaa

SEQ ID NO: 278069 - DNA, 792 bp, Morganella morganii
atgagcaatctgattattgttgacggtattaatgtgcgccgggacatggccggtcgctattgcctgaatgatttacaccgtgccgccgggggtgaagagcgccataagccatctaactttatgcggatggaatcaacacaggcattgtgttcagaaattgaccgatgctcagatatgagcatcgcctctgtaaacaccattcgcggcggtacggagcaggggacatatgttgcccgtgaggttgtttatgcctatgccatgtggataagcccgctgttcaacctgaaggttatccgcacgttcgatgcggtggccggaacacagcaggcggtacagctggccgataaggtacaggcaggcgctatcctgctggagtctatggcgaaaacgctgaatctgtcgaattcctcaaaactgggcgggtatcagaaactgcaaaaaatggctggtcttccggatctggctccctcctatgcgattgatgcaccggcgggcgcggtggatggctccagcagaccgacaacctctctgactacgctgctgaaaaatcacaatgcagccttgtctgcgactaaagcatacaaacgtcttgctgaactggggattgtcgaacagaaagcccgtccgggttcgaagggtacacaaaaactgttctggtctgtcacatcaaaggggcttctgtacggcaaaaatatcacatctccggcgaacccgagggaaacgcagccgcatttctttgagagcaaatcagcggaactgctggcactgatgatgactccggcggtggcctga

SEQ ID NO: 278070 - DNA, 396 bp, Morganella morganii
atgatgctttacacccgaattgcggcagaggaaccggccggaactgaaatcacctccgggtacatcatggagaaatacggcgtatcacgcagtatcagccagtcagctgtcagggttttagcgaagattgaagctgtcacgccgacccggtggcgggggaatgaccggatggctttccggatattgccggatgcacaggagaaagtccgcgaatatgaggaactggtggcagcctgtcggcggggagtaaaaaaggtccgctgtacggacccggtaccggaagagaaccgggccactctcaccgaacgggaatttgtatccgtctataaccggttatttacggttttcacggcaaagcagcgggaactgagaagaaaaaacggtctggcgatgtga

SEQ ID NO: 278071 - DNA, 885 bp, Morganella morganii
atgagcatgattttaactgcacgggctttgcagataaaaacaggcaacccgctgcgaaaactggtactggtcaaactggcggacaatgccaacgaccagggggaatcatggccgtctgtgccgtacattgctgagcagtgtgaaatatctgaacgctcagtgcagaaccacatcaatgcactggtgaaaatggggctggttcgtgttgagtcacgaaaatcggccaacggtctgaaccagtcaaatatttatcatctgcgcctggatgctaccgttgtgagtggtgaatctcctgcaccctgtggtgcaaatcctgcgggggtgagtggtgcaaatggttcccggactggtgcagcagatgcatcgggtggtgcaaatggttccggtagtggtgcaggagctgcacccggaatcagtcatgatccagtcatagatccagataataaaaatattaatcctgtttacggaaaatcaaaaagcaaaaccgtgatgccggaaaactttgctccgacaccagaacacattgagcaggccaaagccgccggtctggacattcaggacgagtttcagaagttcagcgattaccacgccagcaagggtacgcagtatgtctgctggaactccggtttcagatactggctgaatacggccgccggatttaaacgctctgcggactcaaagaacatcgacaccaccgagtgcgatgaagtcttcagaaaaatgttctcatcctccgactggaagccagaaaaccgcgtacaggagctggtcgcaaaacacaaatcctacattgggcggatgaatgaaattgccggacgagcagcatttcgcgggtactggaaacaggccacagagcaggccgcaaaagaacgggaggctgcgtga

SEQ ID NO: 278072 - DNA, 192 bp, Morganella morganii
atgcctgaagaaacagctgacaatctgaaccggtattacaccgataagcgaggacggaaagtccgtgttgtccggtttgaccggcaaaacagccgggtgattttcatgcgtgagggctatgaacatccgtgttttgaaccactgaagacctttcaggaacggtatacacgagtggatgaggtgaaaccatga

SEQ ID NO: 278073 - DNA, 465 bp, Morganella morganii
atgaaaaaccaatccctgaaagaagttgtaagagagatgtgcagtctggtccccggaggacgtgatgcaatggccggttcccttggcctgtccctgacgtcattcaataaccggttttatgagaaaaacggctgccggttctttgatcatcatgacctcatggtgatgcaggaagtctccggaactgtgctgtatgccgaatatgttgcggctgagtccggaatgctgctggtggacagcccgaaaaaaagtgaaatcggccgtactgacttatacgaaaagagcgtcaggacatccgttatgcgcggggctgtggacctgtgtatcagtaaggctattgaggacggagaaatcaccacaggagaagcggatgcaatacggactgcacactacagagacatgcaggccagaacagacgaggttgaatccacgattattttatttacccagactcagaaagggtga

SEQ ID NO: 278074 - DNA, 645 bp, Morganella morganii
atggaaataaatgaaagaatacggctaaaacgccgcgaacttggaatgactcagcaagcactggcagataagaccggtgtaaatcgcgtgactgttaccgggtgggaaaaaggtgactaccaaccaaacggagtgaacctgcaacaacttgcagaagcattagaaactaatgccaaatggctcactgatggtgtgacagatgaacaaacaaatgtcagcttttcaaaattcaacaaccctcgtggtgaataccctttaatttcatgggttagtgcaggtaattggtgtgaggctctggaaccgtatcaccggaaagtaattgataaatggtacgagacgaccgtgtattgctctgaagaatctttctggcttgaagtaaagggagactctatgacttctccatcaggcctgagtatccccgaaggaatggtgattctggtcgatccgagggttgaaccggtatcagggaaactcgtcgtggcaaaaatcgactctgacaatgaggctacatttaagcagtacattgttgatgccggtaatcactatcttaagccactaaacccgcaataccgaatgatagaaataaatggaaattgccggatcatcggtgttgttgttgatgcaaagattgcccgcctgccataa

SEQ ID NO: 278075 - DNA, 213 bp, Morganella morganii
atgcaaagcgaaccaatcatcaccaccaacaacatgtcagcagacgaagttgcagcgtggattactgaaaaagaccaggcgcttcaaaaacttcaatcacttcgtgctgaacgccaaagagagatccgtgaccacgagcgcacgatggcccgcctcgatgaagacatcgccagatgggaagacctctgtgctttaacagtaaatccgcagtaa

SEQ ID NO: 278076 - DNA, 663 bp, Morganella morganii
atgactatgttaaatattaatgatcctcacggatttagagtggagcttgaaaaattaaagattttagttagtgaaactgatttgactttgcatgagaaaagtcttttgactaattgctttaagcaaattattttttataaccatatttcaagtgtggaatccttttcattttatttgcaagggataatttatgactctcttaattccataatttctattattaaaaaaatagagcgatattatcaacttaacattcgttcattagtagagcatatagcgagaatatctctaaataaaaagcatactggagagcagtttagcgactttgtaaggcatcgtgactttacttatttgaaaaaaaatcacagcaatgaaatatggaattttttacatcagacatattcaaaggcttgcctatatatacattcgtccccctccgctaaacttaatgttaactatacattttcccagttaatggtgggtgatactcaatcaacacaaaaaaaacaagtagaaactctccagaaatgtttaaatagcataacagaaattataataacactattttataccgagatatcgagctattttttaagaacaaaaacagagttaaaatttctgattgggacaaaattgtttgatggtttcattaaagatcattaa

SEQ ID NO: 278077 - DNA, 432 bp, Morganella morganii
atgatgaataataatttaaatagagagatggaaataatacataatataagatacaacgatgtatctattgaatcatttattggtaacttagtcttacttattttctcaaaagaactatttaaatataattttgaggtgtcagattttatctttaaagcgtttaatataaaatttcttccatatgccatacgttcaagaacattgatgaatgcaaaattatgtagatatttagtaactattgataaatatcaagttaaaaaaacatccattatcatatatgactacttaatgaatgacatcatccctaataaaattgaaataaataaaccaattgttatttatccagaaggatatgagaaaaacacaaaaaaacaaagtaatgcattaaaaaacatgaacttatggataaataaagaaaataataaaaaatga

SEQ ID NO: 278078 - DNA, 846 bp, Morganella morganii
atgtcagcgccagtagttagttttatcaatatgaaagggggcgtaggaaaaactacgctatgtgttggcattgccgaattcctcgctaattatagacataaaaaaatattgttaattgatgttgacccacaattaaatgccacgcagtctatcatggggaaatataatagaatcgaagaatatattgatgagttattaccaaatgaaaaaacaataagaaaggtgtttgaaacaaaaaaatcaatctcaacagagaacataaagctaacaccagatcaagtgattacacaactaactgataatctagatgtcattcttggtgacataagtataatatttgatacagatcaggctccaatacgaatacaaagaattaaaaaattcatttcagataatgacataagaaataaatatgactatattttaatagatagcccacctacaatatcaatatttacagatgcatccctgattgcatcagattattatttgacaccaataagaattgattactattcaattcttggggcggccaatttaatgaaagtaattgaataccttaaagaatcttttgattctaatattaagcaccttggttttatttatacaaacacacataaaagacaaacacaaaaaacaaaaaaaatacagaaagactttgaaagcaaccctatgttcattgataattattttttttcaaacagattatcctaccttagagatttaatggttggtgggagagggaatatcccctcatcatatactaagtcaaaaattgacattgaaaacatatgtaatgaatttgaaaacagaatcagtgctatagagagaaataatgatgaataa

SEQ ID NO: 278079 - DNA, 324 bp, Morganella morganii
atgacagcaattaacccaataagctatataaaaccagaacgtgatactgatggttactgggtgcatccagatgttccttgtttggaatcgaatcaggaaatagagcggtggtgcgatgagaacaatcttgaacaccaggtggtgtattgttgtaacgacattgataacttccacccgctgtggttcagctactttgaagaaggtgataccaatatttcagcgtgggaaccaacaaaacccgatggtgatggctggtttatcgcctggatagcaggcaatgaagacggcccgatctgtatgtgggtcagacttaaaaacctctaa

SEQ ID NO: 278080 - DNA, 828 bp, Morganella morganii
atgtctaatttagacggagccgctatttctcagattcaaaatatggctgttgctgcattaagtctggacgctgtaaataaatccctctgccctgctgtggttttaccgggtgatttcaatgttaaaagcctggagcacttacaggaaggtcgttaccgcttccgtggtgcgatggacacaaccagtatcgctgattttgtgaaatattctctgcaacacggtattgaagaaggtgtcagctgttttattgatgctgatgagatggctgctaaaaccatcttcaatatcggttccatcggtgaaccggggcatgctgataacacagccatggtatcactgaaaaagaccgcaccgttcgcttctctgcttaacgtgaacggtcgcaagtccggtcagaaagaactggcagaatggctggaagactggcgcgataacctgatggcgtttgatgcagaaggtaatgttatcgatattaagcaggcaatcaatgccgtacgcaaaatcaccattgaagcaagccgttccgcagatcatgaagacagtgatttcggcgctaagcgctctgtgatggaaagtgtggaagcgaaaagccgtgacatcatgcctgcggtattccagtttacctgcacaccatacgatgaactgtctgaacgtgctatcaaactgcgttacagcgttctgaccggtggtgatgtacctgtgctggtactgcgtattgttcagctggaaaaactggaagagcaaatcgcacaggaattccgtgatctgctggctgataaattcgaagaaactgaaatccagacgtatatcggtaaattcaaagcataa

SEQ ID NO: 278081 - DNA, 303 bp, Morganella morganii
gtgtttgaaaacaaactttctgctgcactgaatgaagtcgctttcggtaccaataagaacggcggtaccggtgaagtacatgtgatttttaaattcactcagtcagatgaagaccgggtgaagatatctcacaaactgaaaatggttaccccgaccaagcgcggtaaaaaatcggaagaggatacaaccgaaacaccgatgtgggtcggtaaaggcgggaaactcactattctgccggaagaccaggggcagctatttggtatcgacggcagtattgacgggaaattaaaagctattaattaa

SEQ ID NO: 278082 - DNA, 990 bp, Morganella morganii
atgagcagcaacgctttagtctcggtcatcattccggcatacaatgctgaaaaattcatcggccgcgctctggacagtgtgataaaacagacctggccgtcggtcgaaatagtcattattgatgatggttcgtcagataataccgccgccgtctgccgggagtatatgagcagccacgatcacatccggtatatccggaaacagaacggcggcgtttcatccgcacgtaatgaaggtattaaagcggcctccggatgctatatctgctttctggacagcgatgacacttatgaaccggactttatccggacactggtgagtaaagtcacacaggatgaccgggatttcgcctactgtttattcagaaaaatacattccgacggccatattacacagtcagtatgctatgacaacacagataccgttattaccgactttctgaactttgattattttgatatctgctgtttaatgctgaaaaaagagtttctggataagaataatttattttttgattcatccatggttgtgggtgaagatgttttatttatccttgaatgtctgaacaaaggcgccttttcctatattaaagagtatttatacaattatatttatcacagtgaatcactgatgaataaaaaatggaagaaggcggattacatcagtgacctggatgcctggaaaaaaattctttcttacatcgctgagacgtataataaaccggataaatcatccgttttcagtaaagtccgcgctaaagtattaagcctgcagattcagtttatgtggaacatgctggctaccggtctttacccggatttaaagtcttatatcaaagacttcagctaccataaatctgattttacattaatcagaaaaccgggaaaaaacaaattccgtctgaatattgtattatccggtaatattttcgtgtggcgtatagcacgtaaatttctgacaaagaaaaaaaacatcatccctgccggttag

SEQ ID NO: 278083 - DNA, 1545 bp, Morganella morganii
atgctgaaaaaatataaatacccgctgttatttgtcgctgccatgctgttgagttatctcaccaatacattcttgtatcagcgtgattcaaccggcccgcatttagccaccctgtttttggttttatgtaccgttattcttctgaactgtaaacactggctgcctgccgttgcaggatttattattacactaattttttcactggaagtcggttatttcaccgaattccacgaacgaatttctgccggtgttctcgattcagcactggaaacaaataattctgaagcaacactgatgctggggcactatttatattccatcatattgcctgccctgtgcataagcgtattaatttttatctgcttccggagaaaaagactccgccttccccgctggtttacattatcaccggtgttcattttcggctttctgatgatttccctgctccgtgaagtcatcccggaataccgtaatttatccattaatttcagcgaagacccttatgaactggggacgtatctccgcgagaaatttcctgttgtcgccggaaatattatgtatgtttcctccgttgctctcagccatgacaagtatacggagaattatcctgaccggaaaccaaaccgggtgctggcgtctgccggaaaaccacagaataaactcatcatctttatcatcggagaatcatcatctccgtccagatatcatatctacgggtattccaaagaaacaacaccggaaatggaacgcatttttcagggtgacaaggcctgcgtgacagacaaagtgcattcatcctccccgataacacgggattccatttcattgtcactttcattttacacaccggaaagcgaagaaaatttattccgtcagaaatcggttattgaaatagcacaggatcagggatacaaaacttactggctgggcgctcagtctctggtcggcgttaacggttcaaaatatggctatcttgcccggcggaataatactgttattgtggaagaaaacaatgacatgaaactgcctgagttattaaagcaggcgctggccgagcctgatgaatacaaatttattattctgcatttatggggcaaccacatgccttatacaaattatacagaaacagaaaagcagcagctgaatgacgccagtgactatgatctgaccattcgtcacaccgataatgtgattggccgtctttatgatgaagttgaatcagtaaccgatgactatattttcatctacacctccgatcacggagaaattgtcggtaaaggccacggtttttccaaaggcgcggatcaattcctgattccgtttttatataaatcagggaatccgtcttatggctgtgaatttattgaaaaataccgcaatcaggatggctggatcagcggattaatgaacaaatatattttatctgaactgcttggttattcattagaccagtcgattgcggaaccggataaacagcatgatcggatcctttcaactgacggttatgcgattccgttttcatcttatttcaacaagaataagtaa

SEQ ID NO: 278084 - DNA, 138 bp, Morganella morganii
atgatcagcctgcggaacaaagcaggcagagtcttatacgggaaagtgagcaatacagagcggatgtggcggaatgtgcggaggtatgcggttcagaatacaccggctgacattagcggtgtggtgcgtcacgggtga

SEQ ID NO: 278085 - DNA, 402 bp, Morganella morganii
atggcaattaacgtaattacagtcagcggcaatctcggaaaggattgtgagcaacgatggactccggcagggaaagccgttgcatcgttcagcctaccggtgaaacagggatatggcgagcacgaaaagacatcgtgggttacctgcaaaatgttcggcgcgaaagctgagaaattgccagaacacctgaaaaaaggaatgaaggtgacggttactggcgagttcatcatggaggaatggacaggtcaggatggcaataaacgatcagcgccggtgattatcgtgaaccagttggatttcagcaataatcaggcaggaagccagaagccgcagacgcagacgcagcaagctccagcacggaatgagccaccgatggattttgactatgatgttccgttttag

SEQ ID NO: 278086 - DNA, 165 bp, Morganella morganii
atgaagacatacacaatacaggatgctcaggaagagcggcaacggattgccgaacagcgcagaaaacaagagcagaaagaaaaggatgattactggtttcgtgaaagtgtcggattgccaaacggacgggtaccggcagaatttttaagcggagaattcacatga

SEQ ID NO: 278087 - DNA, 177 bp, Morganella morganii
atgtcgctgatgactgcgaaacaaaaacacaccaaggaacaggttattgagttgttcaatcaggctgacatggatgaaaagcagattgagcagattgtgtcggagtggcgttggcgcagggagaacgccaaaacaagccgcattctccatcagtgcagaatgaggctaccggcatga

SEQ ID NO: 278088 - DNA, 549 bp, Morganella morganii
atgccgatgtttaaagtaacgtgtaaatggaacggaaagccatgggaaaaggatatcgaggccgaggatgaggccgactgtacagaacacatgtatctgtttggtgtactgattggcaaagccgatattcaagacctgcaattaactgagataaaggagaaaaaaacaatgtcagggcacccacatgcagacctgatggctaaagccgcagagatagcgaagacggataaagagtggtattcacaatttcagcgcctgattggcggtgaatggcagtcccctatcgccgagtttgtatttctacctgaaatagaataccgcatgaagccgcgctatatcgacattaatggatatcaggttccagaaccggtgcaggagtcactggagtacggaacgggttactgtgttgtgggtctcgatggtattgattatcaacgctggtgcgatgatgaagacgatgaaaatctacttaaacaagggcgcattcacctaaccagagaagcggcagaagcccaccgttccgccctgatctctttcacacagaagtaa

SEQ ID NO: 278089 - DNA, 198 bp, Morganella morganii
atgagtgacgaacgagaactgatttacagtgaagtatgcagagtaacaggcagagcggctattatgttactggattcacggcagatgataacgaaaggaaatatcaggcaattgctgtactcccataaagaacaagaaatagacaggtttatgaatgaggtctatgaggttgctatcgacctgatgagcgataactga

SEQ ID NO: 278090 - DNA, 429 bp, Morganella morganii
atgtacaaaaatatccttgttccgattgatgtatgggaaaaagaactcactgatatggttactcctcatgttgaaagcctcgctaaacttgaagatgcccgtatccattttcttgcggttataccagcattcccatatggtggttttgaaagtggtttgtctgtcgcggatctggaaaagcgactgatagattccacaaagaaagaattaggcgagataatcaggaaattcagtttgccggaggacagagcagacagatatatcgtaattggtcgcccaaaagacaaaatacttgaacgtgccgaagctattagtgcagacctgattatcatcggctcccgtcgtccgagtatttctacctatctactcggctccactgctgcggcagtcgtccgttatgccaaaacctcagttttagttgtccgctga

SEQ ID NO: 278091 - DNA, 438 bp, Morganella morganii
atgcgtgatattcgccaggtgttagaacggtggggggcttgggttgttgataatcaggaatcagtatattggtcaccaattgctgccgggtttaaagggctgatccctgaaaaagttaagagtcgtcagcaatgtactgataatgatgctctggtgatatccggcattatggcaaaactgaacatccgcaacagcgatatgcatgatctgctttttgattactatgttttcggtaagacgtttattcagttggccaagaaatacgggtgctcagacactcacatagggaaaaaactccagaaggcagaagggctggtggaaggaatgctcataatgggagatgtaaaactggaaatggacggtacatcacatcatggaggtatgcggacatttatgaacaaattacatgatttaaaaattaatgctttacgatcgtaa

SEQ ID NO: 278092 - DNA, 930 bp, Morganella morganii
atgtattctctgaataaattttctatcaggcttcttcacccaaggtacattttaacctggattggtatcctgttgcttttctgtttggttcagatgccttatccatggcttgtgtttttaggcgataagttaggtcgtttttctggtttgttcctgaaaaggcgggtatccataattaaaaaaaatttagaattatgttttcctgacagaaataaaatccagatagagagtatggttgcaagcaacctgtcatctttagggattgcattatttgaaaccggtattgcctggttctggaatgacaaaaaaattaatgaaatatttagagtaacgggttgtgataactttaatgatgtatatgacaaaaataatggtgttttaattattggtattcattccatgtcgctggaacttgggggcagagttatggggctgtgttttcctgtaaatgctatgtatcgtccccacaacaataaagcaatggagtatatacaaacaagatgccgaagccgttccggaagcgggatgatcgaccgtaagaatctgaagtttatggtatcggaactaaaacgcgggcaggctatttggtttgctccggatcaggactttggaactaaaggtactatcttcgccccttttttttcggtagctaatgcttctacatcaaaaggagtggcagctatagccaaattatcgaagtcgccgatacttactgcaacgatgataagaaataatgaaagtggtaagaggccttatgaattaataattggtaaagaaattgctgattttccgtgtggagatgacctggcagatgctgagaaactaaatcagattattgaggcagaaatcatgcatgctccggaccaatacttgtgggcacacagaaggtttaagaccagacctccgggagaaaattctctgtacaaataa

SEQ ID NO: 278093 - DNA, 435 bp, Morganella morganii
atgtcagggttgagccaatcaaagttaataagtcggttgcttcagtggatcagcagtgcggcactgttacttttggcaattatattgattgtttttttgataaaagaaacaattatccttgctgctttgttatttaaaaaaaatgacccggtgtcgctgtattcattagttgatgggataattatatattttttatattttgaatttattgcattaataatcaagtactttcaatcaaactatcattttccgctgcattattttttatatatagcaataacagcggttatcaggctggtagtagtcgaacataaacaaccatcattattaatcgtatattcaattacaattctgatattagtatttgctctttatgtagctaatactgaaaaaccaattcttaaaagaaaaaaggtaaactgcgaagctgagtaa

SEQ ID NO: 278094 - DNA, 207 bp, Morganella morganii
atggattattatttaacgttgactgagagtgatagtagttttgttttacataaaattacatgtcaaaagttacagcaggctaaaagtacagcgtatgtcggatatttctggggagagcatgcagctattcagcaggctgttgttatagcaaaagggcctgttgttttatgttcgctatgcctgagtcaggatgataaaaaaccataa

SEQ ID NO: 278095 - DNA, 192 bp, Morganella morganii
atgcgcatgtctgacaaatattctagccctacagcatacgcctgggggcttataacctctacctttggcattttatctctggatcagtgggctattgttgccgggatcatctgtaccgtcggtacgttcctggtgaactggtattacaaacggaaggaactccagttgaaagcaggtgaacatcatgaataa

SEQ ID NO: 278096 - DNA, 477 bp, Morganella morganii
atgaataaaggcctggtaaaaaaagcaatggcggcagtgtgtggcggggcaatagctgttgcacttgtactggtcccggtgtttgaaggcatgaggtataagccttatcaggatgtcgccggagtatggacagtgtgtgccgggcatacagggccggatattcagcaggataagatttatacgcaggcagaatgtgatgcgctgctggaaaatgatctggctatcgtggcgaaaggggtagaccgacttatccgtgttgatattcctgtctataccagaggggcgatctactcatttgtctataacacaggtctgggcgctttttcccggtcaactctgctcagaaaactgaatgctggtgacagagccggagcctgtggcgaaatgaagcgctgggttttcgcagggggtaagccgtggaaagggttgatgacacgtcgagaaatagaggaggtcgtatgccacggaatcctttaa

SEQ ID NO: 278097 - DNA, 159 bp, Morganella morganii
atgccacggaatcctttaacgctgctcatcattgctatcatcctgctgactaccgttctgctgtcgatttgttatctgtattcactcccgaatcactgtaaaccgctgcctgacaacccgctggacggagtgatccattatgagtgtgaagtgctatga

SEQ ID NO: 278098 - DNA, 378 bp, Morganella morganii
atgaactggaaagaggcggtaattgccgcgctgtttattgttgccgcctggtgggtatatgacacctaccgggataaccaacagctgaaagtgagtaacacagcactatcaggccagttatcagcacagcaggcgataaacaccaccacgctttcagctgttgccatcagagatcgcgcagcaatcggcaacatcaaagccaaacagactgagggtacagagcatgtcaacgttaagacggttatcaaaactgttttcaaagacagtgaatgcgctgctgttcctgttcccgctgatgctgttaacgagctgcgcagatacgcgaccggaattaatacccgcaccggtgataccgattccgccacaactgaccgctga

SEQ ID NO: 278099 - DNA, 312 bp, Morganella morganii
atgattctgcataatgtgcttaaaactatatacatagacaatggcgacaatgattttttgaaatatgaaatcatgggggagcacggtggcgatgtaacaatagcgatcgtatcagcggaaattaagttagcagttggcggaatagagtgttatctgtgggctaaagtcggagagctaacatttgagtaccttgacccgccaaagagagggtcattccagcagactgtagcaatggaatctccgccggggagaagtatcagcaccgtaatgcgggaatgcaaaaaacacagagctacctggcaaagaccgtaa

SEQ ID NO: 278100 - DNA, 471 bp, Morganella morganii
atgccgggaccaccgaaaaccccgtcacacctgcgtttggtcagaggtaacccatcaaaacgcccgatcaataaaaaagaaccaaaaccgccttcaggggtacccccaacaccgaaacattttaccaagcaggggaaatactggtttaagcggattggggaagaactcgatgccatgggcgtgatgagttcgatggatgccaaagcgctggagctgctgatcgaggcatacaccgaataccggcaacactgcgatactctggacgaagaaggttacacctacacaacacagagtgatggcggcccactgataaaagcacacccggtggcggcaatgaaagctgatgcatggaaacggatccgcgcgatgctctccgagttcggtatgaccccggcagctcgccagaaggtaaccattaacacaccagccgaagaagaccctttcgaggcatttctgaaacaaagaaaatga

SEQ ID NO: 278101 - DNA, 3123 bp, Morganella morganii
atgacgcagcagaccaaaaccatcgccgaatcaaacaactttattgtgctggataaatacaccgccagacaggatggcggagaccgttatcagagtgaggaagaattagagcgcgaactgattgaggacctgcgtaatcaggggtatgagtatctgccggacttaacctcaccgtctgctatgctggctaatgtcagaactcagcttcaggcactgaatgacgtggtttttactgacaatgagtggcggcggtttaccgaggagtatctggataaccccggcgataccatcattgataaaacccgcaaaattcacaccgattatatttgtgattttacctttgatgacgggcgtctggacaatatttaccttgctgacaagaaaaaaccggtccgtaacaaagtgcaggttatccgccagtttgagcagaccggaacccatgccaaccgctatgacgtgacgattctggtcaacggtctgccgctggtacaaatcgagctgaaaaagcgcggtgtggctatccgggaagcctttaaccagatacaccgttacagcaaagaaagctttaataccgataattcattgtttaaatatcttcaggtctttgtgatttccaacggcacagatacccgctattttgccaataccaccaagcgcgataaaaacagttttgatttcaccatgaactgggcccggtcagataataccctgattaaagacctcagcgatttcaccgccaccttcttccagaaaaataccctgctgaatatcctgtttcattacagtgtgtttgatatcagcaataacctgctgattatgcgcccttaccagatagccgccactgaacggattttatggaaaatcaacagcgcatacaaagcaaagcactggcgcactaaagaaggcggcgggtatatctggcacaccaccggttccggcaaaaccctgaccagctttaaagcagcccggctggccactgagctggattttatcgataaagtgttcttcgtggttgaccgtaaagaccttgattaccagaccatgaaggaatatcagcgtttttcccctgacagcgtcaatggctctgacagcacagccgggctgaagcgcaatctggaaaagaacgataacaaaattattgtcaccaccatccagaaactgaacaacctgatgaaaagcgaagcggatttaccggtttaccgtcagcaggtggtctttatttttgatgagtgccaccgcagccagtttggtgaggcacagaagaacctgaaaaagaaatttaactgcttttatcagttcgggtttaccggcacccctatttttgccggtaaaaatgcgctgggtgcggaggataccgccggtgtcttcggcaccgagctgcattcttacattatcaccgatgctatccgtgatgagaaggtgctgaagtttaaagtggattacaacgatgtccgcccgatgtttaaggcgctggaaacggaaacggacgaacagaaactcagtgccgctgaaaataaacacgccctgctgcacccgcagcggattgccgaagtcacgcactacattctgaaaaacttccggcagaaaacacaccgggcttacccgggagcaaaagggtttaatgcgatgtttgccgtcagcagtgtggatgcggcaaaagcctattatgaaacctttaaagtcattcagcagcaggcggcggcgcagaacacaaactataaaccgctgaccgttgccacgattttttcctttgccgccaatgaagcgcaggatgcaatcggtgatattaatgatgagagctttgatgtcacggccatgaacagcagtgccagagagtttctggaatccgccatcggggattacaacgcccggtttaaaaccaacttcagcacagacggtaaccgttttcagaactactaccgtgaccttgccaaacgggtgaaaaatcaggaggttgacctgctgattgtcgtcgggatgttcctgaccggctttgatgccccggcactgaataccctgtttgtggacaaaaacctgcgttatcacggactgatgcaggcattttcccgcaccaaccggatttatgatgccaccaaaaccttcggtaatatcgtcaccttccgtgatttggagcaggcgacgattgatgccatcaccctcttcgggaaaagcaatacccgtaacgttgtgatggaaaaaagctatgctgagtatatgaacgggtttacggacgcactgaccggtgagacaaaacggggctttaccgaaatcgttgccgagctggaaagccgttttccggacccggccggtattgagtcagaaaaagaaaagaaagcctttgtcaggctgttcggggaatatctgcgggcagaaaatatcctgcagaactacgatgaatttgttgcgctgaaagccctgcagacactgaatctcagtgacccggccgccacggaaacctttaaagcggaacactatctggatgatgagacatttgcggaactgcagatgatacggttaccggctgagcgtaaggtgcaggattaccgttcagcatacaacgatatccgtgactggcagcggcgtgagcggtctgcggaggaaaaagagagcaccacggttgactgggatgacgtggtgtttgaggtggatttactcaaatcacaggaaatcaatctcgattatattctggggctgatttacgactaccacaaaaaaaataccgataaaaccaccatgaaagaggaagtgaaacggttaatccgcgccagtctgggaaaccgggccaaagagggactggtggtcggttttattgaaaatactgatttcagtgacctgccggataaagaaagtatcattgaggccttctacgcctttgcccagcaggcacaggcgcgtgaggctgaagccttaatcagggaggaaaatctcaatgacgacgcggccaggcgctatctgcgggcatccctgaagcgggagtatgcaaccgaaaacggcacggcgctcaatgaaaccctgccgaaactgagtccgttaaatccgcagtacaaaacaaagaaacaaacggtatttcagaagatggtcgcttttattgagaaatttaaaggtgtcggcgggaagatatag

SEQ ID NO: 278102 - DNA, 1182 bp, Morganella morganii
atgagtgagctgagttatctggaaaagctgctgaatgggactgagatcgaattgttgcctttatcttcactatgcgagctaataacgacaggaaaattgaatgcaaacgcaatggaagataatggagcttacccttttttcacgtgtaatgaagagccttacagaattaacacatatgcattcgatctggaggcaatactcatatcaggtaatggaagtcaggtaggacatttaaattactacaatggaaaatttaatgcatatcagagaacgtacatacttggagagtttaatgaaaatgtagatataatgtatctctattattatctaatgcatacattgaaacattatattcataaaaactcaaaaaaaggctctgttccatacataacaatgcctatgcttgagaattttacgttccccatcccttgccccaacaccccagaaaagtctctggcaatccagtctgaaatcgtccggatactggatgcatttactgcccttaccgctgagcttaccgctgagcttaccgcgcgtaaaaaacaatacgattactatcgtgatcagttgctgagttttaataactgcgaggtgaattggaagacgttagagtacctttgtgagtcaatttctgccggtggagatgttccgaaaaatagcgctaaaggacaaattaaaccaacccctgaatacccgtatcctatttatgcaaacgctacagatgagaagggattatacggttacactgataactataaaattgatagtgatgctgtaaccatctctgcgcgaggagcgaaagtcggatatcacacagtaagagaagctaagttcacaccgattattcgattgatagtcttggtcgccaataaaaatgtaattagtacacgatatttaaattatgttttagatatgactcccattagtagtactgaagggggaattccgcaactcactgtaccaatggtaaaaaagattactgttccaattccttttccagataatcctgaaaaatctttagccgaacaagccagaattgtcagtattctcgataaattcgatacattgaccagctcaatcactgaaggcttgccccgtgaaatcgagttgcgccaaaagcagtacgaatattaccgtgacttactgttcagctttccgaaaccggaatcggtgaacaactga

SEQ ID NO: 278103 - DNA, 1557 bp, Morganella morganii
atgacaagtttgcagcaacgtgctgaattacaccgccaaatctggcaaatcgccaatgatgtccgtggctctgttgatggctgggattttaaacaatacgttctcggtgcccttttttaccgttttatcagtgaaaactttgtcagttacattgaagccggggatgacagtatccggtacgctacgcttgatgacggtattatcacagacgatatcaaagacgatgcggtcagaacgaagggttattttatttatcccagccagctcttttgcaatgtggccgcgaaagcaaataccaatgacaggctgaatgcggatttaaacagtatttttgtggcgatagaaagctcagcatccggttatccgtctgagccggatatcaaaggcctatttgccgattttgataccaccagcaaccggctgggtaacaccgttaaagataaaaacagccgcctctcggctgtgctgaaaggggttgaaggattaaagctcggtaacttcgctgaacatcagattgacctgttcggggacgcctatgagtttctgatatcaaactacgcggcgaatgccggtaagtcaggcggggagttctttacccctcagcatgtttcaaaactgattgctcagctggcgctgcacggtcagaagcaggtgaataaaatctatgacccggcggcaggctccggctctctgctgctgcaggctaaaaaacactttgataatcacattatcgaagacggctttttcggtcaggaaattaaccatacgacctttaaccttgcgcgtatgaacatgttcctgcacaacatcaactatgacaaattcgatatccggctgggtaataccctgctggcacctgagtttaaagatgaaaaaccctttgatgcgatagtgtctaacccgccgtattcggtgaaatgggtcggcagtgatgacccgacactgattaacgatgaccgttttgcacccgccggggtactggcaccgaagtctaaagcggattttgcgtttgtactgcacgcactgaattacctgtcagccagaggccgggctgcgattgtctgtttcccggggattttttaccgtggtggcgcggagcaaaaaatccgtcagtacctggtggataataactatgttgaaaccgtgatttcactggccccgaacctgttcttcggtacgacaattgccgttaatattctggtgctgtcaaagcataaaacagatacaaatgtacagtttattgatgccagtggtttatttaaaaaagaaaccaacaacaacgtcctgactgacgaccatatcgctgacatcatgcgggtattcgacagcaaagccgatactatctatctggccaaatccgttacggctgaagccgttgccgccaatgactacaacctgtcagtcagcagttatgttgaagcaaaagacacccgtgaaattatcaacatctccgaactgaatgccgaactgaaaacgaccgtcactaaaattgaccagctccgtaaagacattgatgcgattgtcgcagaaatcgaaggtaatgaggcacagtcatga

SEQ ID NO: 278104 - DNA, 222 bp, Morganella morganii
atgaataccatcaataccaccacagccccttctccacttgacgaaccactcgtggacatgaaattcatcacccaatttaccggatcaacggataagtggttttacaagcagatacaggagggcaagtttccgaaacctattaaactgggatgcagttcccgctggctgaaaagtgaagtagaagcctggctgcaggcccgtattacggaatcccgggaatga

SEQ ID NO: 278105 - DNA, 1020 bp, Morganella morganii
atgaaagacgatataaccggtgaaatactggcgctgtcacaaacctacaataatggcacagagattactgatgatactacagaccgtgaatcactccgactgatagcgttgtataccactgcattaattaaaagaaagagtcaggctttaccttttagtgcgtgctattttggtgataaattacaaatcaaggccactaaaaccggtcagttattttatgaattaatacaaaacattctttttctttcccgtgtcaccggtaaccgtcgcaaattacatccggttatttcgctgattgtttctctggctgagaaatatcacattcgtcctgttccgatgctgtcagaatactatcctgattcagaggaggatattaaacagctaaatgaagcctattgtgaatttattcagtccgtggacagtaaagagtataaaactgctgtcagtacctttaagaacagtgcccgcaagaactaccgtttatgctgccgctatattgaaaacctgtttgagcgccatgcaaagctgctggtggtacggacagacctgtcttacggaaagcgggtcagccacaaagttacagccggggatttaacccgtcaccggattgccctgtacaaagcaatacagcggttacccctgtttaaacactgcgtcggttatatcctgaaactggaatacggtcgtgagaaaggctttcactaccactgtctgtttttcttcaacggccagcacgtcagacgggatattacgatagccgggctcatcggtgagttttggcaggaaaccatcactgacggacaggggatctactttaactgtaaccgttataaatcagattaccgtatctgcggtatcggcatgctgcaccgcactgagagcctccggcgggaaggcctgatgaccgcggtgaactatatctgcaaaacagaccagtgggtgaaacttcaggtaccggggattagccggacattctggcggggaaccatcagaaacaaacggcgtaaaacacgccgctaa

SEQ ID NO: 278106 - DNA, 747 bp, Morganella morganii
atggcaacctaccgtatcgaccccgacctcgcatttatcggtcagtgcagcaatgaggacctcggtctgctggtctccgtcctgactcacgacagtaaagacggcaaaaaacggctggcggaatctctgaccacctcaccggaatatcagctcttttaccctgaccatcagaagtactggcctgccatctgtgccgagctgcaggccttcggggccaacagcctggtcacgctgctgcgcggtaacaaaggcgtgctctaccgtgaaatcctgctggatgtctgcagcagaatgaaagtaaagcatgaaaaggaagactgtacagaaacagcagaaatcaatctcctgatgcagataatgagaaccagcatcagtgatatgtcaccggacgcactggctgccttatcacaggaaatgaaactcaacctgactaatcccactccgcagctcgttatgatggctctgcaggcagcggtaaatgtctccggggtggctgcgctggaactcgcttccatcgcctctttcggcgtgatacaggcaatggggggaatggcaaccacagccggtacggccggaatggcttctgtattcttcggctcccgcattctgggcatactggccggtcctgtcggaattgcgctgagctccgcatggctgatagccgatatcgccggtcccgcttaccgggtcaccattccggcctgcatcattgtggcgtatctgcgccagaaggccctggcggcctga

SEQ ID NO: 278107 - DNA, 675 bp, Morganella morganii
atgcatacgtcagattcacgccatgaccggcttgcattccggctggccatgattatcagccgcctgttccgcggcgaaacactgtatccggcacagctcgcccgtgagtttaatgtctcggcccgcacactgcagcgggatttcagtgagcgcctggcctttctggatactgagccgtatcagggcggataccggctgaccgccggtcagcgcccctaccggacagacagcgatatcctgtactttgctgatatcacccatatcaccccgctgttcccctcgcttgaccgcaggctgctgtccgttctgctcagtccggaaaacggtgccccctgtctggtctaccacgaaccgccgcaatccgccccgacgctgttcggcggcttttatgtggtgacacaggcgattgtccgcaggcggctgctcagcttccgctgtgacggtcaggagcatgagggcatggctccctacaagctgatttattttcagcgggactggtatctgtgcggggaatggcagtctgccctgcgggtgttccggttcagtcagttgcagaacattgccgtgtccggacgccgcttccgtcaggatgcggttatcgcacggacagtcacccggcccgaatttatcaccgcattaccccattatcagtttatccgttcattaatcacataa

SEQ ID NO: 278108 - DNA, 1080 bp, Morganella morganii
atgatgaaaacccggttcaccgccgttctgctgtctgctctgttgctgacagcctgtgacaacagtgacagcacgcctgcccctgacccgcgtcagcagcaggagattctgtcggtaaagcagctgatttacccgtatgaccgtaccgtcacgctcggcggtattctggataaccgccctgaatgtaccgaaacagagtgggataccctgactgacgataaagggcgggaactggtcatgtaccgctgtcattacaacacggccgacaccctgaactacattaactcccgcctggaagcccgttaccggacagcactgaaaaacgtatccggacaactcagtaaggtgacgacatggcagcgtacagaaataaaaacccggactgaccagagtattgccactgcagaaaaagagctggggatgattaatgcgctttccgggtttgactcagcctttttgcacagtgaaatcagcaccggtaatgatgacaataaccgtaatatccgtcttagtgccgggaaattatggtccccccgggaaaacgacctgaatgaagagcagagagacctgattaaacagtggaacagcatcaccgaatcactgtcatttaatgaaggaaacagtatcgacagctggtttgaaaatccgtctgacaccctcagttcactgaagcaggaactggctgagctgaaggcagtgcaggcgcaggagcatcgggagggtgatgaccgccgccgtgaggatgaggcagccctgacccgcgcactggcctcactggaagctgctcatgctgaatcgaaagactggcaggtcacccaggaactgatgtggagtgtgaccggcggtgaaccggtattcaccggcggcaggtttctgctggatgaccggaacgggcagcacgaactgaggcccctccacccggtctcacgcggaccggtgagccgcggaccggaaatgctggccgatatttacggggacagaaccgggaccgatgcttaccgggagatggtggcattcgggttatatctgcatcaggtaaaagatatcagagtgccgtctgtcagcccgttcggttactga

SEQ ID NO: 278109 - DNA, 213 bp, Morganella morganii
atgtctgtctttaaattaatggccaccacactcggtgtggcaacggtggctctagctacttactgtgcctggcaggctgcggctgaggcggcagacaatgagaacgccaccacagccgaaaaagtggcggcgggactcagtgccgcgctggcctgctcagccgtgctgggcggtacccttgaccgtctgctgggccggctcttcccacgctga

SEQ ID NO: 278110 - DNA, 441 bp, Morganella morganii
atgacattatcagcaattttgctgcatgaacccgcagccatcaaaagcaatctggttcatccccgcggcagagacacattctggcggttttatttcggcagcgtgccgggctggcatcgcctggaaggcgacatttttaagatgatggataatctgtgtgacatttatcacggtgcattctgggaattcagcatgcttaccaacggtggcgcatttatctggcctgacatgattgaaacatcactcccgatggttaacccgcataacggcaatgacgcggaactgagccccgaagcggccggtatcgcggtatgtctcatcacttacagtctctggtcatttaaaactgaaagtccggagatggtggaatatttttatcagttgcgggactacgccttacagcatgaggagtgtgccgctattttccgtcttattgattaa

SEQ ID NO: 278111 - DNA, 333 bp, Morganella morganii
atgaacaatacagcagtacccgcgtcaccggcggcagtctggcagacactgctgacttacctgctgcaacagcactacggcctcactctgaacgacacggaattcagtgatgagcgcgtgattgaggcctgcctttgtcgcggagtgtcattgtgtgaggcactgaatgcctttgcggagaaatacgccctggtccgcactgaccggcgcaacaacggtatcactgagccgtcacacagtatcactgcaaccgatattctgcgggcacggaaggcaaccggcctgataacccacctcagcagctatgccaccagcagacactctgctgcataa

SEQ ID NO: 278112 - DNA, 1035 bp, Morganella morganii
atgagtgataatcttcctgaggcaccacagggcgaatttattctgttccgcagtgaagatggtcagacccgcgttgaatgccgttttgaatctgatacgctgtggttatctcaggcatcaattgctgaattgtatggaaaagatgtccgtacagttaatgagcaccttgtgaatattttctctgagggagaacttgctcaaaacgcaaccatccggaaattccggatagttcgattagagggaaatcgtcaggtttccagggagatagaccactatagcttacctgccattctcgctgtcggttaccgcgtccgctccgttcgcggcacacagtttcgccagtgggcaacgcaaacactggaacagtatctgatcaaagggtttgtgatggatgacgagcggctgaagaatccgcctgttggtcagtctgtggtgcctgattactttgatgagatgctcgaacgtatccgtgatatccgcgccagtgagcggcgggtgtatttacggataaaagagattttcacgctggcggcagactacgaaccttcaaataaagaaaccacacgcttttttcagaccatccaaaacaaactgcattttgcctgtaccggcatgaccgccgctgaacttatcgccagtcgtgcagatgccaatcaaccggatatgggattaacaaattataaagccggtgaagtccgtaaaactgatgtgacgattgcgaaaaactatctgcgtgaaaatgagctcaaagaattaaaccgcatcgtcaatatgtggctcgactttgccgaagaccaggcgttgcgccgtaagcaggttttcttacaggattgggatactaaactggatcagtttttaagtttcaatgaccgcaacgtattgcagggcgctggtgggatcagtaagaaagcagctgatgaaaaagccaaagacgtatttgatatatttgaccggaaacgccgccggttaaaagagtcagaaggggcgagagcgaatatcgcggcactgagagatttgctgaaaaaagggaagtag

SEQ ID NO: 278113 - DNA, 1233 bp, Morganella morganii
atgtttatccataaaattatcacaccgatgtttatccggcgctttgaatgcgtcggttctgaatgcctgtcgcactgctgccaggactggtttatcagtattgataagaaaacctataaaaaatatcacagtgcggacagcattgaaattaaacagatttctcaggaacatgttcttaaatcggagcgtgccggtacatatgcgtatatccggctgacagaagaaaaacagtgtccgtttctgacagaaaagcggctgtgtggtgtttacagtaagctcgggccttcggcaatgagtgatacctgccgtgaatatccgcgcagtgaaataaaatatcagaatgcgacgttcaaacgtttgtcactttcctgcccggaggttgttcgtcagttgctgttttccgccgatgccatgcagttaacagaagaagagcagtatctgaaaaaagtaccgcaggatgcggcgctgactgatccgcaatacctgatgtacctctggtgtctgaatctggtgcaggtaccgtcaccggagtttgaggataacctctatgccgttatgcagctgctgacgtttatcagtaagctcaattatgacattgaagcgaattttgatcgtattcagggcgtgtatgaatttctgctcaatgcaacggaaaacggagaactgacggcagagcgcagagcactgccgcacccggtcagttttcagaccgcagtattaagtgtttacggtaaatttattcccaggttatcccgcagtggtacttttttattctccacttatatcaatacgctgaagcaactcggaatggatgagcaacagaccgcagtacgcacggaagaaaacatggcgcgtctgcggtcagaatggaaagtacagcagcagaacagttgtctgaatcaaccatacacactgcgtaatctgttttcctatctgctgtatcacagccagtttccgcatgcggctaatttcgccggtggtgttaccggttcccgcaatgccttgtctcacttcagtctgctggtcatggattatttctatttgcggaccaatctgacggcgctggcggtaacggaagaacgggtactgaaagagagtgatgttcagcttttgctgggcgcctatttctcactgaaaatgcatgtgggtgatattaatgcagatttactggcactgatggaacgttgtcagatgagcgatgcaatcgcctgtatctgcctgctggataactga

SEQ ID NO: 278114 - DNA, 660 bp, Morganella morganii; identical to SEQ ID NO: 52324

SEQ ID NO: 278115 - DNA, 378 bp, Morganella morganii; identical to SEQ ID NO: 16790

SEQ ID NO: 278116 - DNA, 2967 bp, Morganella morganii; identical to SEQ ID NO: 15276

SEQ ID NO: 278117 - DNA, 561 bp, Morganella morganii; identical to SEQ ID NO: 15275

SEQ ID NO: 278118 - DNA, 201 bp, Morganella morganii; identical to SEQ ID NO: 5005

SEQ ID NO: 278119 - DNA, 1014 bp, Morganella morganii; identical to SEQ ID NO: 80749

SEQ ID NO: 278120 - DNA, 498 bp, Morganella morganii; identical to SEQ ID NO: 15298

SEQ ID NO: 278121 - DNA, 780 bp, Morganella morganii; identical to SEQ ID NO: 15299

SEQ ID NO: 278122 - DNA, 348 bp, Morganella morganii; identical to SEQ ID NO: 6026

SEQ ID NO: 278123 - DNA, 840 bp, Morganella morganii; identical to SEQ ID NO: 6027

SEQ ID NO: 278124 - DNA, 204 bp, Morganella morganii; identical to SEQ ID NO: 6028

SEQ ID NO: 278125 - DNA, 1206 bp, Morganella morganii; identical to SEQ ID NO: 6029

SEQ ID NO: 278126 - DNA, 306 bp, Morganella morganii; identical to SEQ ID NO: 6030

SEQ ID NO: 278127 - DNA, 765 bp, Morganella morganii; identical to SEQ ID NO: 6031

SEQ ID NO: 278128 - DNA, 585 bp, Morganella morganii; identical to SEQ ID NO: 6032

SEQ ID NO: 278129 - DNA, 1239 bp, Morganella morganii; identical to SEQ ID NO: 6033

SEQ ID NO: 278130 - DNA, 906 bp, Morganella morganii; identical to SEQ ID NO: 6034

SEQ ID NO: 278131 - DNA, 378 bp, Morganella morganii
atgaactggaaagaaacggtaattgccgcgctgtttattgttgccgcctggtgggtatatgacacctaccgggataaccagcagctgaaggtgaataacacaacgttgtccggacaactgtcagcacagcggacgataaacaccattacgctttcagccgttgccatcagacaccgcgccgcactcgacaacatcaaagccaaagaaacggagggcacggagaatgtcaaagttaaaaccgttatcagaacggagtttaaagacagtgagtgcgctgttactcctgtttcccctggcattgttgggaagttgcagcaatacgaaagagacattcgtgcccgcgccggtggtgccgatcccgccacaactgacggctga

SEQ ID NO: 278132 - DNA, 159 bp, Morganella morganii
atgccacggaaccctttaacactgatcatcattgctatcatcctgctgactactgctctgttggcgggttgttatctgtattcactcccgaatcactgtaagccgctgccgggtaacccgctggacggtgtgatctgttatgagtgtgaagcgccatga

SEQ ID NO: 278133 - DNA, 477 bp, Morganella morganii
atgaataaccgattatttaaaaaagtcatggccgcttgtgccgccggggcgattgccggagcgctggtgctgatccccgcgtatgagggtgttgagtacaaaccttaccgtgatgtggccggagtgcttaccgtatgttatggccataccggcagtgatattcagcccggcaagttgtacacggacgctgaatgtaaggcgctgctgcatgacgacctgacgaaagtccggcgcgcggttgacccgatgatcaaagtgccgattgatgacaatagccgggcggccatctattcatttgcatataacaccggaaccggtgcgttctcgcgttcgacaatgctgcgcaaactcaatgccggtgatatcgcgggtgcctgtgacgaaatgaaacgctggacatttgccggtggtaagcagtggcagggtctgattaaccggcgcgaaacggagaaagcggtatgccacggaaccctttaa

SEQ ID NO: 278134 - DNA, 192 bp, Morganella morganii
atgcgcatgcctgacaaatattccagccctacagcatacgcctggggacttataacctctgcttttggcgttttatctctggaccagtgggctattgttgccgggatcatctgtactgtcgggacgttcctggtgaactggtattacaaacggaaggaattccagctgaaagccggagaacatcatgaataa

SEQ ID NO: 278135 - DNA, 141 bp, Morganella morganii
atgagcctgtcgtattccaatgctcttattgttgctaatggtaaaaagccgcacacagctcttgtgttaagtgataacgaggtgattgatactgtggcggcgtatatgaaaaaggccgcacagagcagccaccagaattaa

SEQ ID NO: 278136 - DNA, 135 bp, Morganella morganii
atgttcggttattccgaacaactggataattgctgtgaggctctggtagcacagggcagtccggctgaactaaatcagccattatttttcgggcaaaaaaagccggtcaatatagaccggcaaaaggtttcttag

SEQ ID NO: 278137 - DNA, 1056 bp, Morganella morganii
atgaaaagtactgttaatttaaacagtattaatttagtcaacgacgactcactcagctatatcaaaaccctcccggacaattgcattgatttaatcgccacggacccgccgtattttcaggtaaaaacatgtgcctgggataaccagtggccggacgtttctgcttatctttcctggctggacgaaatgttggcagagttctggcgggtactgaaaccaaacggcagcttgtacctgttttgtggttcacgtctggcctcagatacagaaatgctgttacgggagaggttcagcgttctcagccatatcatatgggcgaagccttccggcccgtggcggcggcaaaacaaagaaagcctgcgttgttttttcccgtctactgagcggatcctgtttgcagagcattatcagggaccggtaaaaggaaaaggcagtgagtaccaccagcggcgggatgaactgaagaaaaatgtgtttaccccgctgattgagtatttccggcaggcgcgtgatgcattgggtatcacggcaaaagaaattgaccaggcaaccggcaaacagatgtcttcacactggttcgggtacagtcagtggcagttaccgaatgaagcggatttccggaaattacaggcactttttcagcggacagctgcagagtgtcagcgaaataacccgttataccgtgaacataatgatctggtcagtgaacaacacacactcaggcgtgaatatcacgaactggcagatcagtatcagttgttacgtcgttacttcacggtatccgttgatgtgccttataccgatgtgtggacattcccgccggttcagtattaccccggaaagcacccctgtgaaaaaccagccgcaatgatggagcacatcataaaagccagcagccgtgaaggtgacctggtagccgatttctttatgggatccggggcgacactgaaagccgcactgaagcacaatcgccgcattctgggtgtggagatggaggcggaacggtttgagcagactaaggcagaaataactcaactctccggaaattccggatag

SEQ ID NO: 278138 - DNA, 378 bp, Morganella morganii
atgagcgatattcagcagagttcggaatgtttggtgatgagcagaaatataaaagactggctggaagcctggggaaactggagttcgtcacgtaccggaacggagtataagggggtctcttacatgtcagcatcctcttccggaaatcggccgtggcttgatgatattgaaggcatggttatcgaccaggctgttggcagtctgaagaaatatgatatcgacgggtacaacattatctgcctgcactaccagaatcatatttcatgtcgtgcgattgcgaagcagtggaaaaagcgcccggattacatcacgtcatatttgtcacgggcggaagcctatattacgggtgtaatccatgcgacattgaaagccgcctga

SEQ ID NO: 278139 - DNA, 789 bp, Morganella morganii
atgagcaatctgattattgtcgatggtattaatgtgcgccgggatatggccggtcgctattgcctgaatgatttgcaccgggccgctggtggagaggaaaggcataaaccaccttactggctgagaaatgcacagacagagcaacttattgccgagttgcaaatctgcgactcgggtacacagccggtaaatgtgctgcgtggtggcaccgaacagggcacctacgtgtgcaaagaattggtttatgcctatgcgatgtggatcagtccttcattcaatctgaaagtgatccgcacgttcgatgtggtggccggaacacagcaggcgatacagctggctgataaagttcaggccggagctatcctgctggagtctatggcgaaaacattgaacctgtcgaattcctcaaggctggctgggtatcagaagctgcaaaagatggctgatcttcctgatctggctccgtcctatgcgattgatgcaccggctggcgcggtggatggttccagcagaccgacaacgtccctgactacgttgctgaaaaatcacaatgccgcattgtctgcgaccagagcatacaaacgtcttgctgagctggggattgtggagcagaaagctcggcctggatccagaggtacacagcgcctgttctggtcgataacgacgcgtggactggcatacggtaaaaacatgacatccccggcaaatccgcgggaaacgcagccgcatttctttgagagcaaatcagcggaacttctggcactgatgatgactccggcggtggcctga

SEQ ID NO: 278140 - DNA, 402 bp, Morganella morganii
atgattctctatctcaaaattgcaactgatatcccagcgggtactgcaatcacgacccgctacatcatggacaaatacaaagtgtcacgcagtacaagccggaatgcattagctgtactggctcatataggtgctgctgaggaagtaagccgtatccacacagaaggtaccgcttactcactgtcacctgacgcggcagataaggcacagaaatacagaaagctggtgatcatcatgcgggaaaacccgaatgaggtccggcgcaacaacggcccgatcctgtccagtccggcagatatggcagaacgcgggtttgtatctgcgcataaccggttgtttatggcgctggcggcaaagcgccgggagatgaaacagagctgcgcagtatacggctgcgcttga

SEQ ID NO: 278141 - DNA, 537 bp, Morganella morganii
atggccggatatgcaagcaaaacagcccctgagcacaaagacagttggcaaactccggagtggcttttcactgcgctggatctggagttcggattctatctggatgccgcagcgagtgacatcaatgcactttgttctcggtacctgactgaacaggatgacgctctcaaatcggagtgggtcagttatggtgctatttggtgtaacccgccatacagcaatatccgtccgtgggtggaaaaggcagccgaacaatcccgcatgcagaatcagcctgtcgtaatgctggtaccggaagacatgtctgttggctggtttctggaggcactgaaaacagttgatgaaatccgggtaattaccggcggccgtatcaacttcgttaatcccgtcacgggcgaggagaaaaatggtaacagcaagggctccatgcttcttatctggcgtccgtttatcaccccgcgccggttgtcttctttcgcgctgaaacaagagttggaagcgatcgggaatcagtatctggcggaggtatccgcatga

SEQ ID NO: 278142 - DNA, 243 bp, Morganella morganii
atgaacatgcgctcagaaagcaaagaaatttatggcgtgagtgtgttcccggctctggccgtccagcatcagatccgtcggtggtgggtactgcgcgatattcgtaaggattggcatttgcgcaacctggcaatcaaatgcttacgtggccgacctgatatcgctgacttttttaatatcagagatgagtacaccctgattcgccacaaggtgaagcactacctgcgtgagggggttatctga

SEQ ID NO: 278143 - DNA, 885 bp, Morganella morganii
atgagtatgattttaactgcgcgggctttgcagataaaaaccggcaacgcgctgcgcaaactggtactggtaaagctggcggataacgccaacgaccagggcgaatcgtggccgtctgtgccgtacattgctgagcagtgcgaaatgtcagagcggtcagtgcaaaaccacattaacgccttggtggaaatggggttggttcgtgttgagtcccggaaatcggccaacggtctgaaccagtcaaatatctatcatctgcgtttaaatgctgtcgttgtgagtggtgaatctgctgcaccctgtggtgcaaatcctgcgggggtgagtggtgcaaatggttccgggactggtgcagcagattcaccaggtggtgcaactggttccgatagtggtgcaggagctgcacccagaatcagtaatgatccagtcatagatccagaaaataaaaatattaatcctgttcgcggaaaaaccaaaagcaaaaccgtgatgccggaaaactttgttccgacaccagaacacaccgatcaggccaaagccgccggtctggatattcaggacgagtttcagaaattcagcgactaccacgccagcaagggtacccaatacgctgactggaatgccggtttcagatactggctgaatacggccgccggatttaaacgcgctgcggactcaaagaacatcgacaccaccgagtgcgatgaagtcttcagaaaaatgttctcatcctccgactggaagccagaaaaccgcgtacaggagctggtcgcaaaacacaaatcctacattgggcgtatgaatgaaattgccggacgagcagcatttcgcgggtactggaaacaggccacagagcaggccgccaaagaacgggagacagcatga

SEQ ID NO: 278144 - DNA, 189 bp, Morganella morganii
atgaaagaaacagctgacaatcttgatcggtattacaccgacagccgcgggcggaaagttcacgttatccggtacgaccgggagaacagccgggtgattttcatgcgtgacggctatgaacatccgtgctttgaacctctgaaaacctttcaggagcggtatacacgcgtgggtgaggtgaaaccatga

SEQ ID NO: 278145 - DNA, 192 bp, Morganella morganii
atgagcagattaactcatttggcaggctttgcgcaactccgcgttgctcctgtgaagggtggtaaagaccctgccgcatttgtttatacggtaagagtaccggaaggtttctcagaaacaaactaccagtttgtgaagtgggcggtaggtgattttaaccgcatgggtaagacagcaggagccgcggtatga

SEQ ID NO: 278146 - DNA, 498 bp, Morganella morganii
atgaagaacaaattaccgaaagaaattccaattgtggatcttaagcaacgggtttctgactttgtggaaagttacccaggcggtcatgaagccctggcggccattctgaatatcagattacccgcgttccgtaatcgctttaacgaaaaaaacggtaccggttatttcacgctgggtcagctggaaacactggaggatctgtcagaagagaaatttttagctgattacttcaatgagcgtataggccgtgtttcataccaaaagccggatgccggggcactggacagtgttgagctgcatgacctgcgtatgagggtagaccaaagaaaggccgctctgagcatgtgtatcggggaatcaatttcgaatgacgggtatatcgatgaaaaagaagctattgagattatcaggaaacataaccggtgcattgccgcagaaactgaatacaggcattcgcttatcgaaatttaccggaagatttaccggaagaaagggtga

SEQ ID NO: 278147 - DNA, 633 bp, Morganella morganii
atggagactgtaggaagtagaataaagagactaaggaatacaacgaaaacaacacaggttgagctcggcaagttctgtggtgtatcaggcgtagcggtcggcttttgggagagggatttaaatcaaccaagcggtgatgcactaattaagttagcgcaattttttaacacaacagaaccgtatattttgtacggaataccgtcaaagcatgctgaaaatgtcataacaacaatgcgaaaaatccctgtaatatcatacgtgcaggctggattatttactgaaagtattcctgaagatatatataatgacgcacttgaataccttgagacatcaataaaaacatcaccatcaagttttgcccttattgtaaaaggtgattctatgacaaacccttccggttcaccatccataccggagggagcaaaggtaattgtagacccagaggcggaagtcgttaacgggaaaattgtcgtagcccgccttgatggaacaagcgaagtgacgataaaaaaactagtaatagatggcccgagtaaatttctatcccccctaaacccccgctacccaaacatttccattaacggaaactgcctaatcattggggttgtccgtggtgtacaatacgaactctaa

SEQ ID NO: 278148 - DNA, 213 bp, Morganella morganii
atgcaaaccgaaccaatcatcaccacaaacaacatgtcagtagacgatgttgccgcgtggatcaccgaaaaagcccaggcacttcaaaagctggaatctctgcgtgcagaacgtgacagagagatccgcgaccacgaacgcactatcagtcgactcgatgaagatatcatcaagtgggaagagcgctgtactttaacagtacaaccgcagtaa

SEQ ID NO: 278149 - DNA, 861 bp, Morganella morganii; identical to SEQ ID NO: 6162

SEQ ID NO: 278150 - DNA, 543 bp, Morganella morganii; identical to SEQ ID NO: 84324

SEQ ID NO: 278151 - DNA, 228 bp, Morganella morganii; identical to SEQ ID NO: 6111

SEQ ID NO: 278152 - DNA, 1137 bp, Morganella morganii; identical to SEQ ID NO: 83602

SEQ ID NO: 278153 - DNA, 1371 bp, Morganella morganii; identical to SEQ ID NO: 83601

SEQ ID NO: 278154 - DNA, 861 bp, Morganella morganii; identical to SEQ ID NO: 5314

SEQ ID NO: 278155 - DNA, 417 bp, Morganella morganii; identical to SEQ ID NO: 10349

SEQ ID NO: 278156 - DNA, 594 bp, Morganella morganii; identical to SEQ ID NO: 10350

SEQ ID NO: 278157 - DNA, 1206 bp, Morganella morganii
atgaatagttcgacaaagatcgcattggtaattacgttactcgatgccatggggattggccttatcatgccagtcttgccaacgttattacgtgaatttattgcttcggaagatatcgctaaccactttggcgtattgcttgcactttatgcgttaatgcaggttatctttgctccttggcttggaaaaatgtctgaccgatttggtcggcgcccagtgctgttgttgtcattaataggcgcatcgctggattacttattgctggctttttcaagtgcgctttggatgctgtatttaggccgtttgctttcagggatcacaggagctactggggctgtcgcggcatcggtcattgccgataccacctcagcttctcaacgcgtgaagtggttcggttggttaggggcaatttttgggcttggtttaatagcggggcctattattggtggttttgcaggagagatttcaccgcatagtcccttttttatcgctgcgttgctaaatattgtcactttccttgtggttatgttttggttccgtgaaaccaaaaatacacgtgataatacagataccgaagtaggggttgagacgcaatcgaattcggtatacatcactttatttaaaacgatgcccattttgttgattatttatttttcagcgcaattgataggccaaattcccgcaacggtgtgggtgctatttaccgaaaatcgttttggatggaatagcatgatggttggcttttcattagcgggtcttggtcttttacactcagtattccaagcctttgtggcaggaagaatagccactaaatggggcgaaaaaacggcagtactgctcggatttattgcagatagtagtgcatttgcctttttagcgtttatatctgaaggttggttagttttccctgttttaattttattggctggtggtgggatcgctttacctgcattacagggagtgatgtctatccaaacaaagagtcatcagcaaggtgctttacagggattattggtgagccttaccaatgcaaccggtgttattggcccattactgtttgctgttatttataatcattcactaccaatttgggatggctggatttggattattggtttagcgttttactgtattattatcctgctatcgatgaccttcatgttaacccctcaagctcaggggagtaaacaggagacaagtgcttag

SEQ ID NO: 278158 - DNA, 624 bp, Morganella morganii; identical to SEQ ID NO: 10352

SEQ ID NO: 278159 - DNA, 624 bp, Morganella morganii; identical to SEQ ID NO: 10353

SEQ ID NO: 278160 - DNA, 387 bp, Morganella morganii; identical to SEQ ID NO: 10354

SEQ ID NO: 278161 - DNA, 1206 bp, Morganella morganii; identical to SEQ ID NO: 19666

SEQ ID NO: 278162 - DNA, 435 bp, Morganella morganii; identical to SEQ ID NO: 10324

SEQ ID NO: 278163 - DNA, 351 bp, Morganella morganii; identical to SEQ ID NO: 10325

SEQ ID NO: 278164 - DNA, 276 bp, Morganella morganii; identical to SEQ ID NO: 10326

SEQ ID NO: 278165 - DNA, 423 bp, Morganella morganii; identical to SEQ ID NO: 10327

SEQ ID NO: 278166 - DNA, 1695 bp, Morganella morganii; identical to SEQ ID NO: 31949

SEQ ID NO: 278167 - DNA, 363 bp, Morganella morganii
atgagcgcctacacggtatcgcaactggcccataacgctggggtgagcgtacatatcgtgcgcgactacctggtgcgcggcttgttacggccggtggcctgcaccacgggcggctacggcgtgttcgacgatgcggccttgcaacggctgtgcttcgtgcgcgcggccttcgaggcgggtatcggcctggatgccctggcgcggctgtgccgtgcgctcgacgcagcggacggcgcacaagccgcagcgcagcttgccgtgctgcgccagttggtcgagcggcggcgtgcggcgttggcccatctggacgcgcaactggcctccatgccagccgagcgggcgcacgaggaggcattgccgtga

SEQ ID NO: 278168 - DNA, 237 bp, Morganella morganii; identical to SEQ ID NO: 10330

SEQ ID NO: 278169 - DNA, 708 bp, Morganella morganii; identical to SEQ ID NO: 10331

SEQ ID NO: 278170 - DNA, 1269 bp, Morganella morganii; identical to SEQ ID NO: 80762

SEQ ID NO: 278171 - DNA, 498 bp, Morganella morganii
atgatccttgagatgggcctgaaatggcagcaaatcagcatgacatcggaagacgcacagttccttgagacccgtaaattccagctggaggaaatctgccgtattttccgtgtgccgctgcacatgatccagaacaccgaccgggcaacgttcaacaacattgaaaacctcgggattggttttatcaattattctctggtgccttatctgacccgaatagagcaacgtatcaacgccggtctggtgaaaccatcaaaacagggggttttttacgcgaaattcaacgcaggggcattgttacgcggagatatgaaatcacggtttgatgcttatgccaccggtattaactgggggatctattcacccaatgaatgccgggaactggaagagctcaacccgcgtgaaggtggtgatatctggctgacaccgatgaacatgaccacaaagcctgagagcagcccggaaaaagaggaaaagcaggatgtcgataatgactaa

SEQ ID NO: 278172 - DNA, 648 bp, Morganella morganii
atgactaaacagcggctggacataccgctgaaaataaagtcggtcactgaaaccggcgagtttgaaggatacggatcggttttcggcgtgaaggacagctacagcgatattgttgtgccgggtgcctttcaggcatcacttagtgaatggcgggagaagggcagtcttccggccatgctctggcagcaccagatttccgaaccggttggtgtgtataccgaaatgcgggaggatgataccggcctgtatgtcaaagggcggctgcttatcgaggatgacccgctgtcaaaacgggctcatgcacatctgaaggccggatcattatccggcctttctattggctacatcctgaaagactgggagtacgaccggaataaaggggcgtttctcctgaaagaaatcgatctgtgggaagtgagcctggtgaccttcccgtccaatgatgaagcccgggtcagtgatgttaaatcggcatttgcccgtggtgacatcccgtcacaaaaaagtattgagcgcgtcctgcgtgatgccggactgtcgcggacacaggctaaggcatttatggccgacggctaccatgctctctctctgcgtgacgcagaggaagatgcactggaaacacttaaatccattaattttaatcagtaa

SEQ ID NO: 278173 - DNA, 1212 bp, Morganella morganii
atggctgttgatcataaagatatcagtgaagtggcaaaagagctgaaagcgtcatttgaagaatttaagtcaaaaaatgacaaacgtattgatgccatcgaatcagaaaaaggcagactggccgagtcagtggaaacgctgaacggcagattatccgaactggacgagctgaaatcgtcgctggaagctgagctggcggccgtgaaacgcccggcaggtggtgtggcaaacaaagatgttgctgaacacaaaagtgcattcgaactgtttgtccgcaaaggtaaggatgacggcctggccgaactggaacagaaagccatgcagattggttctgatcctgacggtggttatgccgtgccggaagaactggatcgcaatattatttctgctctgcgtgacgaagtcattatgcgtcaggaatgtaatgttgtctcagtcggcacgccgaattacaagcgcctcgtgaatatgggaggtaccggcagcggttgggttggtgagactgatgtccgtccggaaaccagtacgtcaaaactcggtaccattgagccggtatggggggaaatttacggaaatccggcggcgactcagaccatgctggatgatgcctttttcaacgttggccagttcattaccggtgaactgacaactgaatttgcagcgcaggaagacgcggcattcaccagcggagacggcagcaaaaagcccaaaggattgctggcctacggcagtgatgataaagcggataaggagcgtgactggggcaaattgcaacacctgttgctgaagaaaccgaccgaactgaccgctgatgaagtgatgaaactgatttataccctgcgaaaaccataccgcaacggtgctaagtttatgatgaataacaatacgttattcaaagtgcgcacactgaaggattcccagggaaattacctgtggcagccgggcctgcaactgggtcagccgtctgcattactgggatatggtattgcggaaaatgagcagtttgctgatatggctgccggtgctgttccgctggcgttcggtaacttcagacgctgctacaccatcctggatcgtatcggcatccgtatgctgcgcgatccgtacaccaacaagccgtttgtgcatttctataccacgaagcgtgtcggcagcatgatggtggacagtaatgctgtgaaattactgaaagctgcaggtgcaggaggctga

SEQ ID NO: 278174 - DNA, 294 bp, Morganella morganii
atgtcattaccgacaattgaagagctgaaaaggcaatgctatatcgatggtgaccatgataatgatcttttactgcaatttttgagtgctgctgtatcagaagttgagcgggtcactaacagaaagcttaccccggaaaaacctgataaagacgaccctgataccttgtttttaagtgcggatatagtgctcagattaaaacagatggtcggattttggtatgaaaaccgggaggggcagtcattaccggactctttgtaccgccatttaagagattaccggcgcaggccgtaa

SEQ ID NO: 278175 - DNA, 327 bp, Morganella morganii
atgcaggctggtcgtctgagacatattgttgtatttcagagagctgaaatcacaatactcccgtctggccagagagaaaaattatgggttgatattggcccggctgtgaatgcggaagtcagacccgtcagtggccgggaactgctgaccgccggagcggaaatgtcagaaatcacggtccgcgtatggatgcggtaccggccggatattcatcctgcatgccggatggtatatcgcggtcaggtctacgatattcaggttgtgatcccggatgtgaaatttacccggctggaactgctgtgtaaacagggggtgaaagatggctga

SEQ ID NO: 278176 - DNA, 450 bp, Morganella morganii
atggctgatatgaggctggatttgtccggttttgctgaactgtcccgtgatctggaatcactcagccgggctgaaaatacccgtgtgctgcgggaggctgcgaaagccgcagcggatatgctgcgggatgaggtccggcagagtgcaccccgcataaccggcaggttagtgcgtaatatcgttaccggcggtcagcggagccgttataaaggtgaggttgtctcgggggtgtacatccggggaaccaatgccgccggaaccaacagcgacaacacactgaaaacggacgacccatgtaatgcgttttactggcgttttctggaaaacggcacatccaaaatggcaccacaaccgtttatccgtccggcatttgacggtaaagcggatgaggcagcggatctggcgctgagcaaactcagtcaggctatcgataaggtgctgagcggatga

SEQ ID NO: 278177 - DNA, 336 bp, Morganella morganii
atgaaagaatctgatttgttttctttgcttgacccggtgctgccgggcagggtttttccgtatgtggctccgcaggatgaacccaaaattcagccgccgtggtgtgttttttcactttatgataccggcggcgatgtgctgtgcggtcgtgctgagacaatgaccaatatccagattgatgtgtatgcaaaaaccatcgatgaagcccgccggatccgtgaactgtctgttgctgctgtttctccgctttcaccggcagagtttacagaaaagcagggctatgaatcggatacctcgcttttccgggccacgctggagtgtcaggtctggcaataa

SEQ ID NO: 278178 - DNA, 468 bp, Morganella morganii
atgccgagcaaatatgaaaaaacgcagggcacgaaaatcagtatttcaaagctgcctgcaacagaagtgaaccccgcatccgcagaatttctgccgctggcctgtgcggccaaagagatcagttataccggtgggcagaagtcggatattgatgtcacaaccctgtgctcaacggagcaggaaatgaccaacgggctggcctctccgggggaaatcacgatctccggtaactggtcaccggatgaaggtcaggatgttctgcgtactgcctatgacaaagacactattcatgcgttcaaggtggagtttccgtcaggtaatggttatgccttcctggcagaagtccgtcagaacagctggagtgcggcaaccagcgggctggtcaccgcgtctttcacgctgcgcatgaaaggtaagcctgttccgctgaaaaacggggcggtaactgagccgggaaagagggaataa

SEQ ID NO: 278179 - DNA, 384 bp, Morganella morganii
gtggcgaatcggaaactgtcattaaaagaactggcactcagtccaaaaaacgccttccgttcaaagatggtgaaggtacctgaatggagcggcgtcaccgttattctgcgggaaccgtcttcggcagcctggctcagatggcgtgagctgatgaataccggcgcagacggggatgaaaaattgtcagaggcagaacaggcgcagcgtaatctgcgggctgatgtggtgatgttttctgatgtgctgctggatgaagataaagagcgggtgttcagtgatgacgacactgaagaagtgatggctgtttacgggccggttcatgcccgtttactgaaacaggcgcttgacctgatgaccacgccggatgaagcggaaaaaaagtag

SEQ ID NO: 278180 - DNA, 273 bp, Morganella morganii
atgacactggcgctccggatggggcgcacagtggatgagctgaccagaacgatgagcgccggtgagctgaccatgtggatggcctttgaccgcctcagcccgatcggggacatccgcagtgacatacagacggcccatattgtctcatcgctgtacggcgcacagggcggcaaactcagcctgaatgatgcgatgctgcaatggggaaaaacgggtaacggtgaggcagatgacgggctggagggttttctgaaatcggtatctgaaacctga

SEQ ID NO: 278181 - DNA, 837 bp, Morganella morganii; identical to SEQ ID NO: 22759

SEQ ID NO: 278182 - DNA, 420 bp, Morganella morganii; identical to SEQ ID NO: 51548

SEQ ID NO: 278183 - DNA, 816 bp, Morganella morganii; identical to SEQ ID NO: 91913

SEQ ID NO: 278184 - DNA, 852 bp, Morganella morganii; identical to SEQ ID NO: 10372

SEQ ID NO: 278185 - DNA, 708 bp, Morganella morganii; identical to SEQ ID NO: 10371

SEQ ID NO: 278186 - DNA, 2973 bp, Morganella morganii
atgaaaaaacaatataatataattatgaaaaaagataactgtcgactgaaatgtatctttttcatggcttttgtttttttgccaaactcatatgcagttagcgatgaaaaaattgtatatattgatgatgaaagctcaacaaaagattgggccgtaactatttatgacagaggtgattttcttgttaagggcaaagatggaaaacaagaaataaccattaatcgcaatgccgcaaatattggaggggttggaaggcgatacgcatcaaaaaatatggataaaataatttttgatttagataaacttaatataaaccttataaataaaggcaataatgtttcagctataggaggtggagcctcacaattagatgcatcaaaaacagatatttttattaatataaatcaaaaaaaaacaggttggctaggtaagggcgagatatatggtgttttagctggaagttcagttacgatgggtattaatggagataacgataactttaattctagtcaatatgctattgcggagtttaaaaacttagatattaaacaaaactcagatgcatctgctttaacactaaataacgcattaagggctatccaaggtgcttacaaggattcaggtactggtccagcaggtaaaataattgttaatggtgatacatctatttatctaaatggtgcaagacaagaggctatttatgtatcaggtaaaggtaaaggttataacggtaatgaaggtgtaattagttctgttatattaaaaggcaataccaatatcatcctgaataatgccgcaggaagtgataatagtgctattaaaattggaaagacaagacaaataggtacaggacaaggatattttgaatctatgggtaatttatctatagatatgaaaaattcgaaaggatctgctgtgaaattagctgtttctggttctgaattaaaagcagattttgatagcagctcaactaatattaaaaccaatggtaatgcaataaatatagggcaaaatgattggggaactcaattatcagctaatggcattaaagcatctttcaaaaatgctaattttgagacaacatcaacaaatgattcattattgaaagtatttcaaaatcagggaagggtattgtttaattttaatggtgaaagaacaaatctagtcatgagagatgatcaaagttggttaattgatatagataactcaaaagaaaatgggtatgaaaataaagtaacccttaacttaaatgattcgtctaagattatggggttgtcaaatattgatgggaatagtgaactaatcttgaacctgagcgattcattatggcatcttaatgaaaataaatatggaagcatatcttcatttactactttgaacttgaatgattcctcaaagcttattgctgaaaataataacttcactttaaatggaactgtcaataatacatcaggcatcattgatttggtaaatcataaagatatcaatgataaaactaagttagttatattaaccattaatggaaattatactggtggtaatattaaaccaacggatgcaattccttttccagacggaaatagtcagttaattgttaacactatctggaataatgataatgactctgtaactgatcttctgcatatcaaaggtactgctaccggatacactcaggttcagacccaaaatagtattatcggtaatgtgactcgcggggatgctgaaaaatattctgttcctgttgtcacggtagacaaccacaaggaaggggctaatgccttctacggttttgcggataccaccggcgcggctcaggcccttctggtgcagaaagatgccaataattacacttggtatctggctaaaaatgatacacctgtagaccctgtagaccctgtagaccctgtagaccctgtagaccctgtaggtcctgtaaacccagtgaagccggaagtttccggatttattcgtatgccgacggcgaatatggaaatggggtataaccttatccgtacattgcatgaacgggtgagtgagcaacaaacaatggcctgggatgattgcacccagtgccagtcaactcaccgcgatgatcaggtctggggtaaaatgctgggtaacttagcacgggctgacggtgataaccgctatggttaccgttctaaaatgtggggggggcagtttggctatgactttaacgttaactataacgagaataccggctcacgtcgtcattccggcatgatggtgacatatgcacacgacacgttgaaatttaatgatcgtcgttctgtattctttgatactggtaacggacagtatgctgaaaaggataagcgtacgggtaccggtaaaagtgatatggtggcgcttggggcttatactacgttctacgataagaatggcagttacttagatttagttggtaatctggattacattcataacaaatatgagtctgtccgcggctctgaatcaagcaatgattcttacggtgtcgcagtatccggggaagtaggccggccttttgcgctgaccgataatggtatcagtaacggtgactgggaaattgagcctcaggctcagcttatctaccagtatcgtaccttcagtaatttcaaaaccgagcatgatgtcagtgttaatcaaaaagaccgtcatggattaagaggtcgtgcaggggtaagactggcgtataacaccggaacgccggaactgaaaaccaacacgatctattttgtgagtaacgttgtgcatgatttcattgataatgaccagacggtgaaaatcggttcagacagtatcaaagaaaaaactgcctctacctttggtgaagtgggcggagggattcagttaccggttggtgaaacctcctacctatatatggatgcccgctacagccattccctgagtaacagtgatggtaaggctgataatatgcgcggtaaccttggttttaaataccacttttaa

SEQ ID NO: 278187 - DNA, 1146 bp, Morganella morganii
atgttttcgctaaaaataggtaatggaaaaaacctgccgttagaaattatgttatctactattttttatgaccgccttttatttgaagtaacacgtaataatgagaaaatatattactctcttcttccaaacagggtttcgtttagaaaaaacaaacaactggttgatgataaaatagccatgcttcaagagcgctacaataatgaaatcagcatcataaatcctataagttatttttccgcattaactccagtcctgtatgtaatattatttttcaagactctattttctaaattacttattccaagccagtggatattggcatttagagaaaaaaactcaactgaatggtctaaaattaaatttgaaagtaatgagctaatggctgacccattcatatattatcatgactcaaaatattatatattatatgaatcattgaactatgataccaacaaaggctatattacaattggtatattagatagtaaaagcaaaagtatagttgagaaaaaaaccatcattgaagaagattatcacctatcatatccatttatatttgaaatggactctgaattatatataatgccggaatcttcatctaacaatactattgatttatataaatgcattgatttcccatataaatggaaaaaagaaaaaacacttattgataatattcttgctgttgattccaatctgattaaaaaagatggcttatggtatctattaacatctgaaaagagtaaaggaatatcattcggtgacgagttaagtctctatattacagatgacctattaaatggaaagtttattcctgccgcaggaaatccgattagtcatgacatttcaaaatcacgtaatggcggtttcatcactaatgacctcaggatatctcaggactgttcaaaacgctacggttataaaattaatttcatggagataaccgaattatcagaaaaaaattacagtgagcgttatattaaaagtataaagttaccattcggctcaattgcaatgcatacctataactacacacatgatatagaaataattgatttaaaaatcataaatttatcaccttattttctatatcgaaattttagcagagtttttaagaaattaataactagaatattaaaatga

SEQ ID NO: 278188 - DNA, 1791 bp, Morganella morganii
gtgccgtacccgtcccgctctcatgagcttgccggtctggccgccggtaccgcgttttatttccgcgcccggctggtggacaaaagtggtaattattcagcatggaccgattatgtcagggggatctctgaatttgatgcaggagaaatactggctgatttgtcagggaagataggccatgaccaattagcacaggacctgctgaccgaaatcaacagtaaagcggacagcagtgtggtcagtgctctggatgagcgtatgtcggatattggcggggaggtgactgaggcaacttctcaggtacaggcgttgtccggtaaactggacaaagtaaaggctgatttaacagagtcagttgttgttgatctggatctgtcagcattaaatgaaaatacttattacccggttattctccctctgacgacctcccgccgctattacttcagggtatttcgtacactggggcaatacggagataacaaacccggttatgcaactcacggctccgggggctttgccatgattgttgagtggcaggtgagtggttcaggatgggggactcagtctgaaaaccgtattattgataatgttgactggcgatggacaaatcagtctcctgtcatgggccctgcgcagttgactcacagctcggtggaatatgtgtatttacgcggaggcgcaaaatatcagctgaccaggcataaaagtgtcagtcaccggattgtcactgatacttacacaggtaacgggcaatctgttacaccaaaaggttttgtcgccggtgaaataccggtgtccggtgaacagcggtttaatgccacagcaaatgcggtgaaccggcttgaaacgagtgtgacagaggtttcaggaagggtcacatcaacggctcagcaggtgacacgtctggaaagtcaggtcggggcggattcggcaaaaattgaacaaacgtcaaaggttcttactgacttaaacggcaggatttctgcatcgtggacaatgaaagtccagctggacagcaaagggaataaagtcattacaggtatcggactggggtttaatgctcagggaaacagtcagtttcttgttaatgctcaaaattttgcagtgatatcgtcactgaacgggaaagtagtaaccccttttgttattcagaacggccaggcattttttaacgatgcgctaatcagccaggcaacaattgataagttactggtcggtaaccacatcagatcagtgaattatgaaacaggccggaacgggtattttctgaatgcgcagaccggaaatgcagaatttaacaatggagtgttcagagggaccctggacggtgtggacggtcgttttacggggacggtatatgcggagagactggtcggggatgttgcggttgccgcttcgtacccgcaggcatccgcacaaaatacacatggtggcgggggaggctggactacggcaacgtctgtaattacttacgcagggggaatgctttatgatatgacgttagtacttccttcgataactgccattattgaagataattccggcagcaatccgcgtccggtatcgggagaactgcggtttagtatacgtgtggatggagttggtcagcaggcaacttctcagtggtcaggacagagtgttatgggatcagctcatgcggttattcctcgtggacgaaagaatgtgaaaatagaaattgaagtgggagtcaggcataaaggcagggcacatgtggttctgagggaaggggttgtgatggccttcaaacgcagttccgcatcattcagatag

SEQ ID NO: 278189 - DNA, 1005 bp, Morganella morganii
atgctatgtcgtagtatttcccttgtattaatgtttcttcttattacatcctccgatgactatattatttatgtttggcttaatgttttatttgaccttgcaaactcaattttttctttctactatattattctatatagaaaaagggttttcttctcattgaaatttgttcggtttaataaactataccagcatttaaaaaaaatcatatccactttgtttatagttgatgttggttttttattttttagttttgataaagtttctctcggtgcttttgtttctacaacagaagttgcctattttgcattatccgaaaaaataattgttcttgttgttgttatttcctcaactatcactcaggttacattacccagactgtcaattttagcaaagacaaataaaagtgaatttttgctgttgataagaaaaatatatacgtcgttaatgatgattgtattgccatcatttattggcgtttacatcctaactcctgagcttttatttatctttggctcttatgaatttatgcctgcattagaaacaataaaaatattttcattctatatcttattattctctttcttgaaaatactggcaactcaagctctatttgctttgaataaagaaaagttctatattattcttctcatatccttttcaataattaatgtgatagtaaaatgcttaattaatgaaaaactaaattcgtctacaagtataataatcacattgtccttactgttcgccatgtcaattatcatttacatatatatcacatataaagaaaaaattagaatatctataataaataaaaacatatgtatatacctgattggttgtttacctatgcttcttattccactatttcggcaccaaattgatagtatctatattttttcctttttatctatttctctatctataattctatatgctatagtactactaattttcaaagaatctatttctcaatctctcattagaaaaatattgaaacgataa

SEQ ID NO: 278190 - DNA, 348 bp, Morganella morganii
atgcgcagccgcatacagctctgcggccttctctccctgcgtggccctgactttctgaacctccgtagccacactcagatccgccattttgcgggcatactgctccgcctgacgttccgcttctttctgctctttattgaaagcactctgggcgcttttacccgctttcagttccttactcagcttttcctgattccggtaggctgccacctgattatcaatgtatttctgccggttatcggcaaattcgggtttattcagcagaccgatatcatctgcggcaaactcagcctgccggataacacgggcttccccggtcagtgcggacagttctttgtcccgctctga

SEQ ID NO: 278191 - DNA, 1269 bp, Morganella morganii
atgagtattcatagtgccgatacaaataaatcacccggactgaccagcggaaccatgcttgttatagcaacagtcgttggcggcggtatgttttctttgccgattgcgatggccggtgtctggttttccggtgccaccgttattttgattttagttgcaattatgatgttactgaccggtctgatgttagttgaagttaacctgcattttgaaccgggcgccagctttaataccttcaccaccgagttactgggcaaaaaatggaatattgtcgtgggtattgccttcgggtttgtactctatattctgacgtatgcctatatctccgggtcatccgctgttctggctcagacgatattaaaatataccggtgtcgccctgccgataaaagccgcagtcgtgattgtcgcctgtctggtggctgcgattgtctggtacagctcattatgggtcggacgcatcacttctattttaattatcggtaaatttatcgcgttctttgccaccttctccggactggttgcacacgtggaaattgccaatctgctggattccgcatcagtggcaatacccggaacgaaatacctgccttatgttctgatgacgctgccgttctgtattatttcgttcggtttccacggtaacgtgccgagcctggtgaagttgtacggcaaaaccaaattccgctttattacccgttcaatcattatcgggacaatatttgcggtactgctgtatatcttctggctgggggtcacgatgggcaacatcagccgtgccaacttctccccgattattgccaaaggcgggaacattgatgtgttcgttgaggctctcggcgggaggatgtcagggaaaaccatggatcttatcctgacattcttcggtaactttgcggtggccagttccctgctggcagcaacactcggcctgtttgactatattgccgacctgctgaactttaaaaatgacagcgccggtcgtttcaaaacagcggtagtgacgtatctgccaccggcggtggtgtgtttcttcttcccgaacggattcgtttatgccatcggttatgccggtctggcctttactatctggagtgtgattttaccgccgttcctggtaaaagcctcccgcaaacgctacagcgacagcgataccatttaccgttcgccgtgtaacagcgcggtactgaatctggtgattgtctgcggtgcgattgtgtatctgacggtcattctggatgtgttcggctggctgccggcatttaaataa

SEQ ID NO: 278192 - DNA, 792 bp, Morganella morganii
atggcaaacatgcgtgaagtccgccagttatgtgacaagcacggcatcaaagtgttctacgatgcgacccgctgtgtggaaaacgcctacttcatcaaagagcaggaagaaggcttcgaagatgtctccattaaagacatcgttcacgaaatgttcagctacgctgacggttgtaccatgagtggtaaaaaagactgtctggtgaacatcggtggtttcctgtgtatgaacgacgacgacatgttctctgctgcacgtgaactggttgtggtttatgaagggatgccttcttacggtggtctggccggtcgtgatatggaagcgatggctatcggtttacgcgaagcgatgcagttcgaatatatcgagcaccgcgtcaagcaggttcgttacctgggcgaaaaactgaaagcagccggtgtaccgattgttgagccggtcggcggccacgcagtattcctcgatgcacgccgtttctgcccgcatctgacccaggatgagttcccggcacagagcctggcagccagcatctacatggaaaccggtgtacgttctatggagcgcggtattatctccgcaggccgtaacaaagaaaccggcgaccatcaccgtccgaagctggaaaccgttcgtctgactattcctcgtcgtgtatacacctatgcacacatggatctggttgctgacggtattatcaaactgttcaaacacaaagaagacattaaagggctgaagttcgtatacgagccgaagcagttacgtttcttcactgcacgctttgattacgtgtaa

SEQ ID NO: 278193 - DNA, 1323 bp, Morganella morganii
atggccggtgcttttgccacgcagcagcttatcagttatgccgatacctggagccagttaagcggccgcctgaaactggcctctgtgtctgcggaggatttcagccgggctcagcaggagctgatgtcattaagtcagcgtaccggcacatcactggcggcaaataccaacctgtacgcgcgtattgcgcagtcaatgcgtgatgcgggttatgcctcgggggatgtggctaaagtcacagaaacgattgccacctcactgattttatccggtgccagtgcggcggaagccagttccgttaccactcagctgagtcaggcactggcctccggtgtgttgcgcggagaagaattcaactccgtcatggaaaacggcggacgactggccagactgctggcagccggaatgggtaccactatcggcggtctgcgtgatatggcgcagagcgggcaactgaccacggataaaatcgtcccgatcctgacaaatacggagcaactcagaaaagaatttgagcaattaccgcagaccgtcagtatggcttcgcaaaaggtggaaaacgcctttatggcgtgggttggcggggctaatgaggcgtcaggtgcaacgagtacactgaccggggcgctgaatggtattgccgggaatatagacaccatcgccactgttgcaggggcactggtcggggttggtcttgcacggtatttcggcgggcttaccaccagtgtgaccaaagcaaccatcggggtggccggtgccgcaaaaggcgaggtcgctcttgcacaggctcagctgcgcgggacacaaattgcggttgccagagcgcgtgcggcagagtaccgggcacaaaaatcactggcagctgcacgcggaaccgatgcgcaggcaggcgcagaaaagcggcttgccgctgtacaggcatctgttgcacgcaatattaacgcccgcaatatcgcacaaaacaacctgaataacgtcacatctgtcggttcacgtcttcttggtggtgcgctggggctggtcggcggcattccggggctggtgatgctgggtgccggtgcctggtacaccatgtaccagaagcaggagcaggcaagacagtccgcacttgaatacgccgccaccattgaccaggttcgtgccaatcttaataaaatgacgctgccggaaaccgctgataactccggtaaaaccaaagaagccctgactgcgcaaaataaactggttgatgagcagcgtcagaaagtcgagggattaaaatcagcgatagcaggagcagatgctggcctcacccggccccagcatcaacggctatctgattaa

SEQ ID NO: 278194 - DNA, 207 bp, Morganella morganii
atgatgctgggcggtataatccagatgttgtccccgcagccgggcggacttgctatgaaagaccagggcgaaaataaaccatcatatgcattcggtgcgccggtgaacaccgtttctcagggctatccggtaccgatcggttatggtaagcgccgcatcggcggcgcggttatctcagccggaatttacgtcgaagatcagcagtaa

SEQ ID NO: 278195 - DNA, 648 bp, Morganella morganii
atggaagactgggttgctgaggccggagactatgcggagcaaaccgcatctgcggtacagagcgccatgggcggtatggtgaataacatcactgacatgctgaacggtaacaaagccagctggcgcgactggtcaatagatgtccttaaatccatccagaaaatactggtcaacgctgccatcgtgaacagcattaagtccatgtctggtgtcggtggctggattggtgctgtcggtgacttcctgggaggtgctgcggcaaatgccaagggcggggtttatgactcccctggcctgagtgcgtacagtaatcagatagtcagcaccccgacttattttgcgtttgccaaaggtgccgggctgatgggggaggccggaccggaagcgattatgccgttaacacgggcggcggatggctctctcggtgtccgggcgatcggcagaaatcataataccggttctgcagcaccacaggtgtttattaccattgacagtaacggcagcagccagacgcagtcgtcagctggttatgaacagtttggccgggagattgggcagtatgtagaccagcgttaccgggcgctgattaatacagatctgcggcccggcggtgccatctggtcggttgcgaaaggggcccgtcaatga

SEQ ID NO: 278196 - DNA, 336 bp, Morganella morganii
atgattgaaattttcacctggtgtccccgtgttaatcccacggaggacatcacctataaaacccgcagggcgaagttcggtgatggttatgagcaggtgtccggtgacggtattaacgcccgcagccagaagtggtcactggaatttaccggtcgcggggagtatatcgcggctatccgtcagtttatcgaccgtcacggcggcataaaggcttttcagtggaaacccccgcttgagccggtcggtctgtaccggtgcgacgagcataagctcaccccgctcggcggtgacaactattcactttctctcacttttacccaggcatttaaaccatga

SEQ ID NO: 278197 - DNA, 1131 bp, Morganella morganii
ttgtccagcgacgcaaataacctcgacggcctgaatattcactgcggtattgtggacgaacttcacgcccacaaaacccgtgatgtgtgggatgtgctggaaaccgcgaccggtgcccgtctgcaatccctgctgtttgcgatcaccacagcgggatttaaccgcgagggcatctgctacgaactgcgggattacgccatcaaggtgctgcggggcgtggtggaggatgacacctttttcgcggcaatttacacgccggatgaagatgatgatccgtttgatgaaagcatctggataaaagctaatccggggctgggtgtctgtaaacgctttgatgatatgcgtcgcctggcaaaaaaagccaaagagcagattgccgcccggcctaactttctgaccaaacacctcaatatgtgggttaacgcggagtcgatctggatggactcaggaaaatgggactgctgcccggagaatgcgccggatgatgaactgaagaactatccggtctgggtcggtgttgacctgtcgaataaaatcgatgtaaccgcagcgattaaggtatacgaagacaatcacggacagactcatatcaagtgcaaattctggctgccggaaggccggatagacaccgcacctaagcatattgccgaactgtaccgtaagtggggggctgccggttatcttgagctgactgacggtgaggttgttgaccatgacattatcaaagccgacattctggcatggtgtgagggtgaggacttgcgtgagctcggttttgatccgtggagcgcagtccagttctcccgccgcctggcggaagagggtatcccgttggtggaagttgcgcagacggtgaaaaacctgtctgaagcgatgaaaattgttcaggccgatgtgtattccgggaaatttcaccacgatcataacccggtgatgtcctggatgatgtcgaacgtgaccgtaaaaccggacaaaaacgacaacatttttccgaataaatcgacaccggaaaacaaaattgacgggccgcttgccctgtttactgccaaatcacgccagatggtgaacggcggggagcaggaacaaagtctgtccgatgttttatcttccaggggcttgcgctcactctga

SEQ ID NO: 278198 - DNA, 1080 bp, Morganella morganii
gtggacgaacttcacgcccacaaaacccgtgatgtgtgggatgtgctggaaactgcaaccggtgcccgcctgcaatccctgctgtttgcgatcaccactgcgggatttaaccgcgagggtatctgctacgaactgcgggattacgccatcaaggtactgcgcggtgtggtggaagatgacaccttttttgccgccatttacacgccggatgaagatgatgatccgttcgatgaatctgtctggataaaggccaacccggggctgggtgtctgtaagcgctttgatgatatgcgccgcctggcgaaaaaagccaaagagcagattgcggcccggcctaatttcctgaccaagcacctcaatatgtgggtgaatgccgaatccgcctggatggataccggtaagtgggacagctgccctgaaaatgcgccggatgatgagctgaaaaattacccggtctgggttggtgtggatctgtcaaacaaaatcgatgtgaccgcagccgttaaagtgtatgaggatccgcgcggacaactgcatatgaagtgcaaattctggctgccggaggacagagtagtgactgcaccgaagcatatcgctgacctgtaccggaaatggggagctgccggttatcttgaactgacggacggtgaggttgtcgatcacgacatcatcaaagccgacattctggcatggtgcgaaggtgaggatttacgtgaactcggttttgacccgtggagtgccgttcagttctcccgccgcctggcggaagaaggtattccgctggtggaggtggcgcagacggtgaaaaatctgtctgaatcgatgaaaaccgttcaggccgatgtatattccggcaaatttcaccatgaccacaacccggtaatgtcctggatgatgtctaacgtgacggtaaaaccggacagaaatgacaacattttcccgaacaaatcgacaccggaaaacaaaattgacgggccgtttgccctgtttactgccaaatcacgccagatggtgaacggcggggaacaggaacaaagtctgtccgatgttttatcttccaggggcttacgttcactctga

SEQ ID NO: 278199 - DNA, 1209 bp, Morganella morganii; identical to SEQ ID NO: 19673

SEQ ID NO: 278200 - DNA, 840 bp, Morganella morganii
gtggctgaaaagagatcctgtgctcaatcattaaaagaggcaggcttatcagtcattaaggcttgtaagctaacgtcgttgtcacgagccacgttttaccatcagcaaatagattggcgtaaaaaagaccaagtagtgatcgatgccatacaatctgtgttagcgaaatcaccacaatcgggattctggaaatgctatttccgactgagatttcaaggctatccttttaatcataaacgagtttatcgcgtttattgtcgattaggattgaacctgaaacgacgggttaaaaaagtgcttccgaagcgtgaaaaaagaccattagtgatagaaaaagtcccgaatattcaatgggcattggattttatgcacgacagtttatattgcggtaagcgcttcagaactctcaacattattgatgaaggaacgcgtgaatgcttggcgattgaggttgatacgtcattaccggctgaacgcgtcatcagggtgcttgaacgtttaaaagccgaaagagggttaccgaaacagatccgagtcgataatggccctgaactcatttcagttaacttattgaattattgtgaagataaccaaattttactgtgccatattcaaccgggaaaaccgcagcaaaatgggtttatcgaacgttttaatggttcgttccgtcgagagtttttaaatgcgtatttatttgaatcattaagccaagtgcgagaattagcgtggttttggctgcaagattataaccaaaatcgaacccatgaaagtttaaatcacctcccaccggaggcctatcgtcaacagttagaaaactctaatttaacgtgtctcaattaa

SEQ ID NO: 278201 - DNA, 270 bp, Morganella morganii
atgaaaaaagctcgttttactgaaactcaaatcgttaatattttaaaactcgctgattctggtatgaaagtggaagatatttgccgccaaaatgggatcagcaacgccacttattataattggaaatcaaagtatggtggcatggaagcgaatgatgttaaacgattaaaagagcttgaagatgaaaatgcgaaactgaaaaagctctttgcggaagttagccttgaaaaccacgcgatgaaggagcttttcgcaaaaaagggttggtag

SEQ ID NO: 278202 - DNA, 816 bp, Morganella morganii; identical to SEQ ID NO: 195523

SEQ ID NO: 278203 - DNA, 576 bp, Morganella morganii
atggtaatatctttcggcgggaactggttgccgggcggaataacactgactggccgttcatcgagtaccgcgccggtgtctatccggtcgtatttgtccggatcatgcatggccgccgatatcgtgaacgtgccgtcatcattctcagtcacgctcaccacacgatactgctgggcgtacagctcatctgattccgttacccagacacattccggttccggcgtttcactgtattccgtggtaacggttataacgttatccgtgaccatctggatggtgcgggcctgtgatttaccggacggaagattcagcatcagcctgtcacccggcgcggcatccggtttgcggtcgagggtgatactccggccattcaccgcactgacgcggccaccggtgactttccctgacaggttttcatccgccaccgcaatgatgtaccccggctgcggaatattgccatccagacccaccttgaatgtcaccacccggtctttgttattggtgagtatgccccagcggcctttacggttggcctctgactggcgggtacagccgatcgccgtcatctccagctga

SEQ ID NO: 278204 - DNA, 180 bp, Morganella morganii
atgaaattactgactattaccgccctgctggtgggggttgcgggtgcctgtctgctggcgttcggtgcctggctgctgatgcctgctgccgggtttatcactgccggcggtttatgcctgctctggtcatatctggtatcaagatcagcgggaagcctgaataacaacggaggatcataa

SEQ ID NO: 278205 - DNA, 465 bp, Morganella morganii
gtgactgcgctgtgtctggcatatgatgacatgctgaaagcgaaagtcacgatacacgacaccctggcacactatctggatgcggcgaatttttcggatggcaacccggcggcagatcctacccaggaaaaagtctcggtcttttatatcgacagcaaatcctcggaaaccaaagaggttattgagtttgatttagccagcccgatggatttgcagggggtgctgatcccgacgcggcaactgcatgcaatgtgtacctggtgcatacgcggcaaatacaaatccggtgacggctgtgattatgccgggcagaacgggtattttgacaaacacggcaaccgcgtggatgacccggcacaggatcagtgcagcggcatgctgaataccggttgctttccccgtttcgggaaaaataatccgatcccgttcggcggctttccgggaacctcattactgaggaaataa

SEQ ID NO: 278206 - DNA, 705 bp, Morganella morganii; identical to SEQ ID NO: 8686

SEQ ID NO: 278207 - DNA, 378 bp, Morganella morganii; identical to SEQ ID NO: 146978

SEQ ID NO: 278208 - DNA, 216 bp, Morganella morganii; identical to SEQ ID NO: 5123

SEQ ID NO: 278209 - DNA, 216 bp, Morganella morganii
atgtgtacctggtgcatacgcggcaaatacaaatccggtgacggctgtgattatgccgggcagaacgggtattttgacaaacacggtaaccgcgtggatgacccggcacaggatcagtgcagcggcatgctgaataccggctgctttccccgtttcgggaaaaataatccgatcccgttcggcggctttccgggaacctcattactgaggaaataa

SEQ ID NO: 278210 - DNA, 300 bp, Morganella morganii
gtgccttatctgacccgaatagaacaacgtatcaatgccggactggtgaaaccatcaaaacagggtgttttttacgcgaaattcaacgcaggggcattgttacgcggagatatgaaatcacggtttgatgcttatgccaccggtattaactgggggatctattcacccaatgaatgccgggaactggaagagctcaacccgcgtgaaggtggtgatatctggctgacaccgatgaacatgaccacaaagcctgagagcagcccggaaaaagaggaaaagcaggatgtcgataatgactaa

SEQ ID NO: 278211 - DNA, 312 bp, Morganella morganii
atgagctggttccggcaggaacgcggcattgaactgccggattaccgggtggattatccctggtgggagcagggcgaaaaccggtacacagataactggcaggaggcgggatttattcaggttgacgacccgcaacccggtgatgtgatagtgatgcaggtgcaggcaccggttgccaatcatgccggtattttattgcctgacaacatgcttctgcatcacttatacggtcacctgagccagcggataccatatggcggttactggcgtgaccgtacagtgatggtactgcgtcatgagcaactgatatga

SEQ ID NO: 278212 - DNA, 234 bp, Morganella morganii
atgggctttttatacgttgcagtgtctgcgggtggtatagctgctgttgcaccggtcagtgcggaccagagcgtatttctccgcaaaggcattcagtgcctcacacaacgatataccccggcagaggcaggcctcaatgacacgttcatcacaaaactccgtgtcattcagagtgaggccgtagtgttgttgcagcaggtaagtcagcagtgtctgccagactgccgccggtga

SEQ ID NO: 278213 - DNA, 837 bp, Morganella morganii
atgacccgtttagcctcccgcttcggcagggcgaatatcattcgtcgtgaccgcccgttaaccaccgaagaattatactgcactgtacccagtgtcttttcagcagaaaaacatgaatcccgcagtgaccgttatacctatattcccaccattaccctgcttgagagcctgcagaaagaaggcttttatccgttctttgcctgtcagacccgtgtccgcgaccaggggcgccgggagcacaccaaacatatgctgcgccttcgccgtcataaccagattaccggcgtccaggtaccggaaattattttgttgaacagccatgacggcaccagcagttatcagatgctgccgggattatttcgtgcagtctgtcagaacgggctggtctgcggtgatacctttggtgaagtacgtgtacctcataaaggtaatgtcgtcgataaagtgattgaaggggcatatgaagtgctggaaacgtttggtgcggtggctgaaaaacgcgaacagatgcagtccctgcggttaccgcctccggcacagcaggcgctggcacatgccgctatcacgtaccggttcggggatgaccaccagccggtcacggaagaacaggtgctgcaaccccgccggtgggaagataagaaagatgatctgtggacagtgtaccagcgtttacaggagaacctgattaaaggcgggctgtccggacggacagctaaggggaaacgatcacacacccgggccgtgaccggtatcgatggtgatatccgtctgaataaagcactttgggtgatgacggaaaaaatgtatgagcattgctctggccgtcaactaatatga

SEQ ID NO: 278214 - DNA, 480 bp, Morganella morganii
atggcatatcctgtttatttggttttaagaggtaagaatcaggggctgatttctgcgggatgttcatctgttgattctatagggaatcgacaccaaattggtcatgaggatgaaattcaggtacttagtttaacgaatggttcgtttcgtacacaaaatgcttcttatcagccaattacatttactaaaccgatagataaatcttcacctttactttctactgctttggatactaatgaaattttagaagctaaatttgtattctacagaacgagtcagcatggtcaacttgaaagttattatgagattaagctgactgaggtatcattgaccgaagtttctgaaatatatcctgattcaattaataataacgaatcaatgccatatcagcgtattcaaatgaaatttgtatctatttcgagaaatcatttaaagggtagtacatccgggtacagcattaatagtgatatgatcagataa

SEQ ID NO: 278215 - DNA, 837 bp, Morganella morganii
atggggtacatctacgaaacgaatgtaattgattgggataaggctaatgcatatatcaattacagccgaataaaaagaatacttgatgagacggaagatgataataacgttgcggcggtaattaccattgaagaagctgagtatgttttaaaaaatcaaatcacacccacccctttcacatcccctgaagatacattatttggcattggtgattttatttcaaattatgccggaaacctgtatgaggctcacagggttacaagaataataaatgaattcaggaatttcaatatagtagcaattgagtataccggaccgaatggtaatacttacattcggttgtcaggacatcctggtgtaagagcctatctgaatgcaacccggtatttagctgataatccccgtattttatacatgggcgtaggtactcagggaatgggagcagtctcagcaggagcaacccggtttgcgatcgtgttttcattagcttaccgggtagttgaattgatattcaaagaagaatataccctggttgactttttcgttaatgtcacgatggatatggcaaaattagctgttgccactcaagtaacaaccttagtaaccggaagtattgtaacaggagcattaacagccggagttagtgttatcgctgtcgcggttggcgtatttgttgttggcgcactgattgcctacgctctctataaacttgatgatgagtacggaattagtgaagcaatcattaaagcattaaaatctcacagaccgccaaaacctgaaacaccttaccatccggatcaattctttacgttgttagggagatatagccgtggttaa

SEQ ID NO: 278216 - DNA, 1176 bp, Morganella morganii
atggcgcagccgtttgatgtgaaggactggaaaaaaggcgaatgtgatctgattccgggcaaaaccgcaccgcacctgatggtggtggagcgcgattatccgaacacctacgcccgctttacctcgctggggccgctgatggataaactcggcaacggcggcaaaggtatcagctggaatactcaggaagaagtcgatttcctgaaaaaacttaaccgcacccgcactgagggcgcagcggaaggccgtccggcgattgaaaccgcgattgatgcggcagaagtcgtgctgtcactggcaccggaaaccaacggccatgtggcggtgaaagcctgggatgcgctcggtaaagtgaccggccgcgaccatacgcatcttgccatccataaagaagatgaaaaaatccgcttccgcgacatcgtggcacagccgcgcaaaatcatctccagcccgacctggtccggcctcgaagatgagcatgtctcttataacgcgggttacaccaacgttcacgagatgatcccgtggcgcaccctgagcggccgtcagcagttgtatcaggatcatgaatggatgcgtgcattcggtgaggcacttgtggtgtaccgtccgccggtggatacccgtgcggcacaaccgctgctgggcgcgaaaccaaacggctatccggagaaagccctgaacttcctgaccccgcaccagaaatggggtattcactccacctacagcgacaaccagctgatgctgaccctcggccgtggtggtccggtggtgtggctgagtgaggacgatgcccgttcgctgggcattgaggataacgactggatcgaagccttcaacagcaacggcgcactgactgcccgtgcgattgtcagccagcgtatcccggacggcatgatctttatgtatcacgcccaggagcgtcagattaacctgccgggctcggaagtgaccggtatgcgcggcggtattcataactccgtcacccgtgtctgcccgaaaccgacccatatgatcggcggctacagccacctggcatacagctttaactattacggcactgtcggctccaaccgcgacgaatttgtggtggtccgcaaaatgaaaaatgtggactggctcgacggtgagcaggatggttatcaacagaccctgagcgggcaggagaaagcataa

SEQ ID NO: 278217 - DNA, 534 bp, Morganella morganii
atgggcgtgatcctgacttatgtgaatgtatcgccgattattctgatgggacaaatgcaatttacatccggtcagttttcagcggcgatggcgttgcttgccatggtcagcatgagtgtctctttttccatgccgaaaattatcgctgccttcagcagtgatgccattttatataccgcgctgggcttgttcctgctcaatgccgcgctgctgggaatatttttgtccggtgtggaatacacgctgatactgattattgtgtttggcttgtgcggcgccggcttttcactgatgttcgggattatcatgagtcaggcgctgtcgccgtttgcaaaatgtgccggtgtggccagttctgtgctggccattgcccagctgagttttgcctcactctatatccggctgatggccgccgcggaaaccggcgcggtggcaatgctgctgattattctgctgacaaccgcgttggcgggtgcgatattactgagacgatatcctgtcagcagcggaaaccgccgggcgctttatgaataa

SEQ ID NO: 278218 - DNA, 576 bp, Morganella morganii
atgacattcataaaacgtgcgcataccttactactgggcgggctgttatcagccgcagtaagtctgacagcatttcccgcatcgggtaaaaccggtgatgaaaaccggctgaaaataaatatttcgggcacggtggtggccaccggacggtgtattttcaataatcactcttcacaggatattgattttggtgatgtgcgtttttcttcggtggcgggcgtgaacaatattgaaggccgctatctcagaaagctggatgtggcaatgacgtgtgccggtgataccgccggtactacccgctttcgcatgaatatcataaaaggatcggccatcgcggatggcagttacgaatcgctaccggtgactgtcggcggtgttcaggcggccaatccaaacctggctgtccgtttattcgtgaacggtaaacagcaaagtattaatgaggattttattgtggatgttcagtggctgccgacgctggaagcggaactggttcagctgcatccggatgataatacctggacaaacggtcagtcggttgaatctcacgccacattagtgatgagttttgattag

SEQ ID NO: 278219 - DNA, 504 bp, Morganella morganii
atgaatagaaataaactgttatcagcgctcacgttattaatgacacttcctgctatggcaggtgaagggcagcttggtactgataaaacctttaatttttccggcacattgcgcgccatgaccatttgccgggtgaataatgaccagataattaccgccgattttaaaaacgtcggtatcaataaactggaaacagaagtctacagcctgccgcttgattacacactggattgccccggtataaaaccggccaatacgctgcggatgacttttatgacatcccgcccgtcggcatctgattcttcggcgatcgaaagtgatgtcagtggtttactggtacggatactgaaagacgggcagccgctggaattaaataaattcttcaaaatagatgatgctgcgcagccgccaaaactggaagcacagttggtgaaagtaccgggcacagacttaacacagtccccgttccgggccaccggtacgctggtggcggaatattggtag

SEQ ID NO: 278220 - DNA, 1575 bp, Morganella morganii
atgcgtaacgttgtccgttctttattattgtctgcggcgctcgtggccgggtcgttaaataccgcctttgccgatccgcatttaaattttgcctggccggtgaatgtggggccgctgaatccgcatcagtacgcgccgaatcagatggccggacaaaccatggtgtatgagccgctggtccgttatatgaatgacggaaccgtaaagccctggctggcggaatcatggacagtttcggatgacggtaaaacctatattttcacattacgtgaagatgtgaagttctccaacggcgaaaaatttgatgccgctgcggccaaagcaaactttgatgccattctggcaaaccgcgagcgtcacgcctggcttgaactggctaatcagattacggcggttgaggatatcgcgccgaatcagttaaaaatcaccctgaaagatgcttattatcctattctgcaggagctggcgctgccgcgtccgttccgctttattgcaccgtcgcagtttaaagacggcggcaccaaagacggtattattaaaccgatcggcaccggcccgtggatattaacggaatcccgtctgagtgagaaagatgaatttatccgcaacgaatcgtactggggtaaaaaaccggtttatgaatccgttacgtttaaagtaattcctgacccgaatacccgtgccgtggcatttgaagccggtgaggtggatttattatatggcacggacggcattatttatccggacacctatcagcgctttaaaaatatgccgggctataccaccaaactctctgcacctctggaatcactggtgctggctatcaataccaaaaccgggccgacccgtgatttagctgtgcgtagagccattaatcacgcggttgataaagataaaatgattgaaaaggtgctgtatggtacacaattaaaagcggacacccttttctcagaaaatgtgccgtatgcagacgccggtttaacaccgtatgcctataacgttgaagaagcgaaatccctgctggaaaacgccggctggaaagcgaaaaccgaaaacggtatccgtgagaaagatggcgagccgctggtggtggagctgaattttgtcggtaccgatgcggtggcgaagtcgatttctgaagtggttcaggccgatctgcgccgtgccgggattgatgtgaagctggtcggagaggaggaaagcagtatctactcacgtcagaaagacggccgcttcgggatgattttcaacggcacctggggtgcgccgtttgacccgcacgcgtttgtcagttccatgcgtattccgtcccatgccgattatcaggcacaacaagggctggcggataaagcggaaatcgatgccaaaatcacacaggtgctgaccaccacagatgaaaaacagcgtcgtgcgttgtatcacgatatcctgacccgtctgcatgaagaagcggtttatctgccgctgacctacatcactgccattgcggtggcaaaaccggaaatcggcgatgtgccgttcagcgcgatgtcgaatgagatcccgtttgatcagctgacgccaactgcgaagtaa

SEQ ID NO: 278221 - DNA, 2661 bp, Morganella morganii
atgaaaaaatataaatctgtaaaaagattcgcattgccggtatctattatactggggtcgggattatattcacttcccggtatagcggatccctgtacatcggtgacagacggcgacggaaaaaaacacctgacctgtacctccactatttattattacaattccggtgagcacggcggaacggcattatccgattatgcgagtgtgactatcaatactacgccggaagcgtcaatctcgccactccagggctgggcggtttacgggaacagcagcacctataatttcaatgagctgaatattgagaccagcggcgccaaatctgacggtatcgtgacaaaaaacggtgccagtaaaatcaatattgataaattaaccattaaaaccacaggttcttccgctgatggtctgaacgtcggcaaagagagtaacggcacggtgattaccgtgggtgacgatgcctatattgatgcattcgggatgggggtgcgtgctaactcatcaactaccggcaccaacgagaacctgattaccctcgggaaaaatgcagtcattatttcgcacgaagccggcagtaatctggaatttctgggacgcgaattaggcaccggatatgcggtttacgccgggaataccaactccgcagcaaccggggatgcccgtgtggtgatcggcgataacagcaccattgtggcaaacggcggctctgcgcatgcggtttatgccaacaaaggcggtattatcgaactgggttcaacgaatatccgcgccgaaggcacgacggcacacggtatttatgccgaagccggatcgaaaaaggtcggtggtgcaacagttactgcgggcagtcaggtatatctcggcggtgataccaccattaatgtggtcagtgacggccggaaatttgccctgtatgccaaaggggcggattcacagatatcctcttctgatcgcctgtccggtgacagcatccgcagtgtattcaccgttgacggcgatatgaaagcagagacaaaagggattattgatctgcagatggcggataacagccggttctccggcagtaccaactcactggaatataatgcggcaggcgcgccgaatacgaccacaaacggtaccattaatctggatattgccggtgccaacagtatctggaatatgaccgctgattcagtgctgtcaaacctgacactgaccggtgcgacactccgttataactctccggatgatctgagcgatccggacgcctttgtaccgaaaacactgaccgtggctggtgattacaccggtaacggcggccacctgattatgaatacggtgctgaacggggatgattcaccgactgataaactgctgatcaaaggtaattctgccggaaccactaccgtcagttttgtgaatatcggcgggcagggcgggctgaccatactcaacggcattgaagttatcacggttgacggtatttctgacggtactttcactcagaacgggcggattgttgccggggcgtatgattattatctgggacgcggtaaaaacggcaatgagaataactggtatctgacatcagattacagcccggtgacaccggaaccagaaccagaaccagaaccagagccggaaccgaagccaaaaccggaaccggagccaaaaccggagccaaaaccggaaccggtagtccgcccggaagccgggggatatatcaataacctgtatatggcaaataacctgtttaatgtgcgtctgcatgatcgtctcggtgaaacccaatataccgatgtactgaccggtgagcgcaaagttaccagtctgtggctgcggaatgtggccggacattcaaccgtgaaaagcggcgacggacagttaaaaaccgggacaaaccgttatgtggtacaactgggcggggatatcgcacagtggtctgataatgatcttaaccgctatcatatcgggttaatggcgggttacggccgcatcagcggcaagaccacaaaccatgtgacaaagaccagagccaaatctgacgcagatggttacagtgccgggatctacggtacttactacgcgaatgaagcggataaaagcggtctgtatgttgacagctgggtgcagtacaactggtttaaaaaccggattaacggagacgaattaccggaagaaaaatataattctgacggtatcacgctttccgccgaagccggatacagtttccttataaatgaaacacagggcagtgatggcagtaccaaccgctggtttattcagccgaaagcacaggtgacctatatgggtgtgaaaatggatacccatacagagcggggcggtacccgcgtatcggcgaccggtgaagggaatattcagacccgtctcggggtaagagtgtacggactgggacaggcgttgcaggataaagacaatgatcgtcacttccagccgtttgctgaaattaactggctgaataacagtaagatgacgggcgtatccatggacgacgatcacgttggtcagtccggcacccgcaatatcggtgaaattaaagtggggattgaaggacaactgacccgcaatgcggacatctggtttaacgtggcgcagcaggccggcagtgatcattactcggatacacagggtatgttaggtctgaaataccgcttttaa

SEQ ID NO: 278222 - DNA, 888 bp, Morganella morganii
atgcatattatatccattatttccacaaaaggcggggaaggtaaatccacgcactccgcgaatctggccggtttttttgccgatgcaggattaaaaacacttcttattgatggtgatttcgcccagccgactgcatccggttattactctctgagttatgaagcgccctgcggtttgtatgagttacttatgcaaaccgcagatctgaacagaccgacacaggtcatttcccgcacctgcatcccgaatctcgacctgattatctccaacgaccctcacgagcaattgaaaaccgcgatgatgcatgcgccggacgggcgtatccggctgcgtaatatcctccggcatccggttttctgcgggtacgatgtgattattatcgactctcagggcgcgcgttcgatcatgctggagctggtactgctggcgacgacacacacagcggtggcagtagtgaaaccggttatgccggatatccgcgagttcctgcggggaacggtcacgatgttcgaggaattactgccttaccggggattcgggattgagttgccgccggtgaaaatcctggtgaattgcatggattacacgctgctggcaaaggaggcgctggctgcactgatgaccattattgattccggcgcttacagcagcgcccccatcccgccggtcacattgctcagtacgcatatctatgatcttgatgtttataaactggggcataacaggggacagcctgcacaccgtctggagtatcagacttaccgaaaaagtccttcagccgccgaaactatgcacagcctggcctgtgaactttttccgcagtggtgtgagcgttttgatgcggtactgatgaaccggccggaagagaccggaggtgcgtatgtctga

SEQ ID NO: 278223 - DNA, 1353 bp, Morganella morganii
atgtctgataccgtacagtacctgcccccgcattcactcagtgccgagcaggctgttatcggcgggttaatgctggataatgaccgctgggatgatatcgccacattcattacagcggcacatttttacacccgtgccaacggcctgattttctctgccatacaggcactactgacagacaacaaaccggcggatttagtcacactgacggcgtttctggaacagcagggtacgctggatcagtgcggcgggtttgcctatctggctgaagtgtcaaaaaacaccccgagtgcggccaatattgtggcctatgcggaatatgttgccggatatcatcagaaacggcacctgctggcactggggcatgacctgacagagcaggccgctgatccgcgtacggatctggcggtattgctggctgatgccgaacagcggttgtttgctattgcagagcagcaggcaccggcgggtgattttgatttatgtgtttctctggagcagttccttgagggattagagcagcgttgcagccgtgatgatcttatcaccgggacaccgaccggatttgcccggctggacagtatgacctgtggttttcagccgggagatttaattctgctggccggacggccgtcgatgggaaaaaccgcgctggggctggcattctgcgaaaatgccctgacgctgcggccggatgactcagtgcagatttacagcctggaaatgcctgccgaacaactgctgatgcgctttaacgcgatgttggggcgggtgccgatacaacatctgcgcagcggggatatggacgatgaggactgggggcgtactgcttcggcaatgaaaattttgctggagagctggaaagaccggctggtgattgatgattccggctccctgacaccctccgtgctgcgctcccgggtgaggcggaatatccgccggtacgggcggccgtcgctgatcctgctggattatctgcaactgatgtgctgtcctggacaggaaaacaggacgcaggaagtggccgaaatttcccgctccctcaaggcgctggcgaaagagaccggttgtccggtggtggcactttcacaactgaaccgctcactggaaagccgggcggataagcgcccgaacaacggtgatttgcgggattccggggcgctggagcaggacgcggatctgattatgtttatttaccgtgatgaagtgtataacgcggatacgccggatcacggtattgcggaaatcattctcggtaagcagcgtaacggcccgataggtacggtaaaagtacagtatcaggcagatatcacccggtttgaggatagcgcgggggctggtcatggcggctga

SEQ ID NO: 278224 - DNA, 1407 bp, Morganella morganii
atggcggctgaaatagctatcccgctgaatgaaaaattgctgcggcgcggccgggtgccagacggggaaagtggcgggaaaggtgtaccactcagcgaaataccgatgcttctgacactggatcaactgcgtccgaatccggataatccgcgcacatcgcgcaatccgaaatacgatgaaatcaaagcctcgatccgcagcagtggtctggattccgtcccgaaagccacccgtgacccggaatgtccggacgatacgtatattttcagtgacggcggcaatacccgccatgacattctgtcggagctgtatgctgaaaccggtgatgaccgttttcgctgcattccctgcattgtcaaaccgtggcccgggcggttgcactgtgtgatcggtcatctggctgagaatgatatgcgcggagaactctctttcattgagaaagctttcggtattgaaaaagcccggataattcatgaggaacaactgggacggacggtaagtcagcgggaactggcagaactgctgaaaagcagcggttatcctgttcatcactccaatatcagccggatgaaatcggcggttgagcttctttatccgtggatgccggatctgctgaattccggtatcgggcggccgcaggtgtcacaactgctggcactgcgatccactgcagagaaagtctggcagtcattccgtgagatctgcgctattcccccggaacgggatttttcttcggtttttggtgaggtcagccgggatttcaacaacccggaggattacagcgctgatctgtttaaagccgcactgattaccgccatgcagcaggccatgccggacccggcactgactggtgatacctggctggcggcttttgagccgcaggaattacaacaactgaggttgcctgaggcaaaagcgttgctgcaacctccggtgacggctgagaaaaaaccggcggagaaattgccggaaaaggttatccggaaccgccaaaaaaacgccggtgataaaatcccggatactccgccgccggtatccgttgcgccggatactgttacggatatctggcatattcctgccttgcaggatgatattgaacatctgcaaaatgcagctttccggctggcttacgaactggccgctgtcaccggtgaagaacacaccatccacgaagatctctcccctgaaagtcccggttaccgggtatctcctgtagggaaccactcccttccggctgcgttatgcggctccggtaatgactgtattgtttccgtcctgattggtgaggcacacgcttgctctgtaccggtttgtgatgatgagactgccctgaaatatttccggctgatcaggattgtccgccggataagagaactgcaacgtgagcgggccggagtctgcgtatga

SEQ ID NO: 278225 - DNA, 525 bp, Morganella morganii
atgaacgccttactgacacaaattctgatggagctgaaatccggtaatcttcaccgctgtaaggagatggggctgacagaggaggagatgcaggcactgaaccggctgacggtagacgacctgcattatctgattaatacgccggtttctctgctgtcttttaatatcaatcattccaaccttggcgttatgctgaaacaggcgcagcaggtacagatccgcaaccggaaaatcaacaaagcactggtgctaggcggttcaattgtcatgatgcagcatttcttcggtctgacggccaccgatgtcagtaaccggcgacgacttgccggacttacggtacgtcagggccgcagtactgcaccgacagaagaggaagagctggcggtgtggctgcaatggcgggcactggatacggacaacagccggtcatctgataacctggatatgatgatggaaatcgcagagcagcagagcgtgtcactgaacaccgtctggtcgcttatcaaagagtggagtgttatctga

SEQ ID NO: 278226 - DNA, 1197 bp, Morganella morganii
atggccgtgttaccggttgacagtgtgatccggcagacactgacaaagatgcagcaccggattgatgaaaaagccgctgccggtgaagtgacaaatgcgcagagcgggttactgtttctcggcaatgtgcatgacgcggtaccgcgccgtttgtttctcgatagccgcctgtcaccactggataaaatggcgtgggtgatgatccgcatgtatgcgcagcagaatgagggagcagtattcccgacctacgacgagttacagctacaactcgcactgccgcattcagataaagcatcccgcgagactatcagcagggctttactgatgttacggctgaccggctggctgagcctgtgcaaacgggtcagggataaatccggacgggtacgcggcaatatctacacccagcacgacgaaccgctcaatgctgccgatgcggaatattttgatccgcgctggctggatacggtggaaaaggcgtgcagccacaccaataaaaccgttcgtctgacagccatcggggttctgaaatccatccggaatgacgacagcatgcggcaccggcactcccgtgtggcactgacggaagcctggttagccgcaccacaaacccccgcagcacttgctcagtcaaaacatcagaaccgcactggtacggaaaccgaaccagggcaaaaatcaccgggtacggatcccgaactcagtgtacagacatccccaaaaataccgggttcggatcccgaactcagccggaaacagcgggctgagcactcagttcggaaaccgaacggttacgtacgttcttttacacagagtgtaaaaaagacgtacgtaaacacagacacaaaattatcttggcctgtcacggtgcaggagcgactgagcagtgctgacagggaaatgctgaaaactcagctctgtgcattgcctgattcactggggcaacggattctggatgacttggccgtgcgcatgaaaaccaccgaagtccgcaatgtcaccgcctacctgctggcaaacctgaagcgggcacgggaagggctgtttaatacctgcagcccggtacagatacgacctgcggtagctgcaacgactgttaaaactccggagcagtgcagggaaacgccggtcaagcgggcacggcaggaggttgtttcgggaacgatggctgaacttcggaaagtgtattttcagtga

SEQ ID NO: 278227 - DNA, 876 bp, Morganella morganii
atgcggctctcaagatccttatgcaaagtggttggtgacgttcttgctaacacaggctctcatgcagcgttggatatgctgtttctatctgctggtgcaccaggagagcctccggtaggagctcatagtacaaaatggaaagattggttatttttggctggacaagatccttcaacagatagtttatctgtacttggcggagtcattgaagagtttatggatctttcgccaaaagaaggaactcttgaatatatagagtggaaagaaaaacgggagagaatagaagcagtattacaagataacggacttaggtattatcgctttgggcgtatactacctcaagagcatttaccactcaataatatagatttttctgagcgggaatttgttcatcaacggccagttatgccagaaaaggttgagattttactggaacgactggttaaagggttacatcgtgcaatgcatccacttactcacaggagaagagggcggcaagtcttgtctttcaatgatgaatatgatgtacaagaccttcttcatgcgttactcagaccatgggttcaggatattcgacctgaagaatttactcctagttatgctggttcgagtacacgaatggactttttattacctgcacataaattagtgctggaaacaaaaattgtccgcgatcgtactcatgcaaaaaaaataggtgacgaactcattattgatattgagcattaccggcgtcatcctgattgcttaaatttatggtgtgtgatctatgatcccaataaatttattacaaattctgaagggcttaaatcagatctcgaagggaaaagagcttctaaagatggtgaattaattgttcatgtttatatattatga

SEQ ID NO: 278228 - DNA, 132 bp, Morganella morganii
atgattagtttatcactaaatacagcccttaatatattcaaactcaaagggatagcaactatttttctgtcgggagtccactttttgcttaaagtggacatcatatataaccagaaaacatttttaggttaa

SEQ ID NO: 278229 - DNA, 342 bp, Morganella morganii
atgaaacaggccaccagaaaaccgactactgtaggtgatatcctgctgtatgaatacctggagccactcgatctgaaaatcagtgagctggcagaaatcctgcatgtgcaccgcaatacaatcagtgcactggttaataataaccgaaaactgacaactgatatggcttgtcgcttatctaaagcttttgataccaccgtggatttttggctgaacctacaagcctcagtagacctgtgggaaacggaaaatgatatgcgggcacaggaagagttcagccggattgtgccggttactgaatttatcgcacatcggaatatggagcagaagaaaagagcttag

SEQ ID NO: 278230 - DNA, 540 bp, Morganella morganii
atgatgattgacagcaccaaaaacagcgctgggactctgactggcgggtttcatatcgagctgcacacccactatgcagcaggtatctggaatggacgttcagccgccggaacaaaaaagaagctgattggcgtaccgccgtttcttaccctgatttctcgcattcataacgatgcactgaccggcaatttggcggcaggtttcgtattatcggcgctggaggaaaaactaatttcagccggtaacgcctttcagcagtggcagtatgagctgggcatgatgattgcaggtctgccggtgaatatcattatctccgatgctgtttctgctcaaccgctgacagttgcggtgcattgcctgaacccgctgggttatcgatttgcttgtttgctggctgagtttgatcaactggctctgcggattttacaggcgtatcactacggacttatttcgatgaaagaaaagaaagcgcggctgcattattgcagccatcaaatacgccgtatctttgcggttgtagtacagtatcatctggaatag

SEQ ID NO: 278231 - DNA, 537 bp, Morganella morganii
atgctacgttatttttatgaacattcacaaaagcgcaacgcatggtttttactgatgatttctgcactgttattcagtggcattgctctgttctttcagcacataataggactacaaccgtgcgtaatgtgtatatatgagcgtatcgctgtactaagtatcgcttttgccggttttctgggatggttagtaccacgtatagcttttattcgctggatagccataacattatggatttacagcagtatcatcggattgcagttgtcttgggaacacaccatgattcaactttatccttcaccattcaatacttgtgatttttttgttaattttcctgaatggcttcccctgaatcagtggttaccctctgtttttgaagcatcaggtgactgttcaattcagcaatggaatttcctgggattagatatgccacaatggcttatcggaatttttgtagtatatctgctcatcggcgtgctggtgttgctatcccattttgtccataagcccgaataccatatacaaaccaatttctga

SEQ ID NO: 278232 - DNA, 684 bp, Morganella morganii
atgcatcaccagatccgatttattacttcgctgattgtcgtggtgttgacactgtcaacaccggctctggcggaaaacacgcttcagacaccctcacacctcaccgaatctcaatcaaccatcacggccgcgcaggagtgggagctcactcctgatgaatggctgcgttatcagcaactgaaaaacggcaggcgcggcgtgctgtcgccggggcttgacccgctgacaatgctcggcaccgaagcccgtagcgatgaggagcgccgccgtctggctgagctgtgggtgaaacaggaatttcagcgtaccgaagcggaactggcgttccagcgggaagtagataacgcatggcggcggatttttccccgtctactgccggtccggcataatccgatggcaacgggtcgccgggcgctgtttgtccgggaaaattgtccgaagtgtgatcagcggctgacacaactgttggcgacaggccagccgctggatatctatctggtcggcagtggcgggcaggacagcgcggttcgccggtgggcgcagaagcaacgcatccctgcggcaaaggtggcctcacggcacatcacgctgaatcatgataacgggcagtggctgaaatattccggcggaaagatgccggtactgttacagcaggaggggcagggatggtcacacgtaaactga

SEQ ID NO: 278233 - DNA, 510 bp, Morganella morganii
atggtcacacgtaaactgatcgggcttatgctgctttttgctgtgacatgccgggcggcagagcaggaactgattgtggttgccgatctcggcggtcagtccacggcggactattttgcggctattgatcctccgtctgaaccggaaaacgaagcaccgctgttgacactgtcaacacccggaacgttgccggtgtttccggttcgcaccccggagttatcgcccggcagacaggccgcacgggcgctggatcagcccggcatgctgccggtttttattatcggggatgatgagctgtcccgccgctggctggtctcccggcgtgaccggctgaggcagaacaacgccaccgggtatgtggtcaatgtcacaacagaagcggcatggcaggaattacaggtgcttgccggaggtctgacgttactgccggtctccggcagcgacctggctgtccgtcttaaaatttcacactatcctgtgctgatcagtgaacgcggattaacgccatga

SEQ ID NO: 278234 - DNA, 2097 bp, Morganella morganii
atgagtgaccgctatgtgattgaagcgatgctgcgcccggcggtggagctgaataccgctgcggtggctgctgccgcagcgtatctctgtgccactgcgccctgggcggtggcgctgacgtctgccgtcagtgacgtcaccgcagccggatttgcattgttctctctgatacgcctgcggcaggggctacatattctgcgataccggcgcaatatccggcgtttgcggcgctatggggtgagcagcgcggcagtgccggtcagccatcaatggctgttcctcggcagaggttttctgtgggagcagaaacacacgcagcggctgctggataccctgcggccggaggttgctcggtatgtgaatccgtcgtggctgtatcagatggcccggcgtgctgaacagtgttctgagcaccgttttccttcgctgtgccgttttctggcccgggactccgtgctgaatccggttcgtccgctgccaccagtaggcgggcatccggccttgcacggcatcgaaccggatgagcgcgatgtcatgctcagtctgactgaacgggttgggcacatgctggtactcggcacgacgcgggtcggaaaaacccgtctggcggaactgctgattacacaggatatccagcgcggtaacgtgacgattgtctttgatccgaaaggggatgcggatctgctgagacggatgttcgccgaatcccgccgggcgggacgggcagaggagttttatgttttccatctcggcaggccggaaatcagcgcccgttacaacgcggtcggtcgtttcggacgtattacggaagtggcgtcgcgcatcgccgggcagctcagcggtgagggtaatagtgccgcattccgtgagttcgcctggcgttttgtgaatatcatcgcacaggcactggtcgccctcgggcagcgtccggatttcatgctgatccagcgctatgtgaataatatcggcgagctgtatgaaatttacgccgaaacctgcctggcagcacactatccggcactgtggcttcggattgaaaatctggcgcagatcctgacagaacgggatattccccgttacatggaggggcgttcgctgcgggttgtggcgattgagcaggtactgaacagcgatgagggaaaacagttctgcgaaccggtgcttgatgcgctgcgtgcggctgttcgttatgaccagaaatattacgacaaaattgttgccagcctgctgccgttgctggagaaactcacctccggcaaaatggcgcagttgatctccccggattaccgggatatggccgatccgaggccggtttttgactggatgcaggtgatccgcaaaagcggcgttgtgtatgtcgggctggatgcattatctgatccggaggtagccgcagcggtcggcaatgcgatgtttgctgatctggtcagtgtggccgggcatatctacaaattcggggtgaatgacgggttacccggcgaggatgaccagaagatcccgatcagcctgcactgtgatgaattcaatgagctgatgggggatgagtttattccgctgattaacaaaggcggcggtgcgggcgtggaagtgaccgcttacacgcagacgctgccggatatcgaagcccggaccggtaatgccgcaaaagccgctcaggtggtagggaatttcaattccctggtgatgctgcgggcacggcataccgaaaccgccgaactgctcacccggcaactgccggaagtcgatgtgtataccaaaacactgatatccggcgtgacagacattccggaaaccggcaccggtagtgattttacgtccaatacccaggaccgcgtcagtaccgtgcgtacaccgctggtgacggcggccaatatcatctctctgccgaaagggcaggcgtttgcattactggagggtggcaagttgtggaagatccgcataccgttgcccgcagcggaagacgacgcgctgatgccggataatcttcgtcagatagcggacgatatgcagaggaactaccggaccagtgatacctggtggtctgatactgttttaccggaaactaatatgtcttaccaatataacgatggtgagtga

SEQ ID NO: 278235 - DNA, 759 bp, Morganella morganii
atgtcacatgtaaatacatcctctttaccggcacaaaaaaataatcctccgcaaccccgcggtttactgacccggctgctgtgggagttgccctggcagcttacggggatactgctggtttcactgttgtttagtttggttgtggaatatatcgggattgcatttttccggccggagctgggggcggaatacagccgccgggtgatgctggctgagcgggactattttgctgccggattcacgcagagcctgctgctgtccgcgccggtcacaacggtacaggacgggattgcgcagctcagccggtggttgtttacggagagtggttttatcagcgggatacacagcacaacggcggtaaaaagcggtaacggtgtcaccgacgggctaaatgcctggtggacgcagatagcagaggtcggatacccgtatctgatggcaaccgtgcatgtcacgcagatattcctgatgcgggtggcgatcctgatactgtccgcgccgttatttatcatggccgctatcaccggattcaccgacggtatggtgcgccgtgatctgcggcggtacggtgccgccagtgagtccagttttctctatcaccacgccaaacgggctgtgaaaccggcgctgtatctcccctgcatcctgtacctctccgccccgttcgcggtatatccaaactggtttctgctgccggccacgctactgaccggactggcaatatcggtgacggcggggagttttaagaagtatttgtag

SEQ ID NO: 278236 - DNA, 1974 bp, Morganella morganii
atgataactttagagcatgcatttgaattagccaaaccttgggctataaaactatttgaagaaaaaatacttccttttatttttaataaaggaactgaaaaatataaaaaagagaaagatttatttaaattaaaaaacagaatgtctgattatttagcaaaaacaaaagcacagtgttcaataataaactccctagccttccctaatgttctaaaaaacgtcaatgatatatatattactttgactatctccacattagactcaagagatagcaatgaatacacgattgataatggttactccttcattaataaattcaaacatactttaataattgataatgcagggatgggcaagtccaccctaatgaaaaaaatagttattgataccattgataaatctgaatatatacctatctacattgaattaagaactcttgaaaacaagtcgatcacagagcaaataaataaattaataggactagacagcatcgacagtgatgatttattgaaaaaaataccttttatttacttttttgatggcgttgatgaaataccatttgatataaaaaacgatatcataaaaaagataaagatattcagtgacgaaatgaatgattcaaaaataataataacatcaagaccagaccagtctttacttgagttacattctttcaatagattcaaaataaagcctttagatatagaaaaatcatacgatttaattagattatatgacatcaattcatctaaaattggaaactctcttactctttcaaataaattaatttctgaaataaagcttatgagagataaagacaatacaactattttagaatttttgacaactccactatatgtttcgcttttattttgctcatataagtataagccagtaatacctaggcgtaaggatttattttacagtcaagtttttgaagcgctctttgaaactcatgatcttagtaaagaaaccggttatgtcagaatcaaagcttcaggtttagatataactgattttagcattatacttcgacggctagcattttggtgcttaaaaaataatggccgacttgaatttagcagagccgagttagaagcagttttaactaatattacagagaaactaaaaggaatttctgttaaaccgatctcattcatcaatgacttaacatactctgttcctttatttattaaagaaggtgcactttacagatggtctcacaaatcactaatggaatatttttgtgcggaattcatctgcattgaagttaaagataaaagagatgatttattattaacactatatgaaagcaatagtgttataaaatttaaaaatataattgaactctgttctgatattgactacgcctcttttagaaaatctatactacataaatgccttactgagtaccttgaacatttagaaagaataaaaaactgcaattcattaagtgaaagagacaaagaaatatgggaaagcattagtttcttttccgatttaagtatactattaactccgtatagcaatgcaaatcttggtgaccttgatttatcaggccacattgatttttttgaaaaaggaatatcatcacaaaattccttcgaacataatttcataggttttcgtgaatttatcactcatattacttatcctacatcgttaaaaagcaccgtttttgaaatattaaaattaaaaagcccagatagttttcttaaggagaaagattattttaatagattatcattagaaacactaaaaatacctgaaaatgtcattatatcaactaagaatggcttaattaaagattacagcaatgaaataatccctgagataataactatattattacaatttagacatgctttgacaattcctgtaatttataaatcatcagccataaaaacattaaatgaaattgtttccgatacatctaatggagtagatgatttactagatggattcgattcataa

SEQ ID NO: 278237 - DNA, 129 bp, Morganella morganii
atgtgcttaagtagacataatgacaaaaaaatttcatttttattgcaactcagcctcaaaaagcaaaaagaagagcctgagctctcctttcaatataactttaaattttacgacaacacattgtgctga

SEQ ID NO: 278238 - DNA, 816 bp, Morganella morganii
atggtactgagatatcactccggttatactccgcaacttcagcctgacaggtatatatttgtggggttaatacttcagggacaacatgttatcgtagaccatgattgccgggactggttggtaacccgccctgaaggtaatccgacaattgagcggtatcatcagttaaaagtttacgctgttttcaaacgcaaactgctctcagccaagcaggggcgggatcggcaggttcgtcagtcaggagataactgcccgttaatctatgccctgaaaggaaaagaggggctattcactgatatctccagtattaagagactgaatcacagcttccgtatcattctcagtcatattgttcaaaaagaaccggccgggtatcaattggttatatcggttccgtcagcacataatatcagccatattctggggaaacggtttgcacagagatttgatgcactacatttttccgacaccctgagaaaagtgaccgttgaagatgctttccggctatttgatcgtgtagacatcagtattgaagatacccggaaacttgagttccggataaaaaagcaggcaaaagaggttggtttcagtggctgtttttttctcaagggtattccgccaaagttcagagacattctgccaccgctcgcattaaacaacatttccgtactcaattttaaaccatcacgcattctcattactgatgacctgatagcatcaggaacaaccctgaacaccgccgctgatcgcttatcccgcctgtatccgcaggctgttatacatgccgcctttctgttcagttcggccgggcgataa

SEQ ID NO: 278239 - DNA, 315 bp, Morganella morganii
atgcagatattcctgatgcgggtggcgatcctgatattgtccgcgccgttatttatcatggccgccatcaccggattcaccgatggcatggtgcgtcgtgacctgcggcggtacggtgccgctagtgaatccagttttctctatcaccacgccaaacgtgcggtgaaatcggcgctgtacttcccttgtatcctgtacttctccgtactgcttacggtatatccgaatctgtttctgctacccgctgcaccgctgagcggactggcatatcgcttacggcgaagagttgtaagaagtatctgtggtattgattga

SEQ ID NO: 278240 - DNA, 222 bp, Morganella morganii
atgtcacaagataaaaatctctctgtattctcaagccgcaaacataaagggcaggcgttagctcgtattgaccgggaacgtaaaatgctggaatctggttctcatggtgtgcaacgtctcgtgctaaacattgctgtggatttcattgaaaagtatccatctatgagttgggaacaagcactggccgcggcttggggctattgcgatcgtacttacaactaa

SEQ ID NO: 278241 - DNA, 1044 bp, Morganella morganii
atggctaaaaaacaggaagttaagattttatataacgggcaatcctacgatatgataattcccggatggcataatcatttatatggtgatggcagtgatgccatatatgaaattcacacagatgatatgattttatttgaaatggaaacgacaactgtaggtgattataaaaaacagaaaaaaaatgaatataacaacttatcagatactgcgggtatgtcgtttcataagtatcttcatcaatcctttaaattagaaacaggacgtgagtgggatgattgtatttctttgttaaaaacaagaataaataatcatattattccgtactttttgggacataaaaaaaatgtcactgtaaatgaaagaacacaagctttctatagggctgcatcaaatggacatgttgcatcaatgttttttattggtacggcacagaaagatggaagcaatccagattgtttatattggctttcacgagctcataatcgaggtcatgttggtgcttgttatgaaatggcatcttactttgacaaagagggagatatattaaattcgatccgttgtttgattattgccgcagatggtggaatggatctagcctatatgggaattttagacatcggtattttacttaatattctaaagcttaaaaatattactgcatttgactctatgttggatgagttaattaggagtactcataacagttgtgcgcgttattttaaagctgtgcaactgcttgcatccggggatataaataacggtattcaagttatggtagaattccggaaaaataccaagaaaaaacctgctgataaaaatctgtgtgaaacatactataaacaattggattttatgcatgagtttatagatttagttttaggtgatattactaacgagatttcaccaattgaatcaattatatctagaacaagagagttttctgatattgagcgttttaagataggtaaagctgcatcaggtaattttgcagattttgatgaatgctgtaaaaaagtacatgaaatattgaataaaaaatag

SEQ ID NO: 278242 - DNA, 195 bp, Morganella morganii
atgaacaccgacattcccgacacagtacataaccagaaaaatcaggctgaccccttgattaagccttttctgaattttctggcccgtgagttaacggatcatcctgaaatcattcagtacatcgatatgtcttatgactttcagcttgttgctggtatggatatcagtcctggcgatgacattgctgatacgtaa

SEQ ID NO: 278243 - DNA, 237 bp, Morganella morganii
gtgaccggtgctcagttggcggcgtttaaactcgcggcgctcaatacggaaccggagcggctcagtgcgttgttcaccggcgtgctgattgccgtgctgtttctctggactgcgcggggtctgctgcttgtgtatcgcggttatgccgccggtacggtggcggagccggtgctgttgcgcttcgtggtccgttcggtgctgctgctggttatctctctctttctctgtgccggatga

SEQ ID NO: 278244 - DNA, 348 bp, Morganella morganii
atgtttcattccctggttttttttctgtggcggctgctcccgctggcactgctctggagtgcggccgcgtatgcggatctgccggtcgtcgaaggcccgaaaagcagtgccgataaatcgttttacggccagatatccggttatctcaatgacgggatagtgctcggcgggctgattctggcggcatcgtcgatgctggccgtcggcaacgccatcatcaccacttttgctgaggtgcgggataaccgcgcgacctgggcgaagttcgggatgctctgcgtggtcggggtgatcctgattgtcgtggtggtctggctggcgtccaaagccgccactgtgctgctgtga

SEQ ID NO: 278245 - DNA, 378 bp, Morganella morganii
atggcgacgattgaatttatgccggatcggctgaatgcggagccggtggtgttccgtggatttaccacgccggagctcgggctgaccgtgctgttcagtctggtggccgggctgatggcggcacttccggtggtaccgtttcttggctggattgctttcccgacggtgacgctgctgatgccgctggtcaccgtgattttcggcgggcggctgatggcctggtttaagcgcggtaaaccggaaaattacctttaccgcaggctggagctgcaactcagccgaataggggccggtaaccgtggtctgatcctccgcagccggacactggctctgcgccgtcagcagccggtgatccgccgtcgggggatgcatgagtaa

SEQ ID NO: 278246 - DNA, 660 bp, Morganella morganii
atgagtaaattcaggaacgccctcaatgcccgcgatcatcatatcctgtcgctgcgcagcgcctgcgcggttttatttctgctgctggttatcgccctgaccggctggatcttatccccgcgcagtctgactatccacaatccgccggatctgcgctccggcagcacccgtgcctggtgggaagtgccgcctgccactgtgtatgcgttcagtttttatattctccagcaactcaacagttggccgaaaaatggtgacaccgattatccctatcggatcagcacactagcggcgtatctgacaccttcctgtgcggagtttctgcaccgcgatgcgaagcagcgcaaggatcagggcgaatcccgggaccgtgtgcgttctgtttcagaagttccggcgcggggataccgcagtgagagcgtcaccattattgaccatgataactggcaggtacggctggacctggtgacggacgaatatgtgaatgccgagcgggtcaaacgttctctggtgcgttacccgctgaatgtggtgcgttgggagcataatccggaggccaatccgttcggtctggcgctggattgcttttttgatacgccgcagcggctggaagcagcccctgtggtcacggatgaaaaaaaaggagtgttcagcggatga

SEQ ID NO: 278247 - DNA, 804 bp, Morganella morganii
atgaacctgaaacgatgcctgatatggctgtgctgcctgactgcgctgccggtgcaggcggttgagctgatgaaatgggagcgcattccgctgtctgtgccgctgcatgtcgggcaggagcggatcatttttgtcgatcgcaacgtccgggcaggcgtgccgccggaactgaagggcaaactgcgtatccagagtgcgggtggtgcagtgtacctgcggccggaagcccggtttccgtcaacccggctggtgcttcaggatgtggaaaacggcaccattatcctgctggatatcagtgcggtgaaaaaaaagggtacgccggagccggtgcgtctggtgtatggggacaacggactgaagccggaagagaaaaaatcgacggccggggcttctcagcctctgccgcctctgccggtggcgctgatccgctatgccgctcagacgctgtatgcgccgctgcgtacagttgaggcgctgcccggtgtaaatccgttgtcactgccatcacctgagagtgccgtttctctgatgccgtcagttccggtggatattcacccgctggccgcctggggagtggggaattacagcgtgaccgcgctggaactgcgtaaccgcagccgaaaagtgatatcccttgatccacgccgcatacagggccggttacacagtgcggcattccagcatcaccggctgggggcggcaggaacgccggaagccgtgaccgtgctctatctggtgacaaaaggacagccggaaagcgcatttacagccgccccggcgggaggcaaaaaagatgcagattaa

SEQ ID NO: 278248 - DNA, 1377 bp, Morganella morganii
atgcagattaaatccggactcctgctgaaaattctcgtgccggtggttgttctcgttgtgaccatgatcggcgtaaagtcctgcggttcgcaaaaatcagctcagcctcagagtggtaatacaggggccgcagcgctgacccgcgaggaactgagtctgctcgggattgagggcgataccccgcaggatacgctgcgcaccctgctcgggcgtatcaaaaccattcagaaaaatcaggatacactggaaacacaaagccgcgcactgacagccgaaaatgaccagctgcgggcgcagggagaaaatgtagaggcgcggatcaatgaggcggtcgcggcggtatcacaggaaaatacgctggcacagcagcaactggcagatgaacagcagcgcctgaccgatttgctggagtcgctgctcagtgcgccgccggtcagccggaacagcgcagacagtgttttaccggcagagccgccggaaactgtctggactgaaccgcaggacagccagccaactatatcaggctctgcccccgggagtccggcactgttcccggccgccttcggcagcgcggaagacaatgcaattacccggcagaaagcggagctggatcgcaccgcaaaacagcagacggcagatgtccccggtacgccggtttataccgtaccggaaaacgccacactgaccggcagccgggcgatgactgcactgctcggccgcattccggcggacggtaaggtcacggatccgtatccatttaaaattctgatcggcagggaaaacctgaccgccaacggtattgaactgccggatctggcgggggcggtggtctccggcacggcaacaggggactgggtattgtcctgcgtgcgcggcgaggtgcattccatgacctttgtgttcactgacggcacggtactcacggtgccgcaggccggaaaacagggggagggacgaagtcaccggggcagcggtatcggctggttatccgatgaatcgggcgttccctgcatcagcggtgagcgtaaaaccaacgccgccacgtatcttcccacattgtttgccctgtctgccgccggtgctgccgctgatgtgatggctgccggtcagggggcagctacggatggtgcatcggttaccggtgcactggcaggcagtgccgggcaggctgccctggggaaagccgtatccggcggtaccaatgaactggcggaatgggtaaaagcccgttacgggcagatgttcgatgcggtgtatgtcccgcccggcgtgccggttgcggtgcatatcacccgtcagattaccgtggattatgaaccggacggacggcgagtgaaatacacaacggacagccgtccgcatccggaaatggattaa

SEQ ID NO: 278249 - DNA, 342 bp, Morganella morganii
atgccgcccggggacagcaccatgcgcacggtctggcagcagaaaaccggcaaaacgccggatcacgccatccgtcagcatctgcagcggcggggcatcatcggtatcaatgcatctgagcggacaatggcaggacgttatccccgcgatactgtgaatgacatccggcagcgctttccgcgtctgccgaatccggacatggtgatttatgttttcccgcacctgaccggcggcgagcccgtaccggtgccgggttacagctccgtttttccgttttacagtcgtgtgcagtatgcgctgccgggtgaactgccggaggtgcgcagatgcccggcctgttaa

SEQ ID NO: 278250 - DNA, 2697 bp, Morganella morganii
atgcccggcctgttaacgaaaaagagcggtacgctgacccaaagtgacacagataagttatatccggtgaattcgtcattcgtggattatctgccctgggcggaatatctgcctgagagtcagtgcctgctgctcgatgacggggtatccgttggggcggtatttgaggtgatcccgaccggaaccgaagggcggacggcggcgcggctggatgagatccgcgatattgtggaggatgcccttcaggacagttttgatgaacgcgacagtcacccgtgggtgatccagtttttctgccaggatgacccggaggtgacggtgtacctcgataccctgcgcggctacatccggccgcaggcacagggcacggcgatgacggcggactacctgcgggaaacggaacgccacatgcgcggtctggcggtgccgcaggggctgtttaccgataaagccgtcaccggggcaccgtggcgtggtcagcagcggcggacacggatggtgatttaccgctatgcggacccggcggtgtctgagccgctgtcaccggaggagcaactgaatcaggtgtgtgaccggctggcctccgcgctggccggggcgggcattgccgtactccggcagaacggggcgcagatccacgcgtggctgctgcgctggttcaatcccgagccggactggacggacaaagagacgctgtaccgcaccgccgcccatgaggacactgcccccggggaactgccgctggtgaatgatttcagtgagatgctgctgttcagcccgccgcgtgctgatgcggaaaacggagtctggtggtttgacggcctgccgcactgcgccgtcaccattgaccgtatccgccgtgcgcctgccgtcggtcacctgaccggcgaaacccgcagaggggagcatattaatgcgctgatggatctgctgccgccgggcacggtgatttccctgacactggtcgtgcagccacaggatgtgctggaagcgcggttcacgcatctggcgaaaaacgcgataggggaaaacagcgaatccgcgcgggtcagagctgatgcggaaacagcaaaaagttaccttggcgaacggcataaactctggcgcggcagcatgacattttatctctccgcctcttccctgcaacaacttaaccggcagcggcgggaaatgacggcggtgctgctgaatgccggattacagccggtcagaccggaatacgatgtggccccgctgaacggctggctgcgggcgctgccgatgtgttttgatccggccagggataaaaagcactggtatacccggctgatgtttgtgcagcatctggcgaacatgctgccggtgttcgggcgagactgcggcaccggccatcccggattcacctttttcaaccgtggtggtgcaccgctgacgtttgatccgctgaacagcgctgaccgttccaaaaatgcgcatctggtgctgttcggcccgaccggctccggcaaatccgccaccctgaacagcctgttcgcccagttaatggccgttcaccggccacgcttgtttatcgcggaagccgggaactcgttcgggctgtttgcggattactgcgcggctctggaactgaccgtgcataaaatcagtatcaaaccgggttgcgggatctcattggctccgtttgctgatgcgcacaagcttgccggtatgccgcaaaacagcggggaactgagcgacgatatcggaaccgatgatagcgaaacggaggagcgcgatatcctcggcgaactggagatcgtcgccagactgatgatcaccggcggcgaggcaaaagaggaagcacgtctggcacgggcagatcgcggcatgatgcgcgaagcgattctgactgcggcgacgcaggcaaaaaatgcgcgcaggcagatgatcaccgcagaccttcaggcggcattttatgcctttgcggacgaccccgcacggccggaagcccgccgtaccagggcgcagaatatgggagaatccctgagtgtgtttatgcagggatttctcggcgaactgttcaaccgtgagggcagacactggccggaggccgatatcaccctgattgacctcggcacgctggccagggagggctatggagccccgctggcggtggcctatacctctctggtcaacaccatcaataatatcgcggaacgtgaccagtttctggaaagggaaatcgtctttgccaccgatgaagcgcatatgatcacgaccaatccactgctcgccccctatgtggtcaaggtcgtgaaaatgtggcggaaactcggtgcctggctgtggttggcgacgcagaacctggaggatttcccggacacggccagaaagatgctcaatatgattgaatggtggctgtgtctggtgatgccgccggaggaagtggaggagattgcccgcttccgcaaactgaccggcgaacagaaagccatgctgctctccgccaccaaaaccccgcgttgctacactgaaggtgtggttcttgccagccgcatcgaagcgctgttccgtgccgtcccgccgagcctgtatctggccctcgggatgacagaaaaagaggaaaaagcagccagaagagagctgatgataaaacacgggatcagtgaactggaagccgcaaaacgggttgcgcgggagctggataaggggcgggggattgaagtgagtacaggataa

SEQ ID NO: 278251 - DNA, 924 bp, Morganella morganii
atgcctgaattcatcaattttaacagtcttgtcgatgacatcgtcacacaggatgggttgtctgctatcagacctgttattgaaaaagaacttctgcactatgatattttattttgtctcgcacagtcagggctgctgaaaaatttgatctttcagggcggaacatcactgcggctttgttataacgccaaccgtttcagtgaagatctggattttgcaggcggcagggacttttgctctgcggacctgagtaaaattaaaagctgtatcgaatcctatctcggtaaacgttacggtttagaagtcacagtcaaagaaccagcggaactgcgcaaagagccggactatgctgacgttaaaattgataaatggcagatttctgtcacgacagcaccagagcgccgtgacttgcccaaacaaagaatcaaagttgagatcgccaatattcctgcctatacccgcaatctgcgcgcactaagccggaactatgatgttttaccggacggttattctgaaaccgttgtacaagtggaaaacctgacggaaattatggctgataagctggtttcgttcccggcaacaacccgttacatcaggtatcgtgatatgtgggatttggtctggttacaccagcagagcgcagagccggatattgaattaatcagtgccaaactggcagattatcaattgcagacgacatttagtgaactgcttcagtcgcgcatcgattcaattgaacccatcattgctaccggtaaatttcagacagagatgaagcgatttatcccggctccggtttataaccgaactcttggccaacctgattttatggtttatctcagtaataccctgaaagatatgctgtcagccgttcaaaacatgctggatggcaaaaagcccggaaatataccgttccgtatgtag

SEQ ID NO: 278252 - DNA, 525 bp, Morganella morganii
atggacagaatgacagcaatccggacactggatgaattcagtaagcagggaaaaaatatctttctcagtcaggatctggaaaccatttttgcagatgaatcaccacgaacactgcaaaaatcacttaatcgtctcgttacatcaggtattctcaaacgaatcaccaaaggggtctacgtcaacggacgggcatcattaggcgcatacccgctggaaagcctggcactgaatatccggcggggtgaatataactatatcagtctggaatctgcgctctcacaatatggtgttatttcgcaaattccggtcgacagactcactattatgtcaaccggtcgatccggtgaatttattaccccctggggcgttatcgacattactcataccggcagaaaaccggcagatattctgcacggaacaataaaaggacgcggtccgatgcgcctggcaaaaaaagaaactgcattacgtgaccttaaacgtgccggcagaaatacacacctgattttgtctgaggaattataa

SEQ ID NO: 278253 - DNA, 396 bp, Morganella morganii
atgaaatcccaaaacctatttatcccgttattgtttctcccgcttttctcaccggctgcggtggtgttcactgacagtcatcatcctccgcagcatgcggataatcatcaggttgtttatctcgatgcgccggagcagttacaggcgcagttcttcggaacattaccggcggacccggctgaggctgaacgggtggtgaaggccggtatgcagtcatcgtcatggttgacgatgcagcagcaactgatgcaggcgtatcagggggtactgaaagcatacagtctgaagctgacgaagtatccggcggtggtgtctgatgatcatcatgtggtgtacggtacggctgatgtggcagtggcggagcaattgctggctgagttccgggaggcgcggtga

SEQ ID NO: 278254 - DNA, 936 bp, Morganella morganii
atgcgccggtttttctcccggagtgtgctggtactgatatgcaccgtgccgccggtgacggcgggatcactgaattcgttacagatagtgcagagtgcgctgtcgccgtcgtgtatggagtacaaaatcacaggtatgtgctactggctgttctgcaccctgtacggctgcacggtgaaaaccgctgtcaaagtgcggcactacattcccgatgcggtggtctcggcctataaccagaccggcggaaatccgtggtctgaaatggcttttaccggaaccgggattgccggtctggccgaaggtggcggggcgaatgagcagaagcgtccggggcataaaatcaatctgcggtttaaaaatgcggatgtaattggtcatccggcgctggcctcaccgctgtttaatcagttttccggagcgatgggaatgacctgtgccgggggtggtgtgccgctgatgccgtattttctcagcacactggatggcctcgcctggcgctccgggttgcccgaatccttttatccggaagcactgacgccgggaatgcgggacatcggttctgccgtgcgcggtgatatgtggggcagtctctatccgcgcagcgggtttgtgacacagacgcacgactacaaggctgccgccgtgacggcacaacgggcggcagatatcgtgacccgttccggccagcctcatgtctatcagccgctgcgtgcgtcagcgcgtccgggctactggccgccggagccggtccgggaaaatacccgcaatcacaaatggcagcggctgacaccgtcgccgtcctcttcctgcgctacttttccggaaagccggacaccggttgccaccgatggcgcttatgcctgggcgctgtggcggccttacagttgctgcaaacggcgtggtcagcggcttttatacagtatgaattttcagtaa

SEQ ID NO: 278255 - DNA, 1407 bp, Morganella morganii
atgatgaacacgaatttacggctcagtaccgtggtactggcgggatgtctggcactgagtcagccgtcacaggcagagcatacggttgtcagtaccgacagcagcgccgggctgaaaggggcgatcagtgattatctgttttacaccatcggtggcgggtcggtgatttcaccgccgcccgggcacagtaatatggaaaaattgagtatcggcgttggctggagcagcgacctgatgtgcggcaattttgatatcagtaccacggtgaaaaatcagctcaacggcctgacggatggcttcagaaacctgatgagtaatgtgatcagcagtgctaccggcgcggtggccagtctgcccgcgatggtgattcagcgggctaatcccgggctgtatgaactgctgaccaacggggtgttacaggcgaatattgcctttgataaggcgcagcttaactgtcagaagatgtcggagaaaatggccgactttgcgtactccggacagtggacaaaagccgccgccggtgaggcgtttaaagatattgtctccgccacaccggatgcggtggccgccggtaaaaaactgaataacaccgccggtaaagagggcgtgacatggattggcggtcagaagcgcggcggcagcggtcagcctgctgtccggccggtatatgacctggcgaaagccgggtttaatatcattaataaacaatccgtcaccggcaatcagaccgtcagtgaatccgcctgtcgcggcgcactgtgcaggcagtataaaaatagtgaggaagcggcaaaggccgtggtgaccgtgctcggtgaccgggcaatccgaacctgctcagaagtcgcggactgccgcagcggcggggcggataatcagcccggggcatcggtacccggaaccggtttttcaccggtgctggaagacaccacgcaggataatctggttattcttacccgtctggtcaacggacaactgaagccggatgcgaagcacctcgccacgctgaaaagcggtgatctggcggtcacccggggtgtgattcaggcgctgaaggatgatccggataatgccgcgctgatccggcgtctggccggtgaactggcgatgtcagaaacgatttcggtggcactcgggatgcgccggatgctgatggcgggtcaggcagagccgcatgtggcagatcagaaaatcgcgctggaagaatccgatcgccgcctggcctttctcgaccgcgaagtgcaggcactgaaaaacgaaatggagatccgcagaaccatcagcagcaacaccctgctgacggtactttcccgtcaggctgagcgggatgtgacgcacggactgcgtcagccggtacatcagaatgacggcgcactgcaccggctgaatcataaggcggtgccatga

SEQ ID NO: 278256 - DNA, 300 bp, Morganella morganii
atgagcaaaataaccatactgcaactgatcagagtggcagccactgtgaccggtgccagttcactgatatatctgacggcaggttatgagtccgcgctgaatcacgaaatcacggcgttcagtctgccgttgctgctctggcgggtgatgctgtacagcgcggcaggggttttctggtgttaccgcctccggccgcgtctccggttggcctgcccggcacacaggatacgccgtgctgaatgcctgatgatttgcctggtgatatcgggtgaactcagcggcctgctgcggaggctgtga

SEQ ID NO: 278257 - DNA, 1512 bp, Morganella morganii
atgacggcagacagttatcttgagcttgtgctggtctttatgggctggctgatgaataacgcactgtggaatgttatcacggccacagggctgttcacgctgccgctgattttccgtatcgcggggatctggctggcactgcgtgaagccggtgaggatgaggatgcgaaagggtttgccgcgctggcacgtaccgagcacgtactgtatctctcctttgtggtgatgatgttctgtgccgtcccggtatgggatacggatctgtcggcaatgtattttgaccgcacccgctcgcagcagtgcggtgtgaatgttccggcaccggatgagtccggattcggaccgcttatcaccgaactgaacgggcagacggcgaaagtgccgctgtggtggtatctggtacatgcattgtcaaaaggcgtgacacacgcggcggtcgcctcggttccctgtggcagtgatttccggcaggtacgctttgaggtacggcacacgacactggccgatccgctgatctttcaggaagtgcaggaatttgcagcacagtgctatgcgaaagcatattaccgcctgaaacacagccgcagcgggctgaccgcagaggaagcagaggctgttaactggattggttcggactggtttctcagcacacccggctattacgactattacacttccgcattcccgcgctctgcatggccgtacagcgaggctcgggacagtggttttccggataccggacagggcggttacccctcctgcaaagcctggtggagtgataaagggcacgggctgcgggcgcgtctgctgagcagttatgacaaacgggcgctgaatgcggcgaaatcccgctttccggactcatgggaggaaacgctgctgcgctggctggtcagcccgcagaatacaacgctgtccggcagcggcaccacctatatgaccggacaccagacggggcacggcaccggtatcgacaccggcatcaaacaggcactcagtagtctgggcacactggccgcacaggcgacacaacttccggcgtttgatgcactgcgtcaggcgctgccgtttgtgcacgcaatcctgctgatggccctggttgtcagcattccgccggtgatgctgttgggtgcttacgagccaaaagtggtgatcacactgactttttcactgttctccctgatctttataccgttctggtgggaactgggcggctggctggatgaccggctgcttcagttgctgtacaccggacataaaggctacaccggcagtttcagtctctggctggccagtaccggatcagacggctgggttatgaatctggtgctcggcgcgatgtatatcgcgctgccgctgttttggtttggtgcaatgagctggtgcggggtaagcctcgggcatgcgttttcatctgcaatgtctgccgggccgaaaggcgcacaacaggccggagcacagggaacaggcgttgcaatgtcagccgtcagaatggcggcgggcagaaaataa

SEQ ID NO: 278258 - DNA, 279 bp, Morganella morganii
atgacagcctccgtgctgcggacagaaacagaaaacgcagttcagacggcgttttcgcacgatgtcacaccgttgtcactgacaacacgccaatgcttcagcgatttgcaggaagcgccttcgggtaatcgcagccgttatcagggcttttcaggtattcggcggcaggagcagcacagcgtcacttgggcaactgcatcagcagtaccaagtgacgctgcgcgaaagacccgcacctgcgctgatatgtatggcctcaatgctgtactgaccctctga

SEQ ID NO: 278259 - DNA, 246 bp, Morganella morganii
atgaatataatttatctcaaaattgataatttatatatctgcattccacctgccccggcgacacggttaatccgcacatttgtgcttcagctgatatctgcgcaccggggtgaaggtgtgctgagttattgcggggtgccccggctcgcagagccgttcgcggcagatgccgtcctgacgatgtcagattacccccgtataccggttttcaccggtatcgccatcgataccagactgtccttctga

SEQ ID NO: 278260 - DNA, 1143 bp, Morganella morganii
atggctcagtttaatcactttgatctcagacttctgaatccgggctttgattcccctctggtcgatgcactgacagagctggaattactccggcatctgcggcttgaaacagatgttcacccgcttttatttgctcagttgaaagatgttttccatatgctggagagtctgggatcagccaggatagaaggaaatcacacgacactggcggattatgttgaaagccgggttgaaggaactcagggttccactgaccagctaaaagaaattaataatattgaagctgcaatggaatttattgatgactatctgaagaatggtgatgatatttcagaatattttatccgtgaacttcatagtctggttgtggccggtttacagcgtgaaggcgataaaacaccgggcgcataccggcagcataatgtcagtattgcgctgtcagaacatcttccgccggaacatctgcacattcctgattatatggcagaactcacagcatttattaaccgtgatgataagcccaaatatgatttgatgaaaattgcactggtacatcatcgttttgggtggatccatccttttggtaacggtaatggccggacagtccggttgctgacgtatgctctgcttatcaaatacggctttaacgtacagacaggcgggcgggtactgaacccgacagcggtattctgtaataatcgtgagcattattatgcgatgctgtcggaagcagatacaggtactgatcaggcacttgaagactggtgtttatatgttctttccgggatttcagcggagctgaaaaaagtggatcaactcacaaaccacgcatttctgagtaagaaaatattgtatccggcgattgcgttttcactggacagagggctgattaatttacttgaatctaaagtactgagatgtgcggtggattcgggaacaattaaagcgggtgatctgcgttctgttttaccgaaactgaaatcagctcagatcacttatcagttaggtaagttattggatcgtggattgattcagcctgtagaggatggtgcccgttactataccgcaaaattttcaaattcagatctgattcgcggggtgatcacgtcattgaagaatgaaggatttatcccggagttataa

SEQ ID NO: 278261 - DNA, 480 bp, Morganella morganii
ttgctgacattaaacaaaataaagaatgaagccacaatgttccgtgaacgaatcgagaagtgtgataaaaatcagacacctcttgtcatagattgctttcccataatgagctgtaaattatcgtcgatgcttcttgcttatcattttttaacgttatggccagaatcagagataacagggataagtgcggctaccggacgacaacagcagataacacattactggctggaaattaatgatatcgtcattgatataaccggtgatcaatacaacctcatcagtgataacgagctcaataaaaaaataatagcatatcgcccttttcctgctgttcatgttatcagtagtaaaaaaagctatctctatacgttatttaaggttaaagaaaccgagaaatttactgcagatttccctacaataggagaggattttattgaggaaatgaaattttcatataataaattaatgggtaatacgtaa

SEQ ID NO: 278262 - DNA, 519 bp, Morganella morganii
atgccaactccatgctatatctccatcgaaggtaaaactcagggcaatatcactgccggtgcgtttactgctgagtctgtcggcaatatctacgtgcagggtcatgaagatgagatgctggtgcagcagtttgaccatatcgttactgttccgacagacccgcagtccggtcagccatccggccagcgtgcgcatcgtccgtttaaatttaccgttgcgctgaacaaagcggttccgctgctgtacaacgccctggctgccggtgaaatgctgccgaaagtgcagctgaaatggtaccgcacctcggttgaagggaagcaggagcatttcttcactacctcgctggaagatgcgactatcgtcaatatcgactgcaaaatgccgcactgtcaggatccggccaaatcggattacacgcagctgatcgaagtgtcactctcttaccgcaagatcgactgggaacataccgttgcaggcacctccggtgctgacgactggcgtgcaccaatcgaagcgtaa

SEQ ID NO: 278263 - DNA, 2208 bp, Morganella morganii
gtgataccttccatttctgatctgctgccggggcgttccggtctggtctttacctgtaaaatcgggcgactgccggaaaatacctttcaggtcactgaatttacacttaatgaggaaatatcctcgttatttactttatcggtttccgtcgtcagcctgctgccgtcagtccgttttaaagaatatcttggcatggcggcctcgctgacagtgacccgtaacggcacccgcatccgtaccgtacaggggctgctggtctccgctgaacagggtaataccgacggcaataagacctggtatcacttcattatccgccctgaaatgtggatcatgaccctcaatcaggacagccgcattttccggcaacaatcagttccggagattctggccattttgctgaaagaagcgcatgtaaaaaatgacctgaaattctatcaggatgagctgcatcaaaagcgggaatacattactcagaagcgggaatccgcgtatgaattctggtgtcgcctggcctttgaggaaggaattaatttctggtttgaggacggcccgaaactgttttacagcgataaccatctcggcatgaccgctggtattcatctgacctacaacccgcaggccgatacggatattacggacagtaccgcgttctcctggcgttatgctgaacagttgtgcggtgacattcagatccacaaagattacaacccgcagagaccgtcctacccgctgcaacatcaggtgatcggtgaagtgcatcagcagcacagcacctttgaaagttacgggcgttttcagcaggatgcgccgggtaaaccattcacgcaattgcgctatgaacaatcccggaaccagagccagaccgggtcggcaggcaccaactgttttgccctgagacccggcaaggttttctccctgaaaaatcacccctccgccgatatgaatacggcctggcaggtgatcagcgtcagtcatcgtggtgtacagccgctggcagataacagtggcggtgaaggaaccacattcagcaacaccgtgcagtttatcccgggcactcaggaatggcgtccgccgttccgctataaaccgacagcagacggcgacgagttggcaacagtggtcggcccgcccggagaagaaatttacaccaatgaacaaggcgcggtgaaagtctattttcactgggatcgatacggcagacccgatcacagtgcctcctgctggctgcgggtggcacatggctggaacggtgacggctttggttttatgtcgatcccgcgtattggtcaggaagtgattgtttcctatctgaacggcgacattgaccgcccgattattaccggttgtacctataacggacgtaacagcccgccgctcaatctgcccggtgaacaaacccgcaccacatttcgtacgaaaacccataaaggggagggctttaacgagctgcgttttgaggatctcgccggaaaagaagaagtctatattcatgcacagaaggacatgaatacccgggttctgcatgaccggcttaccgaagtggataatgatcatgaggaacgcatcgggcagcatcagaaagtgtctgtaacgcaggatcagacatcagagattggtcataaccggacggtatccgtcaaacaagatgatgagctgaccatcggcggccagtcgtcactgtatgtcgccggtaatatcacacagacaacggacggtcagctgacacagaagatcggcaaaagtatgtataccgagattgctgataatcatgaacttcacctcggaaaaaatttcctgatccgctcaatcggcggagaaatcatcatcggcaatgccggtgggcagattgtgattgacccgatgggaaatatccgtatcgaaggactgtctgtcactgtctctgaccacgccgccggtattaaagcggcacccgctctgtttgagtattccggccgtttccggctgacggcggagggaacagaggagccgctggttaatcagccctaccggatcaccacagcgggcggtcaggcggtcagaggtgtgacggatgccaacggctttaccatgacgcttcagacgaagcaggcggaatcgctgacactgacagtaccggaagagagtcagccgaaaacccgtaaattataccggatgtttgataacagtccggaagaatatgtgatggagtttaaggacgataatcaatga

SEQ ID NO: 278264 - DNA, 1446 bp, Morganella morganii
atgaaaccgatgaaagaggtgtgtcccggcagtactaccatcacctgtcgggttgaaggtgcgcagttgccgtctcctgaaaatgaatgttatctgaaggaaaaagcactgttcgccatttattttcccagaaaggcgtatacaaaggacggcgcaaagcgatcgctgaaacaactggctatgagcgggcttatccggatcgaggaaattatacatgactggctgtggtcttataaagcagaggtggtgtttgcaatacgcggggcgaaaaaaaaacctctgccgatgatggctaccagtgatactaaacggaaaaagtatgaggggaatttaccgcattcggagaatccgtttgcccggccgtcaccggaacagtggctgcgtgaaggtgtaacccagatgcggcgacccgatattattttagtcagagatcagtcaaaccgctggccgggacgaaatgaaggttgggatggaaagagtgttacagataatctgctgaggctgattgaggtcaagtttccgggtgacagtctctctaaagaacaggaaagggactataaacaaatagcaaccgaagagcggtttagtgtatttcatgtagcggataatcgccggcgggaggaaagagaaagtgcccgtcaggcacagactagcttactggcaacatacgaaaaaaaacatggcacactgccggtatcagaggaatcacttcagacgctgatgctggttgacattccgttggtcagtgaacagctctggcaatataagccggttctgagtttgtggtgggcgctgaatgtggatatcccggcatttgggcaaatagtgttatccggtcaaccagaaattaaatcaccctggcaacagtttacagaaggactggatatagtcggtgaatatattgctactggttattactatacccgtgatgctgtaacctatacttgggaaattacctgtgattatgctcaggccggacttaattatctgaatgatgaactacaagcagcattttcggcatgcggagcctggttccgggatgctggtaaatgggtggttgaggagatagttgatccggttaccaataaagtgacggtagcaattcagtgggtgagtgaaaaaacaaaagaaattattgccattactaaagaagctattattgaggcatggcaaaaggtacaacaatatactgaactgaccattgaaatgctgaaaagtgttgactggtatcaggtgatgacagacctgaagaatggcctggtacagtttgtaatgattgtcggtggtgtaatcgtaactgtaattgcagctgttgtagttattgccgcaattatttttctgatcgaagtgttagcagcggcaatagcagcaggagctgccgcagttggcgctgttatgggaatactggccgctgctgttgcagtgaattcagcaattcaggcgtag

SEQ ID NO: 278265 - DNA, 375 bp, Morganella morganii
atgactgaacaggaagctgaactgaatgctatccgggaaattaccggatttttgctgattgatgataaaaaacggtacttaacccgactcgggttggtgatgacgttcttctttaaaaatggttataccccggagaaaaaaaccgccattctgcgctgctactgccggtttcgtgagctgtacgccggaaaactgcgttttcatacccataaccaaaaagggatgaaaaaatactctgaggaaaatattgaaaaactggagcagtatattaaggcatccgggcctaatgacgttgtggaatggcttatcagtgatgcgaaaaatggtgatgaagcaccgaaatatattatggatgccttaattcttatgaggtag

SEQ ID NO: 278266 - DNA, 267 bp, Morganella morganii
atggccggtaaacaggttatctgtctcggtgatacgactgaccacggcggcgtagtcatctctgcgttggataattacactatcaacggccgcccggtggcaacggagggggattcagtctcctgtccgaaatgcaaaggtgtctttcagattgcttccggttcttccctcatgacctttcagggcaacaaaattgccctggagggaatgaaaaccacctgtggtgccacactgattgcgtcacagtcattaatggtatcagagtaa

SEQ ID NO: 278267 - DNA, 261 bp, Morganella morganii
atgactgaacaggaagctgaactgaatgctatccgggaaatcaccggatttttgctgatagatgataaaaaacggtatttaacacgtctcgggttggtgatgacgttcttctttaaaaatggttataccccggagaaaaaaaacgccattctgcgctgctactgccggtttcgtgagctgtatgcaggaaaatataaggaatggataacttatgacgaattggagaaagatgattcggaatggcggttttctctgggttaa

SEQ ID NO: 278268 - DNA, 675 bp, Morganella morganii
atgacgaattggagaaagatgattcggaatggcggttttctctgggttaaatacgcgctgatattatcgggagtgctgctgagtacaaagcaacttcatgcagaggaaacgatgaaaacaaattacactctatcgtttaacgcaaacaacgcactctgttttgtcaaaattaatgacatgctggtgatggacaatgatggaatgtgggaagggcaattcacaatggggagaacggtcagttcttatctgaaaaacggagaaaatactcttagtatcgctatgctgaatgagtctgtgagtgacgatgatatgtgctcagcaaaaatacaggatgtcaggagtgacggaagtaatgaatatgtttctgcagtaaaattgattgtccgtaaagagcagattacacctgataccacgtattattctggccggtattcgtccttcggggatagtcccagagctaaaaatacagaggaaggatttagagaagtcactcaaatatttcatgctacagatttacctgactggcgatggacaactgcgattccggtaacggaaaaagatattccggcaataaaaatattctatgagtcattgcagaatgactttaaacgtcaggatttacccgctatttaccggcaaacaaaaggaatgtgggaatctttagcaacagagtaa

SEQ ID NO: 278269 - DNA, 465 bp, Morganella morganii
atggcaacgacccttaaccccgatcatccgttagtttctatttccttcaccgctgatactgattttactgtcctggctgaccattgcgccctgtttgctgaggttttgattgagtctgccgacccggtgcaaaaactggcattgtgcggcaggataagcaccggtctctctctgctgaaatccaggctcgctgatcccatcgctccccatcttgttgaatgtctgaccaccgatatcccccctgtcacttctcctccccgctttaatcccgacagcactgaactctgcaactattgtctggcgctgacgcaggttctggcagggcagggatttggctctcagacggcgatgcatctcagttggctgttgtatgaattactggatttttttaagacagatttgcagtcaccgcgctggttacggacagcagaaggaacccggtttcttgatgaaaggacggcatga

SEQ ID NO: 278270 - DNA, 963 bp, Morganella morganii
atgaatgatattacgtttgaatacctgacagagcagtatttttacagtaaatcactgcgtccggcggcgataagcagttaccggaaagttgtccggacctttgaagcgtttacggcggttccgcctgcggacgtggatcatcatatcgtactgcgctggcgtaaccacgttctgaaagacgaaaaacgggcaccgagaacctggaataacaaagtgacccatatgagggcgctgttcaactttgcgatagcgcagggatttttgcctcatgagcaaaatccgtttcattacgcggtggtcagagcaggtaaaaagcggaaaaaaatcctgacgaaaagccagatggatgcgctgtaccggcgggttgatttttatctgaatatcgaaaaagctcacggttgctgtgtgctgtacaacggacgcgtcaatgccatgcatccggcgtggttctggggcacggccattaatgtgctgcgctatactgctatccggatgagtcaactgcttcatattcgtttgtgtgatgtcagcctggaagaccgctggatcgatctgagttcgggtgggtctaaaaaccacgatgaacaccgggttccggttgtcacggcgctgtatccgtcgctggcctatttactggagcgggctgaagaagcagggatggagccggagcatcagctgtttaatgtgggctggtttgatctgcgccggaaatacaaatatccggaactgatggatgaacggccgttacgggcatttttccggcgattatccagggaatgcaattttactatctctccgcaccggttcagacacactgtcgccactcacatgatgaaatcaccggagcgcaatctgtacgtggtaaagcgcctgctgggtcatgtcagtctggtatcaacactggaatacattgatgaaagtgttgacggattacgtaacatactggaaaccgagctgatgtag

SEQ ID NO: 278271 - DNA, 1686 bp, Morganella morganii
atgagtaactcaatcgtcgagattgaggataccaaatgtatttttatcttcggttacaatgccgcagattcacatcctatcgtcgcccgtcgtattgttaaggcgaaagagaagggtgcacaaattattgtctgtgacccgcgctatattgaatcagcgcgtcttgctgacattcatttggcactgaaaaacggttcaaacattgcgctgattaatgcgttagcgcatgtgattattgcggaaaacctgcacgataaagccttcattgacggccataccgagcagtttgaggaataccgcaagctggttgagccgtacacaccggagtccgtggaagcgatcaccggtctgaaagctgaggatatccgcaaaacagcccgtatgtatgcgaaagctgaaaatgcggtcattctgtggggtatgggtgtgacgcagttctatcagggtgtggaaaccgtccgcgcactgaccagcctggcgttactgaccggcaacctgggtaaaccgcatgtcggtgtcggcccggtccgtggtcagaacaacgttcagggtgcctgtgatatgggcgcactgccgaacacactgccgggctatcagtatgtggaagacaaagccgcactggagaaatttgccaaattctggggcatcgaaaaaatgcctgccgaaaacggtattccgctgagtgaggttccgcactttatcgacgaaggcgtactgaaggcgcactacgtgatgggtgaggatccgcttcagactgaaccggatctggccactatccgccgcaccttcgataaactggagctgctgattgtccaggatatctttatgaccaaaaccgcgtcgattgctgacgtgattttccctgccacttcctggggggagcatgaaggtgtgtataccgcagcggatcgcgggttccagcgcttctataaagcggttgagccggtcggcgatgtgaaaccggactgggaaattatcagtctgatgtccactgccatgggttatccgatgcattacaacaacaccaaagagatctgggatgagttacgtgaactctgccctatctactatggtgcgacctacgaaaaaatggcggacctggcttatatccagtggccgtgccgcgatgtggcggacagcgatcagggtacagaatacctgtacgacggcggtatctttgatactccgaacggcaaaggtcagttctatacctgtgaatggcgtgcgccgatcgaccaggtcagtgatgactacccgatggtgctggccaccgtccgtgaagtggggcactactcctgccgctccatgaccggtaactgtaaagcactggcggcactggcggatgagccgggctatatccagatcaataccgcagatgctgctgcactggggattaaagatcaggaactggtctgggtggcatcccgtcagggtaaagttatcacccgcgcgaatgtcagtgagcgtcctaacaaaggggcggtttacatgacctatcagtggtggattggtgcgtgtaacgagctggtggcggaaaacctcagcccgattacaaaaacaccggagtataaatactgtgctgtccgcgtcgaaccgattgcggatcagaaacaggctgagcattatgttgttcaggaatataccggtattaagcgccgtctgcgtgaagcagcggaagggtgttaa

SEQ ID NO: 278272 - DNA, 1608 bp, Morganella morganii
gtggacaacactgacaagaccgaacacatacgccatgaacgtgaccagtaccggatattggtagatatcaccaactcagtgctttcccatctggagatggacggcctggttgctgaggtctcccgcgagatccaccggtttttcgggctgagccagataagcattgcattgtgtgataattacagttctgctgtatatctttgttattccagctattaccaggcccgcaaacccgcagaaaagacattatatcatctggatgaactgcatcctgatctggcacaggttctggacagtaaccagccgatgcgcctgacactcgacagtgccacagaggatccgctgtatcagcatgtctgtgcgcagggcatgacagaaaccctgctgctgccgctggcatttaaccataagccgctgggcgttctgatattatctcatgaaaataatcatatttttactgacgataactgtaatctgctcaagcagatagccgcccggtttgccattgcggtggataatgctgcagcctatgaagagatcacccggctgaaagacagcctcaagcatgaaaacctgtggctgaacgaacagattcacaacaacgaaagtttcagtgaaatcattttccagagtgatgccatgcgcaacattctggagcaggtggatctggttgccgccagtgacagcaccgtgcttatcctcggcgaaaccggcaccgggaaggagctgatcgcccgcgccatccaccgtctgagtgaccgccatcaccgcagcatgatcaaaatgaactgcgcggccatcccgtccgggctgctggaaagcgacctgttcggccatgacaaaggcgccttcaccggcgcgaccaccactcatatcggccgctttgaaatggcggataaaagcaccctgtttcttgatgaaatcggcgatatgccgctggatctccagcccaaactgctgcgggtgttacaggagcgggaaattgagcgcatcggcggtaataaggtgattccggtggatgtgcggctgattgccgccaccaaccgcaacctgaaatccatgaccgatgagcgcgagttccgcgaagatctctactaccggctgaatgtgttccctatctggatcccgccgctgcgcgaacgtccggaggatattccgctgctggcgacctacttcacacagaagattgcccgccggatgaaccgcaatatcgactgcattccgcgtgatgccctggagcagctgagccgctatccgtggcccggcaacgtgcgtgaactggaaaatgtgattgaacgggcggtgatcctgacgcgcgggaatacccttaacattcagttacatgaactgaatatcccaaagcattcacgcctgaaaacggcgctggagaccccgagctcactggaaaaacggatgcagacagccgcaccggagaatgatgacgaagagcgcgaccggattattgctgccctgaaggccaccaacggcgttgttgccggtgcccggggtgccgcaacccgtctgggactgaaacggacaacattattatcccgtatgcagcggttaggtatttctgtacaggatatattcgaagaagataatcactaa

SEQ ID NO: 278273 - DNA, 282 bp, Morganella morganii
atgcgtagcggtatgctgtccggtaattatgattccggcggctgtttctccggcagcgcgatggtaaataacgatacgctggccctctgctataacggcaatccggtgtaccgtgacggatcacggacatcgtggcagtgcctggcccgggaaaaaccggacggcggctttgagaaatacggttccgaaccgggactgccggaagggtacagcgctgacgtgagcaatccgaaggtctggcagcaccgctactggcagcttaaccgtgcggaagtggcctga

SEQ ID NO: 278274 - DNA, 219 bp, Morganella morganii
atgaaaattgaattattatttaaaatcatactgttattcgtgtatttgctgccactgacggaaaacgggctgccgggattcattagtaatattcaggggatttttattatccgccggtattttatcttgccggagggaataaccactgcaaaaaacggaaaaaccggcaaaataaccgtggtttttcagcagaagagaaataacaacagagaaaaatag

SEQ ID NO: 278275 - DNA, 366 bp, Morganella morganii
atgtcagataagcatgacccttcagacggtacgccccatattaaagttactgtatacagcaccccttgtgagagtgaagagtggccgtctattgataattttaacgtattccagtatcccggtcgcaaccgcccgtccatcctgaaagaatatctcgatgaagcacgcagggaaccggagcggatggtctatctcagcagtgccgcagcagtcggccggagtgcattaatttttccggttaacggcactctggccgcaaccattgcatcctggattcagtctttcgatttcagtgctctgctggcaggactgagagatacattacccctggcggggcggataaccggtattgccgcattattgtga

SEQ ID NO: 278276 - DNA, 267 bp, Morganella morganii
atggtgaaaatccgtgccgggccggtgaagtgtaatctgaccgggcgcggctcctcttccggcggacggtgcggccggagtatcatgaacggattgctgtgccctgcgtttttccggttcgtgcagtgcctgctgctcccgctctcgctgccgtttccgttgctgctgctccgccactttctgaaactcccgcagccgctgttcttcctgttgtttcagtcgtgtcatttcgcggtgccgctcttccggggtcagcgggcgtggtga

SEQ ID NO: 278277 - DNA, 1068 bp, Morganella morganii
atgtcaatcaaactacggtacggcgtgtggcactgtgatttcgtttcggcaggcggaacgagagttagaaaaagccttggcacgtcagaccgcgaattagcagaagaactgcacgataagttaaaggcggactactggaaaatagaccgccttggtgaagagccggagtatcgctttgaggaagcgtgcttacggtggctaaaagagaagcagagtaaaagaacgattaacgcagacaaaggccggatcagattttggctgcaacatttcaagggacggccaataagtacgataaccaataatgaatgccagaatatcatatcacggatgaagaaacagaagcccggcggcgggtatccgtcacaggcatcgaagtatgcatatctggcgttcatcagggcaatgctgaggatggcggctaatgaatggggatggctgaaacacgcaccgtatataaaagccactccgccacggcaaccgcgtataaagtggatgactcgcgagcaggttaacgcgcttatcagtcatgctgccgactacctgaagccggtaattacattcgctgtcgctactgggctgaggaagtcgaatatcatgtggctggaatggtctcaggttgacctggtaagaaaggttgcatggataaatccggatcagtccaaaaacttccgcgccataggtgtttctctgaacgacaccgcctgtcaggtaatacgcgagcaaattggccggcatgagcagttcgttttcgtcagggaaagaaagctgcacggcactacagagttagttcctatgcgtgccgatgcaaacaaggctttcaaaagtgcaatgcgcagagcaggaattgagggattccggttccacgacttacggcacacctgggcgagttggttaattcaggccggtgttccattgtcagcgcttcaggaaatgggcggatgggaaagcatagaaatggtacgaagatatgctcacttgtcacccgctcacttgcaggagcacgcgaaaaatatcgatgacatttttaacgctcatggcacgaatatggcacgcaaaaatgtagtctga

SEQ ID NO: 278278 - DNA, 600 bp, Morganella morganii
atgaaaaagtatgacttaattctcgcagacccaccctggcaatataacaacaaatcctccaacggcgcggcagataaccactacaacaccaccgatttttattccctcacccgcttacacatcgaagatatagcctccgataactccgtactctgcatgtggtacacgggtaactttgtccgtgaggcttacgaactggctgaggcgtggggatttaaagtgcgtaccggcttcgggttcgtgtgggtgaagctgaacaaaaacgcaggggatcggatagataaacatccgccggaggatttctttgattttatggaattgctgaactcagagacgcgcattaacggcggcaactatacccgcgctaatgcagaggtatgcctgattgctaccagaggccggggactgaaacgcctgtcggccagcgtccggcagatagtgtattcctgcctcggtgaacacagcgagaacccaaaggaagtacatcaccggctggaagagttatatggagatgtaccgcgcatagaactgtttgccagggagaaatacggcgaatgggatgtgtatgggggtcaggtgccgggaagtattgagttatga

SEQ ID NO: 278279 - DNA, 183 bp, Morganella morganii
atgaaaaatagccaccgctgcgaaatatgcaataagcgccttaataaaagtgagttgctttattacggctacacctgtgaacaatgtgagcgccatttcattactgagtatgaaggaaataaattaaaaaccgcaatttcgcttatcaggctgtatttcagaaaggtaatttactcagtgtag

SEQ ID NO: 278280 - DNA, 387 bp, Morganella morganii
atgaacaaatatcgtgacaaatcagactttgagattaataaggctgtagctaagcgttatttaacgcacgatttcagattaaatagtaccgatgaaatcgttgagctgattgatgtagatttataccgagaatatggcggtgaatttaacctcgcaaataagtacgtcattggtaaattcgacccatgcaacaacccggcggacgcaatgccgattgttattaggagtttgatatcattaatatcagacaagtcagatgatggtgaatcagcatggtgggttgctcaagacgtaacaggcagtattgcgtcgggattgaaatccaatccataccgcgccgctatggaagtattcctgatgatgaaggatgctgagaatgaaaaatag

SEQ ID NO: 278281 - DNA, 222 bp, Morganella morganii
atgaaggttaaattattgaatgatggtggttatgctgggctggagaatattagtttcccagtgattgctgaggttaacaatcattatgtctcagggtttgatgttgcgggatcggagctaatccgcatcggcggagatggagagcatttaaatatcaatttcgattactatttttctatcagcatcggagaatgcgaggcaatcaatgaacaaatatcgtga

SEQ ID NO: 278282 - DNA, 309 bp, Morganella morganii
atgaaaagtgaatatgtgatgcacggccaagtgatgaaatttgtctcaccagaaccagacccgaaagatgtctgtaacctctgtgccggtaatgtcggtaaaaataatttaattcagggacaggcagcaaatatctgttttgactgctcagatttggcgaagcagttggcagatgaaaagcggaaagaaagagcagataaagaattgaatgaacttgatgaaattctaagaaatatgaccacctgctcaatgcctgctattgctcggcaattataccgaatgggatatagaaagattcaggaggggtga

SEQ ID NO: 278283 - DNA, 801 bp, Morganella morganii
atgagtaacccaccaatcgcacaggcggacctgcaaaaaacacaagggaccgcggttaaagaaaaaacaaaagaccagcagctaatccagttcataaaccagcctggcatgaaggcgcaattatcagctgcccttccgcgtcatataacaccggaccgcatgatcaggattgtcaccaccgagatacggaaaacaccatcactggcaacctgtgatatgcaaagctttatcggcgcagttgtccagtgctcgcaacttggccttgaaccaggtaacgcattgggccacgcctaccttcttccattcggtaatgggaaagcggcatcagggcaaccaaatgttcagttaattatcgggtaccgcggcatgatcgacctcgcccgccggtccggtcaaataatcagtatatcggcccgctccgtgcgcgaaggtgacagctttcattttgaatatggcttaaacgaggaccttacgcacgtaccaggcgaaaacgactcgggcccaatcacccacgtttatgcagtagcccgcctgaaagaaggcggcgtccagttcgaggttatgtctttttctcagattgagaaggtccgcgattcaagcaaggccggtaaaaacggtccatgggtatctcactgggaagaaatggcgaaaaagaccgtcatccgccgcctgttcaaatatctgccggtatctatcgagatgcagagggccgtcattctggatgaaaaagcagaggccaacgtggaccaggagcatgcatctatttttgaaggtgagtacgaaactgtatcgccggaataa

SEQ ID NO: 278284 - DNA, 819 bp, Morganella morganii
atgcagccaggcatctacgatgacatcagcaacgatgattatcacaacgggcccgggataagtaaatcacagctggacctcatcgagcagtcaccggccgactttatctggcaacggaatgccccagtggatgaggaaaaaataaaggctctggatttcggcaccgctgttcactgccttttgcttgagccagatgagttcaataaccggtacaggatagggccggaagtaaacaggcgcacctcagcagggaagcaggaagaaaaggaattcttcgaaatgtgcgaaaaggaaggaatcacgccaataacccatgacgacaacaggaagctgatgatcatgcgggatagtgccatggcccaccctatcgccaaatggtgccttgaagctgaaggaaaagccgagagcagcatttactggaatgacaaggaaacggacattctttgccggtgcaggccggacaaactgataggacagcacggatggattgtcgatgtgaaaagcaccgcggacatgtcccgcttcgaacgtgctttttacgatatgcgctatcacgttcaggacgcgttttactcagacggatataaggacctgtccggagagttgccggtgttcgtatttctcgcggtcagcacaacaatcgactgcggaagatatccggtccgtgtattcattatggatgatgtggcaaaggatgccggacggtccgcatacaaacaaaatctcagaacatacgccgagtgcattaaaacggacgaatggcccggcctgagaacactatcactgccacgctacgcaaaggaattgagaaatgagtaa

SEQ ID NO: 278285 - DNA, 231 bp, Morganella morganii
atgaacgcatacgcagcacaggatgctcaggaagagcggcggctggagcatgcagcatggcaggatgccgtggacacggaagtcagcgaactgacaacggatgcttttaataaactccctcagcgccttctggatgaagtaagcgaggaccttcaagaggagatatggaaatcactttttgacgttattggcaatatcaggagttcgtatgcagccaggcatctacgatga

SEQ ID NO: 278286 - DNA, 264 bp, Morganella morganii
atgcagagactggagatatccggaggacagacatcatcacggacggtgcttggccggaaagtaacaacgcatgaagggttcgaccacattaccggaagcctgagccagctcctcagttcgtcggcatggagcatgaacgaactggtcgaattcatgattaacaacgaatacatggacgattttacggacgagttaatcaaggccggacacggaagttctttcttcgcacgggtagcggagaagatgcgcaaggaggcagcatga

SEQ ID NO: 278287 - DNA, 153 bp, Morganella morganii
atgaaaactaaaccttgtcgcgctgcgttcgactttaacgcggtgcgcatcactacgcctcaggcaaagcggaataaacatgttccgcgctgggttgagtatttagcactcgtaattgtcgccgccgtagctgttatccctacggcgatgtaa

SEQ ID NO: 278288 - DNA, 219 bp, Morganella morganii
atgacagaggaatacgaacacgcatcaatccgtgtagaaatggcgagcgatgcgactatcagggattattttgcagcaaaggctatgcagggtgattgggtggcacaaccacaagatggtcacttcttccctgtaaacaccactgaagatgccctcgataaagttgcagcactatattaccgcatggcagacgcaatgctcagagcaagggagaaatag

SEQ ID NO: 278289 - DNA, 216 bp, Morganella morganii
atggatattacatttgagtgcagcagtttttcaggggtaacgcggcgcagtactggcaaaattgtaattgaagccgatggcgctactctcgacggacacgttgatatatcagatatcgttgaagagtattcagctaatgcgcttctcagtgaaattgaagatgaggacattgttaaatatctcaccgagcagggctacgcagtaatcgaaccttaa

SEQ ID NO: 278290 - DNA, 873 bp, Morganella morganii
atggaagtggaagaaatgcagccgcttggaagtccatttgccaagtggaaaggtaaaattgatcttggtggcgaatctattgattgttatgttttggacaccggagaaagagtaatagctctaagggcaaccgttagagctatagccaatgctgagtcaggggacctggccaagttcatcggtgtaagttctctaaatggctttatagacaaagacttagtcctggccgaactaattgaattttctatacccgggacacaatttaaaagccaagggctaaaaaccgagcaatttgaaacgatatgtcgcggttacgtacatgctctatacaagggtgcccctttaactccgcgacagcgcgaaatagccataaaatgcgcagtacttacttcagggttaaccagaactggtcttgacgcccttattgatgaggccacaggttatcaatacgaacgagcagaagatgccttacaggtaaaattaagggcattcattgcggaagaacttagagcctgggaaaaaactttcccagatgagttatgggaagaatttggccgactaactggatggaatacacccctgcgatcaaggccaaggtggtggggaaaattagtaatagaactcatttatgacacacttgatgaagatgtggcaaagtatttaaaagaaaataagccagcagcaggagttcattggcatcgccagttaacagaaaatataggtgttagacaattggtatcgcgttgctgggaagttattggtgtcgcaaaaacatgcgatacaatacatgagttaagaagtagagtggctcatcattacgggaaaaaaccaatacagatgaccatgtatctgtcgaacacagaagaaaaataa

SEQ ID NO: 278291 - DNA, 528 bp, Morganella morganii
atggttcttgctattcaatctgctttaggtctgcctcatggctggctggatgggattacaggcacggatattcctgcaccatcgccaagtacatcctacaaagtggaaatcctcgatgttgaagccagcgctggacctggtgtgatggtgctggatgattttattgaaactatcacggcaattgagtattcggcggaagaggcaaagagactattcggcggaagaccagctgaaacaatcaagatgatcaccgtgaaaggtgactctatggtggacaccttcgaaccacgcgatcagatattcgttgatatgactgtcaaccattttgacggtgacggaatttatgtcttcatactggacaatcagctctatatcaaacgcctgcaaatgcagcacaagcgccttgctgtgatatcagataacccaaaatatgaaacatggcacctgcatgaagattctattgatggtgtcttcatacaggctaaggtactcgtgagccagtctattaagtatagatttcacggctaa

SEQ ID NO: 278292 - DNA, 228 bp, Morganella morganii
atggaacaattacggattttcctaaatgcgctctcagtatcagaacaagagtctttcgcaaaaaaatgcggaacaactatcggatacctgagaaaggcaatctcaaagggcacaaaactcggcacagagttatgtgtgctcattgaaaaaaacagcaactcagtggttaagcgccagcatttatatccagaagattgggaaaaaaactggcctgaacttgccgcataa

SEQ ID NO: 278293 - DNA, 327 bp, Morganella morganii
atggaaaatgcaaatccacgcaaatcgtttaaccggtttgtgtcaaatcatctaaccgccacggcacatcagcaattgcgtgaaacatcccaaacggtagtggcaaagctgctcaatgttcacgactcaacaatcatgcgcagagcagagaaattctcggattgctgcgaagtattggctgcgtcaggaattagggattttgttttgccaggcgagaagaaaatcagcgaggaagagtaccggtttctgtggaagcagatcggcgaactctctctgatgagaacaaaagaaaacgccccggctgttggagcagcagaggcgcattaa

SEQ ID NO: 278294 - DNA, 252 bp, Morganella morganii
atgagcggatacgctttgcttcaggaatgttatttcactgatgcagacaaacacgcctggatggatgccatgagttatttactggaaaactacagcgagttcccggcagacatggatgtgaatattcagcgaaaggctgagtttaaaaacttccggttcgtaaagtctccggatggagtggttctgtttgcgaactgcatggtgccgggtatcacagctgatgattttaatcagttcagagcgattaactga

SEQ ID NO: 278295 - DNA, 240 bp, Morganella morganii
atggggattttatttcacaaagattacgattacgaagaattcaacactaactttaacaatttcaatctgttgttagataagcaacagccaagagaaatcaagttgtttcacagcgacaagccagtgaaaagtaaaacaccccaccttgatcgaaaattatcccggtgctttccaaggggaaaggcttaccttcacatgtctaaccgcgagtgtttaatccggttcacggaggagcgctaa

SEQ ID NO: 278296 - DNA, 207 bp, Morganella morganii
atggaaccaacggattttgaaaagtggtgtgcgggtgaacttggctatacgccggagtggatcatgatgcagcggaaaataaattttttcggcgaccatgaatacaaacatggtgagattgcgaaaagataccgcgcctacatggccggagttcgcagcagactgccgtaccagacaccgccaaaaggagatgaagatgaagggtaa

SEQ ID NO: 278297 - DNA, 195 bp, Morganella morganii
atgaagggtaagggaaccgatttcaaaacactgatgatgattttccatcgtgagcgggtttctcggcttattagaggtataaaaaacggcaaggggttcgatgagtatcgtggcccaaaatacaggtgtgagcgggtaataaacaaacttctggtgctggaatcccaggctaaattacggagagtccaccaatga

SEQ ID NO: 278298 - DNA, 198 bp, Morganella morganii
atgaaatggattaagtgctcgaaaaaaatgccggaagagtatcagtatgtaatggcaaagaattccggtgcttatgtgaaagctatattttttgctgatgaagctggattgccggtatttttaaattacacagatagaaccggcgcaagaattcttgatgctgttacagagtggaagccacaaccaccggaggagtga

SEQ ID NO: 278299 - DNA, 276 bp, Morganella morganii
atgctggtagtcacttcaatgtatcagtcgggtttcctgagcgtaacaaggtggtttgaaatgacagagagaacacagaagcttaagccgtgtcctttttgcgggagttcgcacgtagaagcattttgccaatacgaagaagattgtcctgaccggtcagcaatagtccgttgccatagttgcgatgcccaatccgcgcaaatgattggccgcggtaaaatcgatatggcaatcgccgcctggaaccgcagagcaccacaatgtgagaaggagtag

SEQ ID NO: 278300 - DNA, 423 bp, Morganella morganii
atggaagcagaatttctcttccacgaaacaaccaaagatgcagcctggcaacacctcaaagaagcactcgcaacaaacaaaccccaccgagtaatcatcaagccctggaaatctacccgctcactatctcagaacgcacttatgtggatgtggaatgatgatattgcagccgcaataaacgaaatatctacggaacgtttaagcaaagacgagatgcatgaatatctcaaggagttgttttgcccaataaaaacgatttcggtaatgggcgtggcacgaagagttaagtcaacgaagttactgaataccgacgagatgaatttttaccttaggcgcattgaggtgtggtgcattgaccgcggaataaaaacgagaatccctgaaaattcagagtaccacaaaaggagattggataatgaataa

SEQ ID NO: 278301 - DNA, 537 bp, Morganella morganii
atgaataatcatgaaatatggaaagatgttcctgggatggagcacaaataccaggtgagtaatttaggtcgggtaaaaagtaaggacatggaggttagaacctgtggaagaaaaaggaatttcacatacagaaaagtaaaaggcaaggtgcttggtctttgcaggagcaaagaatacgacagacttgcggggtcaaaaggcgatcatttgttggtacatagattggttgcgatggccttcatcccgaatcctcaaaaactgcctgtagtaaatcacatcgatggaaataagaaaaacaaccgggtggaaaatcttgaatggtgtacgccagcggagaatacaaagcacgcctggagaaccggtctgtgtgacaagcaaaagaaggctgttatatcaatatcaaaagaaggatttggtcattggtacccatcaatgcagtcgacaaggttctatggctgcaacccatcattagttcataacacaatcactggcaggcagaaatcccacagaggaatgacgtgggattacgcagcatga

SEQ ID NO: 278302 - DNA, 198 bp, Morganella morganii
atgaaagaacctcacatacaccagcttctcaccaatgacgaggccgataacctctgcgctcactacaggcgtaaaggatataacccggtgaagtcactgaatatcaatcctcagtatttcgacgtcaccgtgtatctgccggtcgtcaaatatctgaaacctacaccacgaacaatggttaacaggatgtggcgatga

SEQ ID NO: 278303 - DNA, 393 bp, Morganella morganii
atgaacagcgaaaaatacaaattgtacgtagaaataatcaagcgatgccgtgactgcactgaattcaccaacaaaacagtgtcagcggtcattggagttgataccaggacaacatccatctacatgcgtgagatggaaagtatcggatgcgtgaaaacagtagggcgccgagttatccgtggttatctgagcccggtgtaccaatttgacgataacgctgttaccagactgagaaatcacttcctgacggaggccatgcctgaagcggctatgaatattatcgcatctgaaaaaataccagcaccaaaaatcagaaagcatccgttcgaagatggttttggccggtcgctcataaccagaattgacgcaatgctgcgggaggtgcggacatga

SEQ ID NO: 278304 - DNA, 294 bp, Morganella morganii
atgagttggaaaagtaaaattgaaggtcttgatattgaccagttaagaaacttcagggatgcgataaacgaagccataaaccagaaggaggaagagacgaagcgcactgtatggcgtgtttgtgaccgctggatgtgtcttggtaatttccgggaggatgattacctcagcgcagttgacttacttgttgagacagggaagaaacgtaacgctgaaggcgatgtggaatcaatgtcgatagaggttgttcgccagcgggttccggagtctgaatatgaggactggtttaaatga

SEQ ID NO: 278305 - DNA, 135 bp, Morganella morganii
atgacctgcgcaatatgcagtaaagaacttaccgacgatgaagtttatgtctgcgaccagtgcgccagtgaatgccctcatctggaagtggttgagaaaatcaaaggagatggtgatgccgagaaaaaagattaa

SEQ ID NO: 278306 - DNA, 168 bp, Morganella morganii
atgccgagaaaaaagattaagtacatgcataaacacaaatacccgaaaggtgaaaataataccggcggatcgcataagcgggacggcattgaacaggcgacacgatatatcccgttcgtattgtgctgggtgctgttcgttctggctatcggcatcagtttatcgtga

SEQ ID NO: 278307 - DNA, 594 bp, Morganella morganii
gtggaaaagcaatcgcggcgaaagtgcctgatatgccgggcatggtttcacccgaaattcagtaacgaatggtggtgctgcccggaacacggcgctgagttggcaataaagcgacgaagcagggaaagggaaaaggccgaggcaaaattaaaaaaggatcagcagcagaaaaaacgtgaagaaaaagataagttaaaaatccgcaagttagcagtaaaacccctctcatatttcgcaaagcaagcacagactgcattcaacgcatacatccgggaaagagataaagaccttccgtgtatcagttgcggccgtcaccacgcaggccaatatcacgccgggcactatcgaaccaccggagccaatccggaactgcggtttgatgaggataacgtccataagcaatgcgcaccatgtaataaccatctgtccgggaacatcgaaaactacacaccgcacctgattgaaaaaatcggccaggatcgtttcgaccgcctgatgggtgtgcatgagttgccgaagtggaaacgggatgactatgaacggatccgggatgagtaccggcggaaactgaaggagctgaagaatgcgacctga

SEQ ID NO: 278308 - DNA, 201 bp, Morganella morganii
atgcgacctgaaatcacatcgataccggaaatgctggttaagcaccatggaaatatgactgcactggcgagcgagctgggaataaaccggcatacagtcaggaagtttcaccgtgatactcggtgtgaaatgcacgttatctacaacggcgtgctgatgaccaaatccaagatgaaaggcaaccaggggaaagggcaatga

SEQ ID NO: 278309 - DNA, 393 bp, Morganella morganii
atgtcgcgtgacgagtgggatgatgaaactgccaccctgatccgcgtgaccattggtaactgcaaaaaacagggatattccggcaacgagctactggaaaaggtaaaggagattgtatcaccaaacaaatcaacgctcggcgcacttcgactcgccaaagaaaaagatgacgccgatgtcgttgaatcctgtatcaacaaagcctttcctctaaataatccgcttcgtgatgtggttattaaacgatataagaaccgcaaaagcccgcaaaatgttctcgaatcattatccagagagacggggatagatattgactcagcaaagcgcagggtcagatgggctgataccatcattgaagatgtgatttattccacagtgatcggtaatcagtag

SEQ ID NO: 278310 - DNA, 309 bp, Morganella morganii
atggcaaagatggatgacaaagacctgaaagtcaccggtacagcatggggtgtcatatttgccatatccctttacggtggcttagcccggtacattattgacaacaaacgcaacggctaccgctggagctggctgggggcaatcatgcagatgatggtttccgggttctccggcctgatgggtgggctgctttctgtggaactcaacgcttcgttttattacacggtatttgctgccggtatgtgtggcgctatgggttcttttgcactggacttcttttggtcaaaattctcaggcggtaaaaaatga

SEQ ID NO: 278311 - DNA, 417 bp, Morganella morganii
atgagcaaaccagcacgcggcgaacgcaacaataacccaggtaatatcgattacaaaccggcgaataaatggcaggggcagttaccacatgatccgaaaattgaatcacggttctgtcggttccagtctcctgaatatggtatccgggcaatctataagttgctacagacgtatcagacaaaatacggcctgaattcagttaaagccattatcaacaaatatgcgccgccgaatgaaaacaacacgactggctatatcaatcgtgcagctgcggatatcggtatcggcattaacgaccacctgaacaccaaagacaaaaagaccggcattgcgctggctactgcgattgtcggcgttgagttagggtatcagccgtatccaccggatgtgttcgaaagagcttggagcttactgtga

SEQ ID NO: 278312 - DNA, 378 bp, Morganella morganii
gtgagcaccgcaacaaagatatggctcggcgtttgcggaatactggctgtcagcctgctgcttatcctgcatctgtatggtgggctgaaagataatcaccaggcactgaaagataagcactctgcattgacggcggtaaataacatcaccctatctgctgtcgctatcaatcagcgtgtggctctcgacaacatcaaggccaaagaaacagaggacacggaaaatgtcaaaattaaaaccgttatcaggacggagtttagaggcagtgagtgcgctgttactcctgtttcccctggtgttgttgggaagttgcagcaatacgaaagagacattcgttcccgcgccggtggttccgattccgccacaacttaccgctga

SEQ ID NO: 278313 - DNA, 174 bp, Morganella morganii
gtgagcattgaaaccgagctggcttacctgaaatcaggaaaaagaaaggtgcttgaatttattgacagcacgccgccggaagatgttatcaccctgatgagctggaatagccagctggacaagctaaacaaagaaattttagagctggaagaacaacaacgcctcgctaaatag

SEQ ID NO: 278314 - DNA, 192 bp, Morganella morganii
atgcaaccacatcaacagcgagtagtggatgaaaaagctgagcttgatgacaaaatttcaaagctcacagcatttactggtggggatgtttttaaatccatccatcaggaagaccaggatttattaatcgaccagttgtcattaatggcgaaatattctcaggtactggaaaagcgaatctcccgcttctga

SEQ ID NO: 278315 - DNA, 543 bp, Morganella morganii
atgcaatatccaaaagttattgttaacggcgtgtccgttcgtgttgatagtgaagggcgttacagtctgaatgatttacatgcggcggcggttctcaaaggcgaggccagtgagtcacaaaggccgggtaagtttatccggagtgccggagttaagcgctttgtttctgctctcgatgccagaggacaaaaaagtcctctgaaaggaaatcaatcacttaaggtagttaacggcggtaatgagcaaggcgtatgggctgctgaattactggcgatacgttatgcggcatggattaagcctgagtttgaaatcagcgtatacgagacattccgcgaagcgacacttaacggcctgtcgaacatgaccattcttaaccgtcttgatctgctgattgccactgaaaagcaggagattagccattgcgcccgcagaatgaatagttggggtgttggcggacggaagaagtcactgactgacaccagagcaaatatcattgctcagatggatccggatatggtttcactgatggaggcgcaccaatga

SEQ ID NO: 278316 - DNA, 345 bp, Morganella morganii
atgaaaagattactggctctcacattcgacctcgcaatcgcggggtctttttattttggcatcaccatgaatatggatggcctgattaatgtcgggtatttcgccggatggctgttcgtcgtcatgaatgttctggttggccttattggcaaggataagatagctgaaacctacacacatcagtctctgctgtggcgaagctatgacgtgcttactgacattgcgtttgtggctttcttcgcatactccggatggtttgttctggcaaccacctttgcgataggtgcgatgtgcaaagcaggcattaagaacgagattgaaaaagacatcgctaaatccaaatag

SEQ ID NO: 278317 - DNA, 198 bp, Morganella morganii
atgactgaaaaatacgaagtcacagcaaccaaaaaggacggcacgacatatcacggattgatgacaacgaaagagccacgcattactaacggactgatcggtattgccggtctggacggctcatggacatatatcgcaccggatgaaatcagcgacatcagatacattccggttgttgaggaaaagagtaaggaatag

SEQ ID NO: 278318 - DNA, 228 bp, Morganella morganii
atgcgctatcagtgcgcacttagccgattcaaatatggccgcatccaactggataatgcagacctcagtcgtgaagccaagctgacgggctttcaggatgatattgcggttgtggatgccttcgaaatattccgcttgttcaggcgtcattttaaagcgaaccggccgaccttctttatcggtgatccagtacagattattcagacgccattgcttattacgcagtaa

SEQ ID NO: 278319 - DNA, 1587 bp, Morganella morganii
atgatttacacagacggcaccatagccattaaagccggttcaccgattgtgaccggtaccggtacacagtggaaaaagaacattcacggtgttgccccgggccagcttatcagcatcgagagcggtactgcacctgttagcatgatgatccgcgcggtaaacagtgataccgagctggtgttgtcattcgatgccccggtaacgctcagcggcgcgaaatactccatcgccaccacggtaccggacaccatttcagatgctgcccgcactatgtcagccaatcagggttatatcgtgtattttctccgggccatgcagcagtggatgacagacaccggccaggtggaaattgagctgccgaatgggcagaaggtgacgctggaggatttaaaagggctggcttcgcgggaatgggttaacaatatgctcctgacaagcggggagctgacacagattcagtcaccggccaaaacgagagggatttatgttaatgataacggggatataggcggaaacctcggtcctcatcagaactggaaggtggacgggaatgcaaaagcccatttccgggaattagaagtaaaaagtccgggggattacaccggtattaatctggtaaaaggtgatggccgatatgtactgatagaaactaatccgcatgccggtagtgtatcgatgctgacgtttgcatacagaaatgcatcaggagaaaaccagcacgttattactataccgtatgactcaggtgtgctggctactcagacatatgtgaaatacagtacagggtttggtatcggttctgaggcgggtggtaaaggaattacagattttaatagtttcgttacgccaaccggtcagtactggtacggaaattcctcctcaaatattccccggactgtcgtgggatttggtaccgcactggttacacggtattccaataatatttcgcatcatctgattattccgaactatggcggagggagttatctcgctatcagacgtaacaatggtggggcgatagaggatgtcgttgccctgacatccaatatgtatatcgtagacggcagtggatattataaaaaatcgtcgccaatcgttcagatttaccctgatggccattacgaaaccaacaacgaatccgaaggggctgaagttagccgcaccggcaccggccaatatcacatcaccggtatactcggttataactcagatggcgcatggggtgtaaacggtggaatttccgtaccgaaagacaataacggccttgagctggtttatgtcgatgaccgcgtacaggaagatggcagtattatcatcgaaacctgtcaccgtcagcatgcgcatttgccggaacgtttccagaactggcggctgaaagaggtcaccccggaaggtgagagtattttctatcaggacggcgaaccgtgtgacctgccggaatcaacccgcctcgatgtgcgtgtggaaatgccgcagggctcagtgtggaatgtgaaacagcgtgaattggccgaacagatggagcgtgagcaggcggagcgtgaagcgcaggaagcatcagagcagaccgtagagtcagaggaataa

SEQ ID NO: 278320 - DNA, 711 bp, Morganella morganii
atgaatgtggtattgatttcgagtatcattagtgggggttttgctatagcttctgttgtgatttctgttggaattaccacatataatcagaatagaattaacaaaataaataacgctatggaaacaaagaaaaaacatcagtattatcttgaaccattgattaggtcagcggctgacttgcaaagtcgtatttataatatattagagggtggttttattaataggtattactataatggaagtgagcgaaataaaagctatgttataaataatactgtttttcttgtggctcaattttttgcatggacagaggcagctcgtattgatattcaatttcttaatcttgaaagtgatttaaagactcgtaagctatcggaattgcagagtaaaatatattcattaatacaaacagatagcttgggtccctattttattttcttcgcgggagaacaaagagctatcggtgagcaaatgttaataaaaatagataaaggatacaactgtataggatacggcgagttcttgagaaaagatgcattcagtaacgaatttttatttaaagaactgggaaatgaagtagtgaaaattacggaaaatctgcataactatcgcgcacgattacaaaaattacagcatgcactaattgatttacttgactatcttgatcccaacgaaattagaataaatagtaatgagcgttctaaagtataa

SEQ ID NO: 278321 - DNA, 1074 bp, Morganella morganii
atgatagtcagaaattataggaatttaaatctagttagggctaatattgaaactgaatgtaggcagtttattcaaactaaaacgtatacagttcagtcaattggcccgatgccggggcaaaggcccggactcagagtgagattcgcgaaaacaggagagagcttcgctaccgttgatattttctataacagcgatggttcgtctacagtccagtaccgcacaggagctaatcagtccttgggcaaagagcttgctgatcacctttttgaaaccattaatcctgcagaatttgagcatgtaaatatggtcgtggaaggctttgtagaggacacacttataccaatacttgagttatcagcagaagaaacgcatattgagtacagagaacactttcgtaacgctcactctatcgtgtggaaaatcacctctactacataccaggatgaattggcggttaccctgcacacaacaacaggcaaacttcagattcagggccgcccgctatcctgctaccgggttttcaccttcaatctggcagaactgcttaatttgcaaggtttggagaaagtattaatccgccaggatgatggcaaagcgagcatcgttcagcaggaagtagcccgcgctaacctagagtccataatgggggatgcttatgctcatttgcacaccactaccgaaaaattgctcatttcaggtctgtgtgttaagctcgcagctcctgaattgccagactactgcatgttgctctacccggaacttcgcgccattgaaggtgtcttaaagagcaagatgtccttatttggtatgtctgtacagcaactttcagggttcgggccttttttcgatagggttggttcaagtttcactttgaaatcgcaattttcgacttctctcagttcaaatcaggttaatattgtcaatgatgcctatactttctggaataaggaacgtcatgcagtgtttcacatggaaacggtagttgataccagccgcatgatttcagatatggcccgactaatgaccaaagccactaaagcgtggcaaataatcaaggatttgtatcttgtttga

SEQ ID NO: 278322 - DNA, 381 bp, Morganella morganii
ttgtttgaaattaccggggttaacatctcaggatctcttaaggctgtcgttatggcgaccggctacgaaaacccgttgtcttcagtcaatgaagttgagatgaaactcactgacctactgggccaggataaaagtggtaaaatccttttcgatctcctatgcgctaacggtcctgagtggaacagatttgtgacacttgaaatgaaacatggccgcatcatactgaattcggccaaaattattgatgagcacgaaataccagcacaagtcctgagtaaactgacttttactttacggaatcaccctgagtacttagaagcgtccgtattaactcccgatgatgttcgccaagtcctttcagtggatatgcaaggggcttga

SEQ ID NO: 278323 - DNA, 291 bp, Morganella morganii
atgagagcactggatagtatctggtgtgacggctaccggtattataaggctggcatcatcctgtctgacttcacggattcagctatcacgcagttcgatatgttcgccacccggcagccattcaaaaacagcgatgagctgatgaagaccatcgacacgatcaataacagcggcataggtcgcgtgtggtttgctggtaaaggcagcgacagcgggtacaagatgaagcgcgaaatgttgtcaccggcatacacgacaaattttagtcagttgccggtggtgaaaagttaa

SEQ ID NO: 278324 - DNA, 153 bp, Morganella morganii
atgggctggtttgaagccgctgacttaatcgttaaaggaatggaaggggcaatcgctgccaagaccgtcacttacgatttcgaacgtctgatggaaggtgctaagctcctgaaatgctcagagtttggtgacgcaatcatcaaacacatgtaa

SEQ ID NO: 278325 - DNA, 885 bp, Morganella morganii
atgactacccctaacaaaaataccgagtctgattggtacagttttcaagaagagatttgtgagcattttaaaaatctaggtgccaatgctaagacaaatgttaaggtagaaggagtaagaggtagttctaatatagatgtggtggtagagtcaaaataccttgggactgattttaaatggtttgtagaagctaagtattggaatagtaatgtaacgaaggaaattgtccatgccttttttacagttattcaaaatactggggctgacagaggttttattatttccaaaacaggttttcaatcaggggcgattgaggcaacgaaacatacaaatataagtttatatacatttgaagaatttaaagcgaaaacaagccatcttgtgcagtccaatatattaaaatcatttttgaatcgagctattttaactagcgtaagatactgggggcacactaaagaaataaggataaaatatgaacttagatatgaaatgtgtgattatagagagattccctcatgcgctgtaattcttattattgttgctgacttaattatcgatgaagagattacttatccgctagatatttctcgatatataggaaaacaaaaagaatctatcaataattttcatgaattaatgcattggttgaattcaagcttgaatgaattagatcgtagaatattagatgctgaaataatcatgaggttgaatggcgagttcaaccctgtatatgaatattttacaccagacattattagaatttgcgctaaagatagaattgataagtttttagactatagtttttttcctgaaaaagaaagagaaatggtgattgagcaacaaagattgtcagaaaactacagaaaaagttgtaaggataattga

SEQ ID NO: 278326 - DNA, 2463 bp, Morganella morganii
atggaaagcatggaaaatattgcggcgttatcaaaagagataaaaaaaaccataataacaggatgctatgataattatgaagaaataaataattatctcaattcaattttctctgaaatatataaagcaacaaatgcggataagataagactcaagttacttgatttatcttcagcaattcatgaaattggtgaccctgctattatcatcttgctaaaatatctcctagacaatttggagaatgttaatacgcctaacgttctagtcagcaccacacttgaaggtgaggtaaatatagaagatgttagtaactttttaatgaatgacctaattgaaaatactgagcgcaatatcaatttcttcaatcataaaaaggggcgatcattaatagggaagaagaaattatatataggattacgaatagtattcgaacattttcttaaagaaggagggaacgatgatataccttccgcactgatttcgatggttaatatgtgggaactatcaaaaaagaatgacagactatacgagttttatatatatttcaattctctgttacataagctaaattttcttgggaaaaatcaattagctcgagatttgtctgaattggcacttcttctatctctgaaagataaggtttttcattattctttttacattaagatggctaactttgccagacagagaaatgttatagactccttactttcagcaaatatgttgttatatggaattaatttatctaacaaggaacatgacctatttttatcaaaaattcttttggagttatttattctgttaaggaattttcaattttatccatatgcagagagagttagagacgcacgaacaagattaatagtagatgatgaatatgaccttcatcaatttgatatggcatattttaatatgttgcttttgagtcgttcagatgagttatttgaaataattcagtgccatttagaagaaaacgacgtgatgaaatttgggaaaaatgcaggaatcccatggcttacattgttacataaccttcacaaattggattcggaaaagtttaaaaataacaataaattgattgaattatatacaaggctacttaatgatgaagatataaaaaatgaacctctgatcaaaaatattttccaggggctagatggtgatgtctcccaaaataaagaaatcgttaagcagcacataagggaaatccaacaatcccgaaaccatcaagatgttaactatgaaataactgcaataagaccattagtttataatctattgaaaaatagcatcataaataaagatattgaaggtgctttaattgctcattcattaatgtctgacacatcatatcttcctatatgtaaagatatttttgggttaggacaatacccaatagatatattgggtaaagatgagtcagattctatttatgataattacatgttgtatcttgaatcaatcataatagaatcagatagtaaacaattcttatggattggatgtaatgagtatttttcatattcaatcagtttatacaaaggtattttttccatttcacagaatgatgacttcaaacgaaatgatgctcgtaattggaatgaaaatgaaattgctaaatttgcttttaacgaccaaccttctataaatgaagttttgcaatcaaaagaagaattctggcttaatgagtcaacagaactaatggaaaaaattccatctctaataccaagtatagaatgtcagaaagttgttatttttagagattctgagatatcaattattcctataaatttattgaaaaaaaattcaaatacaccgctgtgtgataaccatgttatcattacccctctatcagtaacggaatatattaatgataaagaaggcattattgacacaaggaaaataaaactatgggcaccaatagaaaatagcgacttcgccatacaaatggcatatagcaaaatatctgatgaattcactgaccaagaaatgattaaaattgatagccttaatcctaaaatagagctaaatcaagatataaatatttttatttctcacggtggtaaagatgacctatacggttttaggagtatatctaccggttctgggctatatataacagatgaaagtttaatatttggcacgggtgagatagctatattatttatttgtcattctggcagttcgaaagcctcgtggtattcaaacaaaattaatacactcattgacaaagtcctatctatgggatataaaaccgtcatcgcaccagcgtggagctataacgttatgcttgctggtatatggtctaaaacatttattgatgcttttaaaaatggaaaagacgtagctgaatcaaattatattgctaatatggccgtgaaagataaatttgtaggcataggtgcttacgctgcaatgcatgtctttggtaatggtaaattacatgcaaatatagagcattaa

SEQ ID NO: 278327 - DNA, 228 bp, Morganella morganii
atgacagaagtaacaaaggaaatgtgctgtgagggtgagcagacggttatcagtattgtggttaacaactgctgtaaatgcaaacgcggatgtgaatgtaaagaaccggaaaaaccggaaccgacgtgtccgccggtaactcagacatgtacaccgccggatacaccgtggacaccgacaacaccgatgacaccaacatatacggcgatggtaactactccaccgtga

SEQ ID NO: 278328 - DNA, 822 bp, Morganella morganii
atgactcatttagcttcccgctttggtaatgccaatatcatccgccgtgaccgtccgttaacctcagaagaattgtatcgcgccgttcccagtattttcggtgataataaacatgaatcccgcagtgaccgctatacctatatccctaccattactttgcttgagagtttacagaaagaaggttttcagccgttctttgcctgccagaccaaggtgcgtgatgtcagtcgccgggagcataccaaacatatgttacgcctgcgccgcgaaggccagattaccggtaagcaggtgccagaaattattctgctcaacagccacgatggttcatcgagttatcagatgctgccagggttatttaggttcgtctgccagaatggtttgattaccggccagaccttcggggaagtgcgggtccctcataaaggggatgtcgtggagaagatcattgaaggggcttatgaagtgctggggctgtttggccgcatggatgagcaacgtgatgcgatgcaatctctgctattaccaccacacgcacagcaggcactggcccatgcagcattaacctaccgctttggtgaagaccaccagccagtcacgcctgagcaaattctgacacctcgtcgttatgaagataatacccctgacttatgggccacctaccagcggatacaggagaatctgattaaaggcggattatccggtcgtaacgccaaaggaaaacgaagtcatacccgtgccgttaacagcattgacggtgatgtaaaactcaaccgtgctttatgggtgatggctgagaatatgctgcagatggcagcgtaa

SEQ ID NO: 278329 - DNA, 429 bp, Morganella morganii
atgcctatacaacatcagatttcttcaatcacccgccaaaccatccctttatcgcaccgtgataatttctggtttcagcattttcatactgtacctttatggatcaagctagaaggccaaatatttcattttatggacagcttttgtgatgagtaccacggggccttctgggagttctgcgtgttatcgaatcagggcgcatttatttaccctgctctgacggaaaaagaggtgaccttatttaatcctcataatggcaatgaagctacactggggcccgaagccgctggaatagcggtttgtttaatggtttttagcctctggtcgtttaaaacggaaagtgaagtgatggtaaaccgcttttatcaattacgaaacttcgcgatacagcatcctgaaagcgctgaaatatttcatcttatagattaa

SEQ ID NO: 278330 - DNA, 849 bp, Morganella morganii
atgactcttgtacgcaatggaaaaaaacattatacctatcatacaacggatataaatgaagctatttatatttatcattcaatattagataatattttggaggaacccagaaaaacaaccttaataaaattaaaaagcattagtgaacttatagatgaaataaataaaattcataacaaaaaagacatagatagatatataatagaatgtcaaagcagatacagtgaaattaaaattaatttcactaagaataatttaaaatggataggtgtggattcatatgcgggtttttacttatggttcaaattatttgttattgatgatagatacagcagaacaatacagtcaacccctgaatcattagaaaaaatatattttgatatcattaatattgcaatgtcagatatagatgaaatccccacattagaaaaaataataaacagaacccacaagagttatcaaaaaatatccggtacaaaacgattaagttggctaaagaatgatgacagacaaattcaatgggcttaccaatatcttaaagaaaaagatcgtcaattcagaagattttattttggagacccaataaacgtactggatatcattaaggtttattatgacttaaatatagataacaggggagttaagcttacctatatagaaatgaataacgcatggaaccagcatcgttacagagagtcaagaaaggataaaaaagcactcagtggatatattagtagtgatgcgaaaataaaattaactcaaatggcaaaaaaatcacgtatgccagagtatgaattattggagttcttaatacttgaacagtatgaccgggataatcaaaaaaattag

SEQ ID NO: 278331 - DNA, 579 bp, Morganella morganii
atgcgtattacatttatctctaaattacaaaaattattacatcatcatcagtctggattatttagacactactctaaaattctgatgataaggagtgacttccactggtcattaaataccgataggtatgtgaagggtgatgaacatcaattcagcgctgacatgagttatctgatgttacgtctttcagaccactccggcgtaattggatatgcctgggtattggaggaggcattagatcgtggattacatgcacatgctgttatttacgtgaacggtcagcaacatcgcagtaaatgggattttaaaagcctagtacaaagcctctggggaaaggtcaccgacggggaagggtacgtctataactgtgaggataaaagtgactacagagctcctatacgctttcctgttcactttgatgatatcaggggacgcaggaatatgcgttatgtagtgaattacctagcgaaagtcgagcagaaaactgattaccctattttttatctgtcaaatttgccggatatccgccgtaaaaaggctggtcgtccccgtacgggaaaacggaagaatagcaggtag

SEQ ID NO: 278332 - DNA, 222 bp, Morganella morganii
atgatgattaagactattcccgcaaccaacctgctgaatgaccaatttgttgatatgaaattcatcacacggtttaccggcttaaccgacaaatggttctacaaacagatacagagcgggaaatttcccaagccgattaaattgggcagttgctctcgctggttaaaaagcgaagtggaatcatggctacaggctcgtattactgcatcacgaggagagtaa

SEQ ID NO: 278333 - DNA, 258 bp, Morganella morganii
atgactcaactttttgatttcgacaacgccctgaaagcccttcagaatggtcaggctctgatcggtaaagatggcatcctgaccccgctgattaagcaacttactgaatctgcattggccgcagaacttgactcctactcaccaatgatgctgaagctaaccgtaggaatggctctacgaaaaagaccattaaagcaccaaccggtatttgagctggctactccacgcgatcgcaacggctcttttaaccacaactga

SEQ ID NO: 278334 - DNA, 270 bp, Morganella morganii
atgaagaagcaccagaccacactatcaaacgagattgagcaaaaaattatccggttatttgccatcggtatgagctacgccgatattagccgggaaatagaagatctatatgccttcagcgtctccgcagctaccatcagcgctgtcactgacgaggtttgtagtggtcaactaaaactggccatggttttagagttttttcggtattggttttctgattcgtttggtggtaatccaccgttatattcatgcggtctgacttcgctgtaa

SEQ ID NO: 278335 - DNA, 627 bp, Morganella morganii
atgaaggagatggggctggtgagctgtcagcagcctgttcaccggtataaacgtggcggtcatgaacacattgctatcccgaaccaccttgagcgacagttcgcagtgacagagcccaatcaggtatggtgcggcgacgtaacgtatatctggaccggtaaacgctgggcatacctggccattgtactcgacctgttcgcaagaaaacccgtgggctgggcaatgtcattttctccggacagcaaactgaccaccaaagcgctggaaatggcatgggaaatacgaaataagccatccgggctcatgttccacagtgatcagggcagccattatacaagcaggcagttccgacagttactgtggcgataccggataaaacaaagtatgagcaggcggggtaactgctgggataacagcccgatggagcgcttcttcagaagtctgaaaaatgagtgggtgccggtgaccagctacaccaacttcaatgaagcagtccatgcaataatggattatatcgtcgggtattacagcgaagtcagaccgcatgaatataacggtggattaccaccaaacgaatcagaaaaccaataccgaaaaaactctaaaaccatggccagttttagttga

SEQ ID NO: 278336 - DNA, 303 bp, Morganella morganii
atgaaaaaacgaaatttcagtgcagaattcagacgtgaatcagcccagctggttgtggatcagaactatacagttgcggatgccgcgaaagccatgaatgtcgggctttccaccttgacgcggtgggtaaagcaattacgggacgaacgggcaggcaaaacaccgaaagcatcccctatcacgccggaacaaattgagatacgtgagctgaagaaaaaaattcatcgtattgaaatggaaaacgaaatattaaaaaaggctaccgcgctcttgatgtcagactccctgaacaggtctcggtga

SEQ ID NO: 278337 - DNA, 756 bp, Morganella morganii
atgtacaaagcatacagcttaagagtaaattatgatatttttgatgggtatttatcaagtggtgaaaccgtaaaaaaagcaaataattctgctgctcaagatggacttgattcattttttgatggtgatggaagtctagtcgcaactagaataatggatgattggtttccaaaaatgaaagcagatgtctttatctcccactcacataaagatgaagtgcttgcaataaaactagcaggatggctcaaagataaactaggtatttcatcattcattgattcttgtgtttggggctattcccccaaccttttgaaaaagctggataaaaaattttgccttaaagagagtgggcactatgactatgacaaaagaaacatcacaaatggccatgtgaatatgatgttggctacttcacttacaaagatgattgaccaatgtgagtgtattatcttcttgaatactcctaactcaatttcatgcaaaggatgtattgagagtgatggaactgaatcaccttggatttatgcggaaatagaagcaaccagattgcttagaaaaaataccccaaaaagaagaaagacgatggatatagtttctatggaagggcaaattatcgctctggatgaagctatgtcagtaaagtatgacttaaatttagggcatcttcttcttctggatcagagccagatttttaagttgcataattgtggcaagacaggaacgaatgctttagactttctgtatgacagtttttga

SEQ ID NO: 278338 - DNA, 414 bp, Morganella morganii
atggataataaaattgcacaccttggtttcatccaaggtgttatcaacagaatgggtagcaacagttttatgatcaagggttggtgtgttgccttggttgctgcaatctttgcattgtctgctgataaagcaaattcaagctttgcatatctagccctttttcctctggtgattttttggggattagatactttctttcttcgtcaagaaaaaatgtatagaaagctgtacgaagaagtcgcaaatggaaatgtgaaaagtgacaggtacacaatgaatgcttcagtctatagcaaagatattggttgctatttagaagtggtattctctaaaacattgcttccattttatggagtcatgattgtaatgatcatgatttttatgtggaaagttttagatttatttaattactaa

SEQ ID NO: 278339 - DNA, 1143 bp, Morganella morganii
atgcttcctatctatcagcttgctgttataggctccccttcagacgcacaacttcgcgatttagaggacgcggttaaaactgcagtggcaatgtacgggttacgactcggtcaggagattagttgggaaataactcctgatatgtttacaccaaaccagttgcgatcgagtgcggttgtatttttttgcggggtaggagtggatcacccaagtttaccgagcttgctccgcagcggcactcctgtcattccaattgtatccgatctgcggcatgtatctgcggaggttcctgagctgctgcggccgctaaactgtctgacctacgcaaatggtggtgctaagcgtgtctccatagctcttcttgaatgcgctggattgcttccgaaacaacgaagggtcttcgtaagctaccgtcgggatgaggccagggttgccgcgctccagatgttcgatgctctatcagcacgccatttcgacgtattccttgatactcatagtattgtgccagcagaggattttcagaccatgttgtggcatagactctgcgattctgacgtgctgttgatgttagatactcctgactattttaatagtcgttggacatcagctgaatttgggcgagctctcgcgaaaggtatcagtgtccttcgagtcgcttggcctgaaacggagcagtctcgtgggttgggtactgcaagcatcgcagagttagctgaaagcgagttggacagaggaacaggacgtatcgaggattccgctattgaccgaatttgtcttcagcttgaggttgtacgcagcaaaagtcatgctgtaagaattatcaacctagtcagcagtttgcgcattggaattgagtccataggtggtgaagtcattggtataggagtggggagggaaatcaaagttcgtttacctacaggccgaataatagttgtctacccgacggtcggggtcccgacatcatcaaccatgcatgaagcttcaatgaactatccagatgaatccgttgctatactgtatgaccatgtggggctgcatcctcagtggttaaatcatatggattggctcggctcgcatatccaaacagcgaagtgggtgaaagcatgcgaggtcggctggcagtttgcggattgggaggtttaa

SEQ ID NO: 278340 - DNA, 588 bp, Morganella morganii
gtggattctatttttctctcagcaagcgtcccagtcaatggacgaggtgattattatgaaactgccgacccgtttctgattcagtgtgctgtacgtgagtttgtcatcgcggtcgtaagaaaaatgaaaatcgtatgggggggacatcccgcaataacacccatgatctggagtatttgcgaagatctgggcgtcgattacgctcgttccgttgtattgtaccagagccgattttttgaaggccagtatcccgaagaaaatgagcgattcgataatgtcgtttataccgatgcagtgcctgatgatctgggcggcagtctacatcttatgcggcaggaaatgttgtctcgatgtgacttagttggcgcagtctttgtaggaggtatggagggagttccggttgagtatgagctctttaaacaattccatccggatgcaataattctgccagttgctgcccctggaggcgcagcactgagcttggcaagggatcatggccacttagatggaagccgtctggaagacgtagatttcgcatctttattcgatcgttatctaatcaaaccattatgccctcagtccaattga

SEQ ID NO: 278341 - DNA, 663 bp, Morganella morganii
atgctagttgaacctaactctcatctttatgtctatataataacaagagactttggttttgctcctaatccattccatgggtattgtactttagcaacatgtaaacctaaaattagaaagtctgctaaagtaggtgattggatcctaggagttggtggagctaatttaaaatcagtgaagcacaaatgcatcctattaatgaaggttactgaaaaaattagctttaatgattattggcatgatactaggttctctatcaaaaagccagctagaaatggtagccatgtacagatgttgggagataatatttaccatcaagatgaaaataatcaatggattcaagaggattctcatcatagcaatgctaatggctcatttaacatgactaatctagaacgtgatactagttctgaccaagtgttgatttcagatcatttctattatttcggtgataaagcagttgaagtagacttagactcaattgaatatcgcggtggcataggctataaaaaaatccccttagaacactctatacccgcaaatgttcttataaataaaatggaatctaagtttagcggtgacaaaaatttagttatatctgatccataccagttctcggatttctataaacgtgtagatcagggaactggtaaactctattaa

SEQ ID NO: 278342 - DNA, 492 bp, Morganella morganii
atggctaaagaaattaagaaaaatgtttttgttagtcatcatcacaaagatgatgccagtgttgatgggatttcgcggttagctgcagcaaaaggttatcacctccgaaatagttctgtcagaatgaaacctgaaaatcagagtcgtgttgatgaaaaaaaggtcagtgatagaaccatagcacgtttgcttagaatgaaaatgagatgggctggtcaagttatagtagttatcgggaaagagacccacacaagaccttgggtcaattgggaaattcaagccgctcatcagcttggaaagccgatcataggtgtatatgagaatggtttaaaaggggatgtgaaactacccgaaaatattgaaaaatatgcaacttctatcgttgcctggagaggtgacgccattatcaacgcattagaaggtcaaactagctttcaaaagcctgatggtacggagcgggggaaaaatcaaggaggtaatgtcgtatgctag

SEQ ID NO: 278343 - DNA, 1032 bp, Morganella morganii
gtgaacaataaaaacgatcagcttttttgtaatgtcagagaaatgaaaattaaaaccgctaaacccatcttaaatgaagctgttatcagggaatggttttaccatcaacgagagagaacctctatatattacaagaaagagatacttaaccttccaccatattggacagaagatgaaatattaaggagctataaatttgtaaataccaaaagaacatgggataaagaaacaaaatggttattaaaaaatataacaagcaataatgaattgagttacgataataaaatactcaattcatttttatttagagtggtaaataaaagtgatacgttaaatgaaattggcgcaccatttgatttcaaaaaaatgacgaccattgatattaatgaaagaatcagggaaaagattttaaatatatccattaataaaccagactatgtgttttttagtgctgcctatattttaggaggtccgaaatttaattttggaaaatacctagaaaatatagagggcgtaacggaaaatgacatggtaattagaatgataaagtttgtttattataaccaagataaaatagttaatggtgtaaaatcatcacgaaatcagttggaagtttttgaacatttaaaatcattttcagggattgggaaatttctagcatatcaaatttttatagatctgacatatatagacaatttcccatttacagagttgaattttgttatttcaggccctggttgcgaaagaggaattaattggattttttctaatagagatgggatgaatagcgaagagtgtttattctggttcaccattaatcaaaataacatcgcggaaaaatatgatgagaaatggaatatggatgaaatattccattttctgcctaaagaagaaagagtttacactttaatggatatggaaaatagtggtgcatgtgagatagataaaagatgtcgaactaaatttaacaacaaaagacctaaacaaaagtatcattatctaagtaataatatagaattattttataattag

SEQ ID NO: 278344 - DNA, 558 bp, Morganella morganii
atgaaaattgcattcatgggaatatcgggtagtggaaaagatttccttgctaattatctaatatctaactatgaattttttagattatcatttagcgatcaactcaaaaaattggccacttatatttacccttggatggaaaaggattatagcccagaaaaaaaaacgttaccactcaatataactttacctaccggcgactttataaaccattcaccaagggatatatggctgagcttagataatctaaggaaaattgaagagaaaatattcattagaatgctatcagaagagttggaaattttagagaaaactgaagggatgaataagaacataataattactgacataagatcaaatgaagaatttgcatggtgcaagaacaatcagttcacaatagtacatatagaacgggaaaataataattataaaaaatacgagatcgataagtatgttaatgagaacaaaaaaaaatctgactatcattttaacaatagtgtgaacggaattgatagttttaaaaacttcttcgaaaaggcattatttagtgaacaataa

SEQ ID NO: 278345 - DNA, 984 bp, Morganella morganii
atgactatttatgatattagtgtgatcttacgtaaccctagatcaaggcatttaagtttagccggtcgaaaaaataatatattcgccacatttgctgaagctatatgggtgtttgctggcgataaccgaattaacccttatctaactttttttttaccaagagcgccaaaatactcagatgatggtgtcatttggcgagcagcttatggagaaagactatacgctcacgggcaacttgaaaatgtcgttcaacaattcaaaaaagaaggaatatttacaagaagagcagtcattagtttatacatgcctgacagagatacgaatgaaagtctcataaaagtatataacttggaacatagtgctgatataccatgcaataatctaattcatttctttatcactccagataaaaaattaaacattaaaatagcccaaagaagtggagacctaatatttggactaagctatataaatattttcgagtttagtttacttcaggagatagtactttccatattacagagggacgttgatagcaatatcaaacttggatatttacatctatcagtaacaaaccttcatatatatgaggataaaatagagcaagccgaagaaatatacaaaagaaaagaagagcaagtaacgaatttgaaaaataatgatgcaatattatttcccccatcgctacaaaatataaaatcattattttgcgatatagtttcatttcttgaaggaataataacaaaaaatacacatgaaatagacacaataaataaggaaacagaaaaattaaaaaaaatatttattaaacactttgtgaaaactgaaaggaatttactttggggatatgcagaagcagctttatcatatatttttcagaaacggtttaaccaaccaatagtgttaacagctaagttaagcaatgatttcaatctaagcgtaacttcaaatcactttaataattctaataaggagcgtttatga

SEQ ID NO: 278346 - DNA, 573 bp, Morganella morganii
ttggaaaaatatacatcgccgttttgtcgctggcgtgacaaaggaatatgggaagccttactggaaatattggtgactgacccggatttcgaatggttaatgatcgatgctactcatataaaagtgcatccacatgcagcaggagcacggagcggaaatcaggatatgggactcacaaaagggggctcaatacaaagttacacctggccgtggatgcgcatggtatgccgctcagagtacttgttacgtcaggtaccgttgcagattgtactcaggctgggagcccacgggctgagtgcggagtatctgcttgcggacagaggctatgacagcaacgcaatcgtcacgaaagcctgtgagcagggaatgcagatggtaataccaccacgaaagagtcgcaaggaacaacgggagtatgacagaaatatttataaagtcaggcacttggtagaaaatgctttcctgcacctcaaacgctggagaggaattgcaacgcgctatgcaaagaacacatcatcattccttgctgcggtacatatcagatgtattgctttatgggctggcatctcgtga

SEQ ID NO: 278347 - DNA, 162 bp, Morganella morganii
atgacaaaaacagcatcaaccagaaaaacgacccgtaaacagtacacatccgaattccgcaatgaagccctgaaactcgctgaacgcaccggtgtcgctgccgctgcccgtgaactcagcctgcatgaatcccagctctacaactggcgcagtaaacaatag

SEQ ID NO: 278348 - DNA, 855 bp, Morganella morganii
atgaagtatgtcttcatcaaaaaacatcaggctgagttcatcgtcaaagccatgtgctgggtcctgcggattgcccgcagcggctggtatgcctggcgcagacgccgttgtcagataagcccgcgtcaacagttccgactcgtttgtgattatgctattcgcaacgcattcgctgaggcaaaacaacgctatggtgcgccccgtctcgccaaagagctgcccgaatacaatatcaaaaccatcgcagccagcctgcgtcgtcagaggttacgggcaaaagccagcagcagattcactccggtcagctaccgtgagcacggacagccggtgtctgagaacctgctgaagctgaacttcagcgccagcggcccgaatcagaagtgggcaggcgacatcacataccttcgcaccgatgaaggctggctgtatctggcggtggtcatcgacctgtggtcgcgggcagtcattggctggtcaatggcacagcgaatgacggctcagctggcctgtgacgtgctgctgatggcgctgtggcggcgcagatgcccaaaaaatgtcattgttcatactgaccgcggaagccagtactgttcagcggactatcaggcgttgctgaagcggcataaccttcgcggtagcatgagtgcaaagggctgctgttacgataatgcgtgtgcggaaagcttctttcattcactgaaagtcgaatgtattcatggtgaacgctttaccagtcgggaaataatgcggacgacggtatttaattatatcgagtgcggttacaatcggtggcgtcgtcacagtgcctgtggcggtctcagcccggaacaatttgaaaaccagaacctcgcttag

SEQ ID NO: 278349 - DNA, 216 bp, Morganella morganii
atgaaagaaacagactggcacagggctgatatcgtagcggctctgcacaaacaagggctttcattgtctcagttatcacttgcggcaggtctgtctgcatcgactctgcgaaatgcgttgagggccccttatcctcgtgctgagaggattattgcacaggcaattggtatacctgccagtgaaatatggccttcccgttacccaaaactgaaatag

SEQ ID NO: 278350 - DNA, 1161 bp, Morganella morganii
atgaaaaaaataatcataacagcaggttttattacattaaccggttgtggtgacagtgcggatattactctcgtcaaagatatggtgacgtatactgaccggactatcactgtgggtaatgcgtttgatcatcgggaaatgtgtcagcaaacaacctggagtgaagaaaaagataaacgaaaccggaatattgtacgctatctctgtaagattaatcctgcggatgctaataccattattacggataatatcaatcatgtaagagataattcacttgaatacattgaaaaatcaggtcatgtcttctcagaaaaaaataagcaagttcagttgtcaatattttatttaaaaaatgctaaagatgccttaaaagagctgtcattgacctctttgcctaaagattatgcagtgatgaaaactgaccttaagaattatttggaaaagacttatcaaacagaccgtgttaaatattttgagtttaatgatggattcaatataaaaggaaagcctcttttaataattaatcaacttgattcgaacaaagacgatattatttatgattattatcgcatcgacaatatagaaaaagatccagagattatcagaagaatagaaggtatatatgagttacaggaaagagtaattaaccttttccatggtaataattctgacattgataacctgtccgttgagggtgaggagtgtgaaaatagtgctactgatatatatggagagtttatttttccctgctcatttaaatatcaggttagacattcatttgatactattatgtttcagcagaagccatatacagaagttgaagaaaatatccaaagtgctttaactgagtacgataatatcatgggtagtttagctctaaaattaactgcttatgaaaatattaaaagtgatattaatctacgattttcagcattagttaatgaatatgtcataacggaatttgaacaagtaatggatttttcagtaattaaagggcaacctccggaaatggcgaggtgctacttcagaataaagcttgtcaatggagatactgctgagattgaaggtgaaaactgtttcggtatggcctacaaaaatacctttgatcaattatatgtcagaatgatacagaatttttacacctccgacataaaagattaa

SEQ ID NO: 278351 - DNA, 156 bp, Morganella morganii
atgccatttattctgctttggattgggcttgcattgttgctgggttttatcgcttcaggtagtggacgttcattctgggcttggtttgttctgggtgttgttattgatcctatactggctgggttactgtatttattaatagcccgggatgcctga

SEQ ID NO: 278352 - DNA, 285 bp, Morganella morganii
atggaaaacgacattcactgccccgtatgtagttcaactcagattcgtgagcgccatatcggcaaaaaaggcggtgcagttgctggtggcatttcaggcgcgttaggcggagcggctataggttcagctatcccggtagtaggaacgattgcaggtgccgctgctggtgcattattcgggcagtttatcacgggtgctgcagcgggcgctgtgtcaggttcagcactggatggaattatatttgaccgctatgaatgcatgaattgcggatatacttttgattaa

SEQ ID NO: 278353 - DNA, 1263 bp, Morganella morganii
atggcactgaccgatgcaaaaatacgggcagctaaagcagaagaaaaatcttacaaactcaccgatggagctgggctccatctgcttatccacactaacggctcacgctactggcgactccgttaccgacatcagggaaaagagaaaactctcgcgttaggaatctacccaatagtctcgttatctgaggctcgtaataaacgtgatgaggcccgaaagttaattgctgtcggtattgatccgacagaaaagaaacggacggaaaaagccgcagcaagtactgaactatcctttgaaacaatgacccgaaggtggctcaataccaacagaaaatggtctgactcccatcgtctcaaagttatccgcagttttgaaacccacatatttcctcttatcggacagcgtattatcaactcattgaccactcccgacttgttgatgccagtcagacaagcagaaaatcaggagatctttgaaacggcaaaccgcctgcaacagcgtattgcctccgtcatgcgttatgccgttcagtctggaattatcagttataaccccgcgctcgatacatctggtgcaattactacggtaaaagttcgtcatcgccctgcactggcattatcccgcatatcagagctggttaaacggattgataattatagtggatacccaatgacacaagtggcggtgatgcttaacctgcttgtatttacccgctctagtgaactgaggtatgcacgatggtccgaaattgattttaagggctcactctggacaatacctgcggaacgtataccgattcccaacgtgagattttcccatcggggtgcaaaaatgcgtacacctcacctagttccgcttagtcatcaggcgattactttactcagaattctgtatgactggaccggagaacatgaactgatattaactggcgcacataaccctcacattcccctcagtgagaataccgtcaataaagccttacgactaatgggatatgacaccaaaacagatatctgtggtcacggcttccgttctatggcctgcagctcgctaatcgaatcaggattatggtctaaagatgcggtagaacggcaaatgagtcatcaggaacgtaacgatgtccgggcagcttatattcataaagctgaacaccttgatgaacggcgactgatggttcaatggtgggctgactttatcgatgccaacaggcaacaaactatttctccctttgattatgccaaggtgaataatcccttcaggtaa

SEQ ID NO: 278354 - DNA, 993 bp, Morganella morganii
atgaataatccgcccgcctttcatctgcgccgcctgtgcctctgttttctgttggtgatcatgatattaactgccatgaataccggcggactgccggtttctgtcagtgcattcctgcggggtgaagtaaccccgcaactctggcagatctggttatctgtccgtctgccgcggattgttctggcagttctggtgggcatggcactggccaccgccggagtattattacagggattattccgcaacccgctggcagaccccggtttgctcgggatcagcagcggcgcagccgttgcggtggcactggggattgtctttatcgcgccttatctgaatggtgcggtcacactgtatctgcatattattactgccttcagcggtgcactttgtatcagcggactgatttttctgctcaaccgccgccgtcagcctttgctgcgtctgttactgtgcggtattgccgttaacgcaatcagtatgtcctttgtcggcgtgctcaattatctgagtgatgataaagaattacgtcagttttcactgtggatgatgggcagcaccgggcacatcagctggactttgcttctgcctgctatcgtactgacactccctgtgttttatgccgcattcagactggcacgtccgctggatatgattcagctgggggaagaagaagcgcattatgccggagtgaatgtccgccggacacaacagtgtgtcctgctgatcagtgccctgctcaccgggattgccgtggcactgagcgggattatcggttttatcggcctggttatcccgcacctgatgcgtatgattttcggctggcaccaccggcttctgctggtgacatcagcccttgccggtgcacttctgttactgctctccgatacactcgcccgcacgctggtggttccggcagaaatcccggtcggattactgaccgggctgcttggcgcaccctattttctctggctgattttctctgtgaaggaatga

SEQ ID NO: 278355 - DNA, 1068 bp, Morganella morganii
atgcacagtgaaacactctcccgttaccttgccctgaaagaacagggacatcttatccacgcccgtgatatcgccgctgagatgggcatatccgaggcagaactggcacactgccggaccggttatgatgcctgccgcctcaccccggatatccccgccattttccggatgctgggcaccgccggggagctgaaaggcatcacccgcaatgaccacgcggtacatgaacataccggcacctatgataatgctgaattcggggaacacgcctgcctgctgctgaacccgtacgggctggatttacgctttttcctgtctcagtggcagacagtatttgccttcgcggaaaatactccgcgcggtctgcgccacagccttcagttttttgaccgccacggagatgccgtccacaaaatttataccaccgctgataccgatatgggggtctggcatcacctgacagcacagttcgccgcgtatgataacccgcaggttgttccggaaccggccgtcatcccggcctgcacatcactgacaccggagcagctggctgaatttacccgtcactggcagcaaatgacggatgttcaccaattttttgttctgttaaaaatatttaatatcagccgcttgcaggcattccgttgtgtggataacaccctggcacagcgggtggataacagcgcgttatcacgcctgctcactcagtgtgcggaagaacagaatgacattatgatctttgtcgccaaccggggctgtgtacagatttttaccggcgccattggccgggttaaaccttatatcagcccccgcgacggacagcactggatcaatattttcaatccgtcgttcactctccatctgatcgaatcggctgttgcggaatcctggattacccgcaaacccaccaaagacggtattgtcaccagcctggaattatttgataaaaacggtcaggctatcgcccagctgttcggacagcgcaccgagggtgaaccggaacaaacgatctggcgcagtcagattaatgccctgctgacagactgcagcggtgaggcggcggcatga

SEQ ID NO: 278356 - DNA, 189 bp, Morganella morganii
atgactgaaaataatcagaattctgtgatatccgtacttaccggatataaaaatacagcaacagataaaatcacggttatcagcagtgaagcactcctggggccgcagcagcggattattatccgccatcagaatgaggaatatcacctgcgccggaccaaaaacggaaaacttattctgaccaaataa

SEQ ID NO: 278357 - DNA, 558 bp, Morganella morganii
atgaacctgagtgctgcagttttccgcctcaaacggccgtttgcttataccgacagtgaccagatctttaaaaaacagggcgaacaggtgaatgacgggctggaactgaccgccaccggcaatatctggcaggggctgaatatctacagcggtgtcacgttcctgaaagcagatctgacggatacgggtaataaccaaactgaggataaacgggttgtcggggtgccgaaagtacaggcaaacctgctgatggaatacagcctgccatctgttccgcagtggatatacagtgccaatatccattacaccggcaaacgggcggcaaatgataccaacaccagctgggcggacagctataccacactggatctcggtgcccgctataccactcagatagaaaatgtgccggtcacactgcggatctctgcggataatgttaccaacgagcattactgggcgtctattttccccggcaacagtaacggtaaaaatggcggcgccaatgcctttaccggtgcaggccgtgaattccgggccaccgtatcatttgatttttaa

SEQ ID NO: 278358 - DNA, 231 bp, Morganella morganii
atgcagcgcggctttgcaatgtcagccgccacgtcaaacctgttccagccgtataatatcggtaaatttaacctcagtgcagctgtcggcggatataactccgaaaatgcggttgctgtcggcagcggctaccgtttcaatgaatatgtggcagttaaagccagcctggcaacctcaacatcaaacggcggtgatgtcatgtatggtgccggtatgaacctggagtggtaa

SEQ ID NO: 278359 - DNA, 345 bp, Morganella morganii
atgtctatggtagataaacaaaatacctttaccggtatggtggctaagttaattgtctttgctcagagcaaaggttataagctgacgtttggtgaggcatacagaacacctgagcaggcgaagctgaatgccaagacaggggcagggatcagtaacagtctgcacacacagcgtctggctgtggatttcaacctgttcgacgccagcgggaagtggttaacggccaccagtgacttcactgaactcggtgaatattgggaatcgctgggcggtagctggggcggccggtttaaaacacgcccggacggcaatcatttcagccttgagcacaacggggttcgttaa

SEQ ID NO: 278360 - DNA, 252 bp, Morganella morganii
atgaaacagaaatatgtgtatcaatcgcctgaaaactatgcagaaaaagtaaatgacaatgacggaatcaagcagctttccatcacatcgatgctcgaggagttactgcgggagatggatcaggatggtcatgatgtatcagggccgatgacggaactggtggcgctgaaaaactatgtaaactattctgaaaaacaactacagacagtaaaaactcatttggaatttgtattatccgaactaaataaataa

SEQ ID NO: 278361 - DNA, 264 bp, Morganella morganii
atgggcatagttaattggctccggagtaccggcgacgtcgttactcctgcatctaatcctcgggctggtgagttatgtgtcaatcacggaagccataatactcctacagcctctatgcgtactgttcacggaaaaagcgcagctattcaggttagcaagcgtggcggagcttatatatcctcaaaagagctcgccgaacttcccgaggttcaaaagatgcaacagcaagcatggctaatcgtcaaaagaacaagaaaccgttga

SEQ ID NO: 278362 - DNA, 858 bp, Morganella morganii
ttgttagctctgcttttgatccctatcttggttagcggttacatcatggtaattgctaacccatatcattactttaggttgcacaggcatgacggccagttgctttatctcaaggtagcaacatacggaacgttttgcctgattgcatccacaatcatagccggattaataaagtggaaatttcccgactttcaccctgtaaaagttctggttactcagtttaaagttacaggtaatgaagatagtgacaggatctacatctggctgactttgctgtctttcacttccatagtgttcgccctgttttatgtttttaccacatggttaaaaaacatatataacggatgcctctataaaagaaagcatggcactttatatgcgaaaatccgccaggctaaaaatgctcgtatcctgaaacagacattatcatcaggaaccatgaacgcccttctttttgatgcattggaatcagagccaaagcgatctgttttaattaatttatcttccaagaaagtttatgttggcctcgtaaacgggttatctgatcccaatgaaaaagaaggacccaataaatttatatctattttcccgataatgtctggttatcgtaataaagatactctgctggtagagtttacgaatgtctatccaagcactaaaactgttcgttcagcccctacagtcagaaccaaaaagaccgtaaccaacaaactggatataatcctttcaactgatgagattacccatatttcttggtttgattttgagttgttcgagactataaatgactcaattaatgggtctggtcccaagcacaaaaagaattccaaagtaagatcatccttcagattaagataa

SEQ ID NO: 278363 - DNA, 759 bp, Morganella morganii
atggtaaacttaagcatctcagcatcaaatctcccgtcaatcgtacacaacaatgttccggttattactactgatctactcgccgatgtgtatgaaacagataaaatcagaatccaacaaaactatacccgaaacacaaatagattcactgaaggaaagcatttctttaaattaactggttcaaatttaaagagttttaaagacagactatctttaagcgagtcagttaataactgcaaagcaggcactcgatacggtatcatcggaaagaacgccagaagcattatcctctggaccgaacgcggcgctgcccgtcatgccaaaatgctggacaccgatcgcgcctgggacgtgtttgagattctggaagacaactacttcaccaaataccgcggcaccggtcggatcaataaatcattaccccgcaatgcctctaccgaggaactgctggcgctggtggatcagttgcaacgtaccattcacgaaggcgagttcatccctgccgggcaggtagcgcaggaatacagcttcccgaaaacgaagaagtcacgttcgcagatcctcaatgactttctacggtcaccggaagatgacacgctccaccagcttctggcttatctgaaacgggatggccacaacgtggaagaagccgagcgtgtcctgatgtggctccgcgattatatgaaggatatgggtaaaaccatcaacactatcattacccacgcccagtacatcgaacacgctgtcagtaagttataa

SEQ ID NO: 278364 - DNA, 309 bp, Morganella morganii
atgaaaaaaactattgggttaatagggctgctattctgcgttaacgcctctgcatatgtcatcggtggttcaaatatctatggtaactacccgagttttactgattatccgccatctgcaccttacacagatgatcagtatgcgatgagtagatataaggatgaagtagaaaggtatgttgaggcagcaaagcaatatactgaaaatgctgatagcgacattcagaggataagggaacaaaaagcagaagcaatttcaaaagctaacgatgcggttgaagaatataatagaaaaataaggggttattga

SEQ ID NO: 278365 - DNA, 159 bp, Morganella morganii
atgacccagattatttttattgtggtgctatcagcgatgttcctgatttattcttatttttttgataaaaaaggtttcgaatcagagcctcaacttcgagctttcgcatggtttgggtttgttgtttttggggttgtattgattggtagggttatttag

SEQ ID NO: 278366 - DNA, 2469 bp, Morganella morganii
atgagagccgaatgcatacaggcagtgcaaaatgcctctaaccgagttttaacagcagcagaaattcaaaatattgagaaccgcatcatcaggaatatgaaaaaccttgccaggaatgatccgtcatcatggcggttgctgagtgagtctgagcgcttacagcgtgctgggcaaacagcagcagcagaattattgcgtgaggcaaaccttaaaaaacggagggttgcgctgactatagcggccaggcaaaaactggaaaaccatattaatagttttaacggaagtaaactggaagcgttaaacagaacaattgcgttcagtgcggacggcaaaagtaattttatgtccgtggaaacgagagccaaagcaacaattaactacgccctcagccagttgcatgaaacttttgaagcggtagatccgaaattcttccagttgtttgaagatcaccaaggggttagggatctgatatttgagatgaaaggccaggacaccggcaatgctagagccaaaaaaggcgcggcagcctggcatgaggttaccgctatgctgcggaacagctttaatcgcgctggtggagatattggtcacttggaagattgggggttgccgcagagccattctatgcaacgggtaggcaaggtgtccaaagataagtgggtatctgatgtaataggtaagttggatcgtaataaatatattaaagaagatggttctttgatgaatgatgcggagctgtcggtatttttaggttctgcttatgaaacaatcgctaccggtggcctgaataaaattgctgagaaaccgattggtgtatcaggtatgcgcgctaatcgtggcaacgcatcacgacagattcattttaagaatgcggagtcttaccttgaataccagcaattatatggtgagaaagcgctgtgggatatcatggtcgggcatattgaaggtctcggaaaagatatcgggctgattgaaacttacgggccgaacccggatcacgtattccggagtttactggatgaagtgacggaggctgaggtaagggggagtccatcaaaagcgggaaaaataaaacgcctgagagatggcactgaaaacttatataactttatatcaggaaaaacagcgccagtggccaatccgcatattgcaaaatttttcgatgatatgcgaaacgtattaattgcgagcaggcttggatcagcattgctgtcctcgttttctgatttgggcaccatgtatctgacggcgaaggtgaataacctgccatctgcacagttactgaaaaaccaactggcggcgcttaatccggccaacaaagaagaattacgtcttgcccgtcgggctggtttatcaatggaaacgctgcttggaagtattaaccggtgggctaatgataatatggggccgtcaaaagcacggtgggctgcaaatgcggtaatgagagccagcgggctaagcgcctggtctgatgcgcataaaagagcttttggtgtgaccatgatggggagtatgggcagcctagtgaagcgcagtgaaagcgtcggtgacctgaccggtcatgatctgaaaatcatgaagagtaagggcgtgacagatgcggattggtctgtctggcgactggccaagcaggaagactgggggaatggtaacgacacaatgctgacgccggaaagtattatgcatattcctgattcaaccctggttgagaatggcatcccggtgaaggcaaaatttgaggctgccagaaaattactcggagcagtaacggaagaagtggatatggcagtaatatcgccgggtgcccgtgaaagaatgatgatcggagcagggttgcagcgtggtgatcttaaaggtgagttggtgcggagtgtttttctgtttaaatcattccctatttcggttgttatgcgccactgggcgcgggctatgggtatggaatctgctggtggcagggttgcgtatttgggggcgttcattgctggtactacagtgttaggggcgctttctcagcagattaacgatgtggcatcaggacgaaatccacgggatatggcggatgaaaattggcataaattctggctgtcagcactactaaaaggtggtgggctggggttatatggtgatttcctgttatcagatcacaccagatatggctctggtgctctggcgtcactgctcggaccggtggccggggttgtcgatgatgcaatcaaaattgcacaaggtgtaccattaaacgcggtggagggtaagccggaacagacgggtggtgaccttgtgaagttcgtcaaaggattaacgccaggtggtaatatctggtacacaaaagctgtgctggatcatatggtgttcaatcagttgcaggaatatttttctcctgggtatctgcgcagaatggagaagcgttccaaaaaagaatttaatcaaacgtactggtggcgtccgcaagatatgatgcctaggtaa

SEQ ID NO: 278367 - DNA, 1788 bp, Morganella morganii
atgagttacttcggattaaatcaggctgcgcagaatcaggcgttagatgaggcgtcgagaagcaaacagaatgatgatagtgctggttttttcgatggtgcttttactgctccgtttgcaggcatgtatacgggcttggtggccaaaccggatcaggcactctggggattactggatgcaactgtgtccccggtagccagagaactgaatgaacagtttgatataaatgatacatcggagcagttcattaaaaaccagcgcaagctggcagagcagcagatccgtcaattgacgcctgatcgcggtaccaccggaaccgctggacaggtgctattcagtctattcgatataggtagtcaggctgccgccgcctcatttactggcggagcacttggtagcgcccttaccgtgggtggtttgcagggattttctgattatgaaaaatcagttgccgatggtgtttctcctggtgtcgcctcggaaaaagcttttggcgaaggggttttcgcagcgggtggggtgttcatccccatgtcacttggtttgcgtggcggcggcgtcatggccgaaagtgtcggaaatcagttgctggcgaaaggtggatctctcgggaagccaatgtcagcagtagccaaggccaccccggatgtgttgtacgcatcaggctctaacgtcgttatgggtatggctcagcgtggatattctgcaaaggttctcagtgatgccggatataaagaattagcggcacagtatgatgtgtttgataagcaatcaatggctattgatgctgtgcttggtgttgcgttcggcgggatcggaagatatataaacagtcgtggcgaaagtataccactaccggaatatagcggccctcaaattgatgctgcattaacagcaaaccagcatatgcacatggatttagataccgcccccgggcttcctgttaatgctatgtcactcgacgggcatgtgcaggcaatgcgaaaagcaatgagtgatttggcgatgggcgaccgggtagacattggcagcattcttgatgatgcccagtttatgcctgtaagtaaaagaactctgttagacacctcgatccgcgaagctgccggggttattgatgaaggttcatcgctttccatggtcaaagatatccaattaaaagaactttctgagcagctaattagccgtggtgagcgtgaaagtttaatgacttcaattcacgatttaaattatcgcattgatcaaaaatccagtggaatatctgaaataagcaatcaggagaccaccggtagtggacggagattatcccgtaacagggcggcaaaacaaagtgaattacgcaggctcaataatgaactgacttcactcaaaaacgaactgaaaattaagcagcaactcgctgatgataatcttcccggtgggcgtttttatgaggcgaaggcggaattatccagacgcaaattagcggcggagcaatcggaagaagcgctgatgaattatttttctactccaaagccccgcgacagagcacaaattacctctgatgaaataatgcaggcagagactttggtcagaggtgatcgctttgaagatattgattctgaggtgcttaatgctgaaatcgcgattaaaaataaccctgatttagagattgattttattgatgaggacggtaattcagcgaaagttaaagcgtctgaattgtattttgatgccgttaagcaggctgacgatgctcagaatgatgctggtttatttgatgttgcagttaactgctttcttgggagataa

SEQ ID NO: 278368 - DNA, 2505 bp, Morganella morganii
atgccgacagtaccaacctataacgaaagacaggtcagcagcagcccgttaccgtcaaacggattcagcgcgcagtcatcgccggaacactttggtgtcgggctggcacaggccggtgatcagtatatcaatgcttttgctgaggcaaagcagcgtgccaatgtggcgttgtcacaggatgcactcctgcaggtgcaggaatatgcagatgatttatttaacaatccaaacaccgggctgtataccaagcagggtaaaaatgccgttggtcagtcagatgaaataatggcgagcattagcgctaaagggcaggagcttttcatgcaactgccagagggatcgcgcgaagatgttgttaaacagttcaatgttgtgaagcgccagtatgcgaatcaggcgaaatcttatgaactgaaagaaattcagtcgtttgaaacgagcagaaataacggtgctgtcgccgggtatgcgaaaagcgcctctgataatttcaataatccgcaggcatttatcagttttatggctcttggccgccataacattattgagtttaaccgctcccgtggtgtgagcgaggaagaaatatcggcaaaaatcgctgagtttgataaccaggtggcatggactgcggcacaaaatgcaatggctacagatgccatgggaaccattggtgctattggtgagccgtcagaccttggtggttcgatgcgtgttaccggcgggccgtcaggtgatcgtggttcacgtaataataaccctggcaatattcgcatctcagataataactgggaaggccagatcggtgatgatggcgagtttgtccggtttgccagcccggagcatggcgtccgtgcgctggggaaaaaccttatcacctatcgtaataagggcgttgttactataaatcagatcatcagccgctgggcacccaagaaagacggtaacgatacagagggctacattaaatttgtctctggaaaaatgggtgttgatccgaatgtgccgattgatgttactgatattaacaccctgaaaagtatcactaccgcgattatgcagcaggaaggtaatcacagcattagcggcgaacagattgacgccggattgcaggctgctctcgggttgacaagactgccggaaccggatccgtcacagtatcagtcgcgggggcaaaccggaaaagcagttaatgctggtggtaatgcatggtggccaatgttgacgccagttcagcagtatcagatcagaaagcagggggaggcggctcagaacaagcagcgccaggaatttaaaaatattttagatgacaggcttaaggacgcagaggcacaggccgtaagaggtcttgtttacgccaatccaccaacactcaatgagctgatgtatgcgaatggtgaatatgagggtgggaaaaaatacgagcagttgcagaaaactctggctatgggcgaagacatagccactgttcagtatttatcacctggcgcacaaaaagcgcttctggagtcgaaaaaaccaacaggtgattatgatgcgtcgaataactggaagcgctatgacacgctggtgagggcggttgatactgttaataatgcgcgaaaagcagacccgatacaattcagcattgatcgggaaaagcttaatcagattgatttctctaacgctcagagttttacaaactctctgaaagaaaggtctgccagcgttactgacatttctaatagttatcagacgccgctgactgttttttccgctcaggaagaaatggttttatctcagttgatggagaaagcgccggccagtcaaaaaattgaatatttggatgctatcaggcagggactaaaaaacaataatagctacactgccgcattaagacagattagtaaatcggatacatctttggcggttgccggaatcataatggataaaccttccagcgttacagctcagagcaacttaatcagtagtgacgtaagcgtatctcctcaggatgcagcacaactaatcgtgcaaggtaatatggcaataaagtctggtaaagacttcgttatgccaaaagacgccgaactcagagagagttttgcagaaaaagttggagacactttttctggtgacatatctggtgccagcagtgcattttctgttgcaaaagatgcttatgctgggcttatgtctaaaaaaggtaatttatcaggtgagtatgacgatgacacctggactcaggctataaatattgccactggaggcatacacgactacaacgggatgggtaatatcatgctcccctgggggatggatatagatgactttgatgcaagagttaacagatcttgggggaaaatagcgccagaggtcggcaggcaggcgaatgaaaaaataggactgaaaagtttcggtgatagccaatacctgataaagcaaggaagtggatacatattaaataaagatggttcaccagtggtcatcgatcttactcaagagcaaatcagggatataccattatga

SEQ ID NO: 278369 - DNA, 339 bp, Morganella morganii
atgtcacgatataaagtgttgaagaaatcctttatcaatggccgcctgctttatcccggtgaagaagttgagttcacaggtatggccggaagtaacctgctgctgattgaaaccggtgagcgtgtagcggcggatgaaggtatcgatgccggtaacgataatcacgatggtgataatggcggaagtgatggtggtgccggttcttccggtgatgacgctgaattaaccgccctgcaggatcagtaccagcagttgtttggtaagaagccacatcacaattccggtgccgaaaaactccgcgcggatatcgacgcgaaacgtaaagagcttggggtttaa

SEQ ID NO: 278370 - DNA, 579 bp, Morganella morganii
atggcttttgattggatagcaggaacggctctggtagttggtattggttcattggctttgacttggcaatcgacaagggcggctaaaaggtcaattgacacatcgattgaaatttatgaaaaacagaaacgggacgaagaagaaagaagaaaaaaaataataactggatataagaatcttatagctaaggaaatttatgataatatccaatggtatgagcaaggtataaagttgtttaatattattaagagtggaaaatctgtaagtgtagctaatacatttggtaagacacatattgaatttaatcatgatggtaaaaaggacggaatcattccttttaaatttcatcttaaatatacagattcacttcttagtgaaattgcaacgttggatacagagctatttctagaaatattatcattaaaaaataaattaatttattgcaatgaaatgctggattgtatttatttacttttaaagaataataaaaatgctacaaattttattatgcaagaatataattcgtttaaagagttaggcgaaataatgaataaaattaaatctatgtgctccatctaa

SEQ ID NO: 278371 - DNA, 540 bp, Morganella morganii
atggaaattaagcaacttcagcagcagattcatcagcaaaacgtagatgccggttggtgggattcttacagaagtgacgccgctttaattaacttaatgcactctgagataagtgaagccctggaaggcttacgaaaagggttgatggacaatcatttgcctcaatacgaaatggctttggttgaattggctgattgtgtaattcgctgccttgactggttgggttacaaaaaactttcatccgctgaatataaatttgatggcattgagttgcatcgcttatgtgaattacctgaggtcgaaatggatattcaggaagcgttagcaaccattcacgccaagttatcagcagcatattctcgtaaagaagagagagcatattttatctgtatggctatgcgattatgtttgttaacaatcgaacaattctatccgaactattcccccgaagtaatcgtgcttgaaaaactcgaatacaacaaaaaccgcgctgaccacaagcgtgaaaacagagccaaggcgcacggaaagcaattttag

SEQ ID NO: 278372 - DNA, 165 bp, Morganella morganii
atgagtcctgatgatttcattagaaaaaatgtcatttccaagctgaaagagtgggggtttcagggggggcattggactttgccgctgatgaggcaattgactattaccgccggtgttcgcaggcaacacgccgtggcgggatgtttgatgactgtttccgcatag

SEQ ID NO: 278373 - DNA, 396 bp, Morganella morganii
atgcaggttaacgagttcgatatcacgccggtaccaaagccgcgcatgaccaaaagcgataaatggaaaaagcgccctgaaacagcacgctactgggcgtttaaagatgaagtcagattacgcggattaacgcttcctgagtgcggttatcacgtcatttttactgtacccatgcctaaatcgtggagtaagaaaaaacgagccgctatgaatgggcagccgcaccagcagagaccggataaggataactttgaaaaggcgttgttagatgcggtatttggtgaggattgtcgagtatgggacggcagggcatcaaagctttggggtgagtccgggaagataacggtaaggttaccggaaaaatcgacaattcatgaacttattaccatcaggtaa

SEQ ID NO: 278374 - DNA, 240 bp, Morganella morganii
atgatcccattaaaaaaacctatcgacttcaaagaagtgaagcgcatcgtcggattatcccgaaccaccatataccacctggaaaaagcaggtgattttccaaagagaagttacttctcgaaacgagcggtccgctgggaagaaagcgaagtccggcagtgggtcgctaatcgcatgcgtaaccgggttaaaccggataatgccatcgatgcgaatcgacttgttcgccaaaatcattaa

SEQ ID NO: 278375 - DNA, 150 bp, Morganella morganii
atgattattgatatcaacagtgtcgtcctgtcactgcacggaatcgcactctggtgcgccatcagcggcgttatctgcgtgattgatggtgatacccggcagctgattgtatccccttccgataacccaccgtttcaggatgaagcgtaa

SEQ ID NO: 278376 - DNA, 465 bp, Morganella morganii
atgaaagacagaatcaagttcagtgacgaaatgttggccgctgttattgctggcaggaagacgcagacgcggcgactgattgataaagaaacgcttcgcctgttcgatgttgcttcagaagttggggaatgctttcctcttggttataacgatgatgagccttttgaaagatatcatattgagttttccccatatggtgcaatcggcgacaccatcaactttgcagacaaagatggcgatattaaaggtgaaattgagattgtcgatgtctggctgcagcaggtgcaggaaatatcgcaggaagatgcacaggcagaaggatttgagggctacgacgatgatgtttcaggcgggatgtctccttattctgaattcagtcaggcatgggttgatatttacggaaaagacagttggcgagaaaacccgtgggtgtgggttatcgaatttaagcagattcaggggtga

SEQ ID NO: 278377 - DNA, 378 bp, Morganella morganii
atggggtgctcattagttgaattcattatggatattagtaatgaatattggatagggaagttggcgccacagttaaaccgatcgcttgatagtgataatgatgcaaatactgaatttgcaaaaaataaagtaattgagctgagaaaagaagatgaaatagataaattccaagcaagagattattggaactttattgaatcatccgatgatgtcaagcgtgattgctgcgattgttacatgggtagcgagttgctcaatttatttggcgatgacgcatactatgagagatggccgattgtcgacaaccctgagtatttacgcatggaatccagattaaacgcagtgcgtgaagcaattaagcagattaaggaggggtga

SEQ ID NO: 278378 - DNA, 291 bp, Morganella morganii
atggatatatcacgacagcagtttgaggaatttattaaattccacgcagacccagcagagttggaacagaaactaaaaaaagcaaataacggattaaattacgctgaccgtgatgtcgatttaatgtggattaactggaaggcatcacgtgaaagcttaactattgaattgcctttatctcttcacgtaagagcctacgattattacacagacgggtataacagtggcgtagattgctgcgaagttatattggaatctgcgggaataaaagtaataagaaccagccaataa

SEQ ID NO: 278379 - DNA, 156 bp, Morganella morganii
atgacaatcggatttgtattaccactggtaatgcgcggctctgctgtgcctgttaccgatgatatttatacgctcgaagaatgtgagagccgcgcagtgcagatgatgcaggtgcggaatgttgaattagtgtgtgcggaggtggtgaggccatga

SEQ ID NO: 278380 - DNA, 273 bp, Morganella morganii
atgaaattagagcaactaaataagattgagttcaatgtcagttttttaaccaataagtgctatatcggaacagctaagcctgctggtaaagacatgccaaaggcacggattatcacaggagataaaagagatgtcactgatgatgttttatccgctgtcgtcatgattatcagtaataacaataaagatggcaaaagaacgatattaaccactgataacggaatgaaagtcggctttgatatttatgaggttaatgatgaacaaatatcgtga

SEQ ID NO: 278381 - DNA, 336 bp, Morganella morganii
atgaacaaatatcgtgacaaatcagactttgagattaataaggctgtattcgtagcagcaaaaattaatcatgatgataccgacctgagtggtagcaaagtgttttatggcaatggcgctaaatggattgagttcgacccatgcaataacccagctgacgcattccctctaattatcgatgtgaaattatcaattcatcctgatttttataacaactgtgagtcatggattgtcagaactgtgcatattcctcctgtaaaagataaaagtctgacaagggctatttgcattgcttatttaatgatgaaggatgcggagaatgaaaccaatacttga

SEQ ID NO: 278382 - DNA, 486 bp, Morganella morganii
atgaaaccaatacttgatatgtgctgtggtagccggatgtttatgcacgacaagcaagacccgcgagttctgtttatggatatcagaagcgaagaacatattttatgtgatggacgtattttaaaaataacgccggatattatcgctgattttaaaaacctgccgtttccggatgaaacattctaccaggtgctgcttgatccgccccacctcgtccgggttggtaaaaatagctggatgtttaaaaaatacggggcactggataaacattcatggcgcactgaccttgccgccggcttcagcgaagcattcagggtgctgcggccacacggagcgctaatgtttaaatgtaatgaaactcagatacctaccagggaaatactggctctcaccgacgaaaaaccaactgtagttcagagggtcgggaaaaacgacaaaactcactggatgacattttataaaggtgccgaggatgaaaaagtatga

SEQ ID NO: 278383 - DNA, 330 bp, Morganella morganii; identical to SEQ ID NO: 276965

SEQ ID NO: 278384 - DNA, 3561 bp, Morganella morganii
atggaaagtgataaacataatttacttttttcacggatagttgagcaggcacttccgggattttcagataaattatcagcaagaaaaaatgaaaaatcggttattacccgtctgaagcagggcaaaaaagggctgatggctgactatcccggactcggatatccggatgctgaaatattgcataatcgtctggcagttgcagttcatacagtggcccgtaaacaacgggaattacgtcagatcagtgagtttcgttcaccgcgcgaagaaaaaggactgaaagcattaacccggcaattgacttatgaagatcaattctcgccaaactgggcgggaaatactttaccggatgcgatagattcaggccacggcgctgttgcttatctttatgacctgcttacatttgtggaaagaatgattgaaccgaagggagacagtgataaagcgattacactcaaacagcgcagaccggatatttataatattttactgaatgaagagaatgtaaacggaaacatttccaaaattcagattattaatcaaattatcagtactgcaatcagtcagcaggaaaaaaatgaagatcctgagaaactgatgctgaatgtgcgctatccttaccggtttccgtttgaaaactatctgaatcagatttatgccgtattggatgagtatgatttatcaataggtgatattaaacggcgctgtgatcctcaggcgccttatttcacacagccgggtttgcacgggacgaattcagattctgcactctggctggacagccatttaggaccgggtctgcgtgaaattttgctggcggtaccacaagtaaaaaatagccaggaagaagataatacgccatattttaaacaaaactttggtgtcgaacagtttacggacttgctgaacagcacggttttttgtcagcaattaaaactggagcgaagtgatctggagctattgttttcctgcggggaatatgtaccgcatttatctcaaaatgttgatcctaaaacgattacaggctatgaaactgagcagggaagagaggtttctcccgctgtatatggatcagtttttattaataataatatatctccggctatcaaaatcgacagtaatatcagtgataatcatactttcgaaaatatggatgagagccggtgcgaacgtattgaacgttttttacgtctttcccgtgctctggatttaccgtataacgagctggatacattactgacttctgttatacgggctgaacataatcaggtagacaaagaccttactattaccggaaataccttgcgggcaatcggtttatttgtgagccttaacagaaaactaaaatgtactgtcagccagttttctgttctgtatgatggtatttcaatttacagtcaggggaaaaacatcagtgattttgaccggttgtttaataatgatgatcgctttagttaccgttttattattgatgataaaaagatggaagagcgagatattaaccgcatatgcagtgtatttggtattaactatgataccttttcctatctggcactgctgacccgggaagttctggggctggatgtattaacccgcagccggaaagttatttctgccatttatcgtcctgtaattttggctgacctgctgaaaataaaaccattggaattactcgcattactgaaatcaatgaattccgatgctcagtttgatcgtttatttaccgggataccggaaaaccgggtttacggagtatttgagcaggcggatattaccagtgcgattagtgctttggtcagtatccatgcatggcggacagagaataaattatcggtagcacagatctttaactggattactcctgcaattgttgatgagcaggaagataatactgaacgggaactattccgtcagattaaacaaaatacagaaaatatgttattcagtgatgaggcattacatcttgccggggtgccaaaggatatagaatgggtttcattattacatattttgattaatgatcagggcattgttaaggacacggatgacggtcttgactgggaaagttataaatcctatgcactggatattatcactcaggtggtaaggaaagaattagtaaatacaacgacagaagaacagggtaatgttattgatacaattttatcgatacttttagaaaaaaggtctgctcagtggaaaagtgtgagtgggttacttgagggatatctcggaaataaaacggacagtattatcccggcattgtactggtgcggaagtaataccagctattttctgaaaaacatcctggatatacctgatgataatatgttgtctgcggaggggaataagataatgaggttattgtcatctctgcggcgttatagtgacattattgctcatttccgtcttgagccagctatgatgtcacagttattatctcatgataataataaatggtacggaatgaaaacagaaaaacctgatttacagttactttaccggctttctgtatacaggaagttgattgatgatggtaaacaaccggctgagaaattattaaattatctttctcttattaattcactcccgatagatagccgcagtgatgaaatacgcctgtatcgtgatcaggcactgaataaattatctctttttatgggatggagtattaatgagttattaactgcagcacagtatgtcgcgccggaaaatgccatcatccggacattaccgcaaattattctcgttaaacaaattcattcagtctgcctgaaaacggggatgagcgcccgcagtgttatttcgctgtttaatctgaatgaagatagtaaatcatcactgtatcagtctgttgctgatcaggtaatggaaagtctggctccgcaggatgtatcactttacagcaatgatgaatccagtcagggtgacctgaccgtaagtgtttcagccgggaagacaacactgctggtttacagtgaaaatcaagaagaagagcaggtggcggaagatgaaacacgactgactgttaccttgcagacgctggaaagtaagccgctggagggaatacctgtttcatgggaaaaaatatctgagcagggtgaattatccggaactgaaagtacaacagataaatcgggccgggcttcaatgacattaaaagccgggcagcagcagggggttgcattaattaaagcacattatggtgtgaagaatataccgttacctctgatcagaattgattgtgatatcagtacgctgggtgcaacaggtattgagaccgtaccggaatatccggttgatattccggcagacgggaaaacgaaggtcaacattaccgcattcttccgtgacacctacgataacccgggaatagataaaaatatccgctgggaaacaaccggaggccgttttatttataaaggcggaattacagataatcacggaacttgtcacgcaatattagtcagtgatgaacctgctgatgtcacagtgcgtgtattttatgaaaatatacctgaagaatacactgaagctaatatttcttttatttcagcatag

SEQ ID NO: 278385 - DNA, 273 bp, Morganella morganii
gtgcatctggcggagctgattgcctgccgcagtgactgcggtgcctgctgcaccgcaccgtccatctcatcaccgattccgggaatgccggacggtaaaccggccaatacccgctgcgttcagttatctgagcagaatttgtgcctgattttcggctcaccgctgcgtccgtcagtctgtgccgggttacagccctcgcgggaaatgtgcggggagagccgggatgaggccatgatttatctgcttgatctggaaaaacaaaccgcgccctga

SEQ ID NO: 278386 - DNA, 810 bp, Morganella morganii
atgaaaattggagaggttttacttgttcaggaaaagggaaagacaatcgtaaactttcccactaaggatagttggagaaaaaaatcaacatatgagtttatctcgcaaggtcttgaatcgctggcaaaagtcatagtcgaagaaaaaattacatcaatatcaataccacctttaggatgtggtaatgggggcttggattggaataaggttgaggctcttattttcacagcatttgaaaaattagatgatattgagatagtaatttatccccctgcaactaataatcaactttcaaaaaataaaaacattatcaatgcgaaacatcttttggttcactatgcctatgaaaaattaaaaattaagaaaaaattttctctttatacagtattttatatttgcgagtgtattgagaaagcaaatcttttcttattcgagtttaaacatgggcggccatattcttctgagttagaaaatgttatgaaggatatagcaaaccttaaagtcgagttgcaggataattttgattcttttattgaggattatattaatactcatcaatccaaagagttacaaagcgattttggtaaactaatctcaactttaaatccaagtatcactttgcttaataattttaaaaataaaattgattatacggatagtgtatatgtgatcacgaaaatcgcaaaagaaaaagatcgtagtttatatattgatgatttcaaagaatatgaaaatgttttacaacatttaattaaaaatggactcttaattgaagatatctttagtgaattaaaaataaaaggaagatag

SEQ ID NO: 278387 - DNA, 582 bp, Morganella morganii
atgagtgaaaggaaaaaaatcgaagagcaggcacttctctatcatttaacatgtatgggaaacctgcctagtattttagacataggattaagatctcgtgcgtcagttaaaggcaagtttattgatgtggccgacggtgagataataacaggtcgcgaagctttaaatttacaaacaatggtcccttttcatttttttactaaaaacccttttgatggaagagttctgagagatcataatacaaaatcattttgtattatttcggttagacgaacgtttgccaatgaaaatggttggaaagttattcctaaacatccattatcctccagttcaactgtaagcctcttcgattatgacgaaggaatgaatcaaattgattgggagcttatgaatacaagggactataaaaatgcagaatgtaaatctgtatgcatggctgaatgtttatcaagtgtaacggtcgaaccgaaaaatttttattgcatctacgtcaaaaatgacaacgataaaaaacatgtcgatggcttgctaaaaaaacaagaattaagtatatttgtaacagtcaactcttatatgttctaa

SEQ ID NO: 278388 - DNA, 705 bp, Morganella morganii
atgaaaataaataaatttaccttagtcattttattgacattatccacacaatctactgcatgggctgataatattaatcacggtttagatgaatatggtaaaaaagtatcaacttcttcggaaaagggagcaataaaatatattaaagtatatcaaacaactgaaaaaccattaaatgcgtatagaatggattttgatacttctgaaaaaaatcttttgagcgttccaaatgctgctcatgataaaacagctaaattgcaaaacttagcaataactaaagcatgggaagttaaattttgtcagccagatctgattaacttcatgttaaaaaataatattgatatggtcagcggtgctctaataagtaaaggtgagatgcaacgaatggcagtttgctttaaaagcatgcaaatacctgaatcagtatcagataaaagcgataaagatgttgttataggctcatggtatgacgatgttggttcacctgaatttttggacgcaacatttacaataacgagaacatcacagggatattttttaaaacgattaaacggtgatggcagcagtggaacctatctactaacaaaacttgataataaatataaaaagaacaatgataagtttggttcttattatgtaatagatggtaatggattaaaaatttatgataaagatggatatataagaacagcaagaaagaaataa

SEQ ID NO: 278389 - DNA, 885 bp, Morganella morganii
gtgccgggctctgaaggatgttatcgaaaaaaagctttaaaaacagcggtaaagcgggagcttgtcagttaccttatcgaacagtattcgatgagcatccgtcacgcctgccgggccttatcgctgagcagaacggtgtatttttacaaaccggatacccggcgggatgaaccggtgatacaggcgttgacagaggcggcagaacgttatccccgttacgggtttaaaaagctgtttcagatcctgcgcaggcagggcaacgggtggaatcataagcgcgttcaccggatctattgtctgctgaagctgaactttcgccgtaaaggcaaacaacgtctgcctgtgcgtaatccggcaccactggcaacgccggaagcactgaatcagagctggtcggttgattttatgcatgatgcgttgatctgcggcaggcgtttccggacgttcaatatcgtggatgattttaaccgtgaagccctggcgatagaaattgatctgaatatcccggcccaacgcgttgtccgggtattggacagaattgttgcaacacgcggatatccggtgaaaatgcggatggataatggtccggagcttatatcactgacactggcacactgggcggaagagcatggggtaatactggaatttattaaaccgggtaaaccgactcagaatgcctttatcgaacgttttaaccggacataccggaccgaaatactggatttttatctgttccggacactgaatgaagtacgggagatcacggaacactggctgagggaatataaccgggagcgtccacatgaatccctgaataatctgacaccggaagaataccggttattagctgaaaataacgaaatctcaaaaagtgtgtggaactga

SEQ ID NO: 278390 - DNA, 267 bp, Morganella morganii
atgcgtaaagcccgatttactgaacatcagattatcgccgttctgaaatccgtcgaagccggacggacagtcaaagatgtctgccgtgacgccggtatatccgaagccagctactacaactggaaagccaaatacggcgggatggaagcgtctgatattaaaaaattaaaagaccttgaagaggaaaaccggcgtttaaagcagatgtttgctgacctgagtcttgagtgccgggctctgaaggatgttatcgaaaaaaagctttaa

SEQ ID NO: 278391 - DNA, 600 bp, Morganella morganii
atgagtttggaaagtgattatcagaatttactcgattccatttttaatggtgagaaagacatagctatctttgttattgatggttttcactactatcttgttgataataagtgtaattattgtattgatgttaggcctgaatataaagcatatatagataaaggttggatggatgaatctctctatggtgaagcaattaattcattcagaaatgggattcctgtattgtcaaagtccaactttaaagattatgtagctaaaaataatgttactgtttatacagttgattggatgagagaattttttatatcaggtaggcataatgaacttaccagtttctatgaatatattgagaaatatttatctacattagtggagccagtatcagatgattgggatagctggagaatgcggttacccaagttttatattaactttgataaaaaaatatatagacatacagattgggatagaaatcatgagatgtttgtgccttctgattggaatgctcaagctaatagtgattttgggttgttagtaccggataaagagcagtattggtttattaatagtatgaatttttggaagttacaaatgtaa

SEQ ID NO: 278392 - DNA, 537 bp, Morganella morganii
atggttggctctttacaaggaaaaatattaggcagttttggaacaagtgttgtagtttcaggtgcggcggcaaaaaccattcagaaagttgctcaacttaaaagtgggtcaatcaaaacaaatccaaatttgcattataaagatacaatagaaaaaatcggccctaaaaaggcttctgaaacttacttcagagtagaaggtggaggtagtggtacaaaaaccagtcagaacagaataaatgtaaactctgatggtagtgttaaaataaattctggatgcagtggtcagctttgtgtgagcactaatggttcaaatcatgcttcttattatcttagtaataagagacctgatggttccgtagttgtctttgaagttgatgcaaacttacataagcaaataatggaatctgctatcccgcagagacctatacctggggttccaagagctcctaatgcacctaagatagtcgacccaggaaaaggggaacccagcgtatctttagagctacctaaagtatgggataaattaattgagtaa

SEQ ID NO: 278393 - DNA, 414 bp, Morganella morganii
gtgggcggtgacacgcagagtgcagcgaactcggcgcaggccgggaaaacgacagttgagaataatgctatctccggtgcgtttatcggaaaaactgatgaacaagtcaaaaaaacagcgcaattatttgctgatggcgttgacttagaaaaattatacggcggcgataaagaaaaaatatcggccttcagaaaaggcagggaacaaggggctaaagatggtttaaaagatggcactattgaggttttagaaggcacggcaaactcaattcttcatcctgttgataccgttaccgacctcggttcagcaatctggaattatgatcagacaattgatgccattaaaatgtcagcaactcagtggaatgagttgcttgagtatgcaaaagtcaatgatccagagctggctgggtaa

SEQ ID NO: 278394 - DNA, 324 bp, Morganella morganii
atgtggcataatctacatattacaaatgtgagcagcatagagaaaacagctgcggagtttacgattactatgatctctgttttgccttatgcaaaaatgaaggtgaaaatctatgaaaaccaatcctgtaattttacaggaatgactgatttagcaataaaaagaaaatttgatggtagtcctgaatgtgctattggatatggaaaaaccattgaagaagcactggaagatacgcttctatattttaataaaatgttgaatcaagatggttttactaaactaacagaagatgatattagttactctgaatggtctgatttttaa

SEQ ID NO: 278395 - DNA, 3861 bp, Morganella morganii
atgacaacggaaaacacacctgtgaataccggccggacgtgtctgacttatctgctctgcggatggatgatcatttatcctgtcagtccggcagtatcggcccctgtggtaccggacaatcctgccacacagacggatcgtgccggtaatggtgttcctgtcattaatattgcggccccggatggttcgggtatctctcacaacacctatcagcagtttaacaccggccctgaaggacttatcctgaacaacagcacggataagctgacggccactgagctcggcggactcatacagaacaaccctgctcttacagcaggaaaggaagcccgcgccattattaacgaggtcaccggggcgaaccgctcacagctgaacggctttattgaggtcgcgggtaaagaagcgaatgtgatggtcgccaacccgtacggtatcacctgtaacggctgcggctttatcaacaccccgcaggcaaccctgacgaccggtaaaccggtcttcgcgccggacggcgggctgcaggcgctggaggtcacacagggagtactgtcctttgacggtaaaggtcttaatgcacagaccaccgatgcggtaaaactgattgcccgggctacggagattaatgcggaactgcatgcccgtgatttgactattatcaccggtgcacagcgggtgggcagtgacggcactatcaccgccctgaagggggcgggggaaataccccggctggcggttgataccggtgcgcttggtggtatgtatgccggtcgtatccggctggttgccggtgagcagggagtcggtgtcaatctcgggcgtatcaccgcccgtcagggagatattcagctcgacagtgccggccggctggtgctgaaagacagttatgcacagaataacctgaccgtcagtgcgccggagattgcgctggccggaaaacacgccgcagggcagaaagcggacctgcacagtcagcaactgctgacaacagacaactcggtactgaaagccggagaaacactgacgctgcggacggacgggaatatcaccctgaaaggcagtcagctgacaacagaaaaaccggacggcggggtgacgctgagcggtgctgtgctgacacaaaccggcagcaccctggatgccggaaatatcgcgctggacggggcacgttctgtcactcaggatagcggtagccagaccacggcccgtcagaatgtgaccatcagcggtcatgaaacggtatccctgggcggtaaaacagcggccggagggcaactcagtgttaatgcggggaccctgaactctgccgccgggtcagagatgcacagcggcggggatacacttatccgggctgatgatgtccgccttggtggtacattgagtgccggccgcgatacagatttgcgcggagatactgttgtgataagcggacaggccactgctgtcaggaacagtgacattaacagccgggcggcggacatttccggggtgatacaggcggaaaatgccgtgaatcttaccaccacacaacttaatcagtccggaaaactgctggccggagggccgctacagataactacggacaccgcggatatccgcggtaccgccggcagcctgacggatacccgtattgcggtaaaacaggggctgaccacagggaaagacagccggctgaccgcagaaaacacactgaccgtactggccggggctgcggatatccggggtaccctgcacggcagaaacgggatcacccttcgtgcggacggggcggttaagaccgccgccggctcacagctcggcagtgagcacgacattaccctgcacagtatcaccctgaacagccgccgggacacggccctggacggggcgcaggtcagcggggacaaggtgaccgtcagtaccggccgagacctgacactgcggagtcagcaggacagcgacaggtatgacagccggcagaccggtacctccgcagggatttcagtaccggtttacggaaccggtggcggaggaaacctcagtcacagccgcgataaaatgcacagcacctatgactcggtgcaggagcagaccgggatttttgccggcaaaggcggttacgatattaccgctggtaagcacacgcagctggacggtgcggtgattgcatcaaaagcggataaagacaggaaccgcctggagaccggcacgcttggctggacggacaccgaaaacaaagcggaatttaagacagagcacagcggtgccggtctcagcaccggtgacagcctgccgggcgctctgctgaaaacggcagccggcaccctgttaagccagggcggtaatcaggggaatgcgcagggaaccaccaaatccgcggtctctgagggacagtggattatccgcaacaccgcagaccaggaacaggataccgcaggcctgagccgtgacacggacaacgccaacggcggcatccttccggtgtttgacaaagagaaagaacagaaacggctgcagcagattcaggttatcggggacctcggcggccagatgtccgacattatccgcactcagggggatattgaggggctgagggtcgcgaaagcggtgaatccgggtatcacggatgccgccgctctgcgtgagactgacgcctataaggccgcagcgaaagaatacggcaccggcagtgatatacagaaagcggcacaggcggtgactggtgtgctcaccgggctggcgggggataacccggcaggggcactggctaacggcctgtccccgtatctggctgcggaaatcaaaaaacagaccacagatccgctgacggacgaggtaaacactaccgctaataccctcgcccatgccctgctgggcgcggtatccgcgtacctgaataaccaggacccggcggccggcgccctcggtgccgggggcggtgaacttgcagcccggattatcgcgaaacagttatacccggacacccggccggaagacctgtcagaacagcagaaacagagggtcagcaccctgagctcgctggcggggggactggccggcggcctggtcagtggaaacagtgacggcgcggtgacgggcgccaaaacggcaaaaaatgctgttgagaataactgggctgcagctgcagcaagactgactgtttccggatgtgccaaaataccgtcctgtcgtgcggctgccatagaggcaggtctgggaacattattcggagctagcacagccgcaataaccatgaatgatttatcagactcagatcgtaacatggtactggttgctgctatttcaaatgacccccggcttttttcaatactgagccccgaacagaaagctgcctatgagtcatggacaggtaaaaccgttcctaatacagggggagatcaattagcgggaacagattcatcaggtaaacttgaaaatccggtatctgaacagagtaaaggaacttcactggttaccccaaatccatcagatgagaaagggatcacaaatacaggaaatactgatggtaatctgaatactggtggaaatactacagttaccccaataccagcaggaccaagtaaagatgatttagcttatttagctaatcataaaaatgatatcgaaaactcttggcatcagggaagttttgattcccctgcggactctttacaaaaacattatgaaaaacatggaaaggaagtcggagcaaatgatatcgagcaatatcaacgtaaagctgaggaattttcaagaaatctgagaggagcaaaaacctctcagattagaggagctactgataacgtaactagatattataaaaatggaaaatatatcgacagaacagatgatggaaaaataatatcttttgggaaacaatga

SEQ ID NO: 278396 - DNA, 1701 bp, Morganella morganii
atgcgaaacacgttgctgcccatttttttaaacactttcacggttctgttaacgactgccgtactgatcttcagtcccggactgagtccggcggcaccgctgtctccggcagaccgggatataattgaacttcagcagcgtcagctgcttcagcagaaccggcagcagagagacgaactcgaaaaacagacagagaaaccgtccgcggctttgccgtctcctgtttatcccggcagcggcccctgtgtcaccattcatcagattacagtctccggtgctccgcatctgagtgaaaaacgcaggaaagaactggttacttcccgtgagggtaactgcctcacgctcagcgatatacaggctctgacagacgcgatcaccgatgactatctgcaccgggggtttattaccagcagggcgtttctgactgagcaggatctttccggcggtatcctgtctgttgccgtgatggaaggcaccctggaagatatcacgcttgagggtgagaaaccgctgttcctgaaaaccgcatttccgggaatgaccggccgtattctgaatctgcgggatatcgagcagggtatggagcagataaaccgactccggcaggtaccggtcagaatagatattttacccggcagtcagcccggtacctcccgcgttaatcttaccgcagagccggaatttcccgtacaggggggtatctcatttgataacagcggccagaaaagtaccggtgaaaaacagattggtgtgtcactgaccgggaataatctgctcagactgggtgacaggagctttgtcagtgtgacaaagagcagtgatttcagtccgtcccgcgatgcggtgagtctgcagaccggaatcagtctgccgtacggatacagtctgctggattacagctatgtttacagcgggtacgactcgctgctcacacagcgcggatatcactggtattcacggggaaacactcagacacaccggctgtccggttatcataccctgtaccgggacagtgacatgaaaaccgcagcagcagccggactcagtcaccgtatcatccgcaactacctgaacgatgtccgtctgaacagcagcagccgcacactgacgtccgtcagcctagggattaatcacagtcagaaactgtggcggggctatgccaccctgaacccggcagtcagccgcggggttccctggttcggcggggaggatgatcgcggaaaacagtcttcgcaggaaccggcagcggagtttaccaaatggtcggtatccggcagttattatctgccgctgacagaccatatcacctggctgaccagtttttacgggcagtggtcccctgacaggctgtatgccggtgaacggctgatcctcggcggcgaaagctccgtccgcggttttaaagagcagtatctgtccggtgataacgggggctactggcgtaatgaaatcagctggaaagtgttacatcttccggttgccggtgacaccggattcacggtggcggccgacggcggccggcaggcagcggataatcatgatccccggtccgggggaacgctgtggggggcttccgccggattatggagccgcagtgcctttatgacaaaccagctgaccgcaggggtgcctctggtatatccgcaatggctgaaaccggatccggtttcagtgtattaccgcatcagctttacattttag

SEQ ID NO: 278397 - DNA, 804 bp, Morganella morganii
gtggcccgaaataccggatttgcgctggcaaaaggaaaatacaccgcctttcctgatattgacgatgttattcatccgcagatgtacagtcgcctgctgcaaattgcccttgcaggacagctggatgtggcaacctgtaacggtacgtatgtttatgaagacgggggtgaaccccggccgattttcccgcccggtcgcctgcgttccacgggggttatctccggtccggactggctgaaacgcgcacttaattcccgtaaattcctgcatgtgacctggctgaacctgaacctgtaccgtacggagtttctgcgtgaacagggctgttattttgagccgggactgcaccaccaggatattccgtggacaactgaactgctgatgactgcagggcgggtggaatatattgatgagcgttattacgattatcttatccaccccgcatcggtattccatacaccggcagatgataaaatccgggtacggacgatacataattacatgaaaattctggaaatactgaatgacatcaaccagcgtcatgcggatgttgcgaagcagatcccggcctgttactggcagatttccaaagaagggctggggatcctgcacactatcagtgagatagcatcaccggaggtgaaacaggcgatggtgctggaactgtttgaacgcgggatttggtcactgatccgggataacgccaaagatttacggctgcgctggcgcctggcgcggcgctacccgcggctgaaagccatcctgagaaaatctgtgaggaatacagcaacaccggtccggtga

SEQ ID NO: 278398 - DNA, 723 bp, Morganella morganii
ttgtggctgtcccgcgcatttacgcagccggggctgcgttgcgcagcatacgggatcgctgcagccctcggcaccctcaatattctgtttatggtacagggcaggtccggttatgtgtccctgctggcgggtaccggtatctggttattgctgacgttatcccgccggcagcgcgcggcggttttcgtatgcggtctgctggcgtgtctggtctttgtgctgacccccaacaaggcagctgagcgtctgacgctggggtttcaggaggtcagccgctgtgtgtccgcaccggcgggtcatgagtatcacgcctgtgatagttcaatggggcagcgcaccgcgtttgtccgtgaatcatggcagctgataaaacaggcccctctgctgggaaatggtgccggcagtttctggtacagcaatcagaaaaccggttacagtgtccataacccgcataatgaatatctgctggcgaccgtacagaccggtctggccgggctggttctgtttctcggctggatggcgtgttatttccgtgccgcacggtatcagacacctgcctgccgtgccctgtttattgcattactgggcagttatctggcctgtcatctgtttaattcctttctgctggactcatctgaagggcatctgtttgttattctgtcgggaatactggcaggcggtgtcgtgaaacaccatttacccctgactgacggaaccgactga

SEQ ID NO: 278399 - DNA, 231 bp, Morganella morganii
atgaatactatcaataccaccgattccaccacagccccttctctgcttgatgagctacttgtggatatgaaattcatcaccaaattaaccggattaacggataagtggttttacaaacagatacaggaggggcagtttccgaaaccgattaaactgggacgcagttcccgctggcagaaaagtcaggttgaagcctggttacaggagcgtattgacgaatcctgtgaatga

SEQ ID NO: 278400 - DNA, 216 bp, Morganella morganii
atggatattacatttgagtgtagcagtttttcaggagtaacgcggcgcagtaccggcaaaattgtgattgaagctgatggcgcttgtctcgatgggcacgttgatgtctcagatatcgttgaagaatattcagctaatgcgcttctcagtgagattgaagatgaggacattatcaaatatctcaccgagcagggctatacagtaatcgaaccgtaa

SEQ ID NO: 278401 - DNA, 216 bp, Morganella morganii
atgacagataaaacaggtggctcggcgtttccaatgattggcagtgtagcctacaactcagattggagtatcgacccaggaatgacgctgcgggattattttgcagcaaaagctatggcatcagtcccgttagctttagatagtaatgagcagcaattaatagccaatgctgcttatgcacaggcagacgcaatgctcagagcaagggagaaataa

SEQ ID NO: 278402 - DNA, 390 bp, Morganella morganii
atgtcaggacatccacacgctgacttaatggctaaggcagcagagatagcaaagacggataaagagtggtggcggcactttgaaataaagacactgcattttgattcctggagcgaaatgtgcaacgaggtatttttcgacaatgacgaatatcgccttaaaccccgctttatcgacattaacgggcatcaggttccggagccggcgcgggaagtgccggataacgatgatttactttggattgcagatatcacgcaaccaactgctgctcagttgatgtggacgggccatccatcagacatttttatgcttgaacgcggaattcttcactcaaacagagaggcagcagagacccatatgttcgccctgacctctttcacacagaagtaa

SEQ ID NO: 278403 - DNA, 264 bp, Morganella morganii
atgcagagactggaaatatccggaggacagacatcatcacggacggtgcttggccggaaagtaacaacgcatgaagggttcgatcacattacaggaagtctgagtcagatcctaggttcgtcagcatggagcatgaacgaactggtcgaatacatgattaacaacgaatacatggacgatttcacggacgagttaatcaagaccggacacggaagttctttcttcgcacggatagcggaaaagatgcgcaaggaggcagcatga

SEQ ID NO: 278404 - DNA, 165 bp, Morganella morganii
atgaacgcatacgcagcacaggatgctcaggaagagcagcaacggattaccgagcagcgcaggaagcgtgaacaggaagaaagggacgattactggtttcgtgaaagtgtcggattaccaaacggacgggtaccggcagaatttctgagcggagaattcacatga

SEQ ID NO: 278405 - DNA, 360 bp, Morganella morganii
atgatggaatatccacggcgcatagggaaatgtgcaggctccggcgggacgtatgaggaaaattatcaacgtgccctgaaatcagcaattgagcaaatggatttgcaacggcagggaaagccggccggagaaccttcactgtcagagcaacggattgccgagacacttcacaacatctgccgcattaccgcccttcgctaccctccactacctgagcatatcaaagcagcacggaaagcagctgaggctcaggcgtggagagaatggcgtgaggaacatggaaaagttaaccaaggcagaatcgactactacggcggcgggcgcacggaatcgcgaccaggtcagaaattgggggattaa

SEQ ID NO: 278406 - DNA, 873 bp, Morganella morganii
atgaagttctcaaaagcaatgagaaagaaggcaaaactcaggctggcattaaccgggccgagcgggtcaggaaaaacatacggagcattaattatcgccaaagggctcggcggaactacggcggttattgatacagaaaaaggaagcgcatcactgtactcagaccggtttaatttcgacgttcttgagctcgacccgccatttacaccagagcgttttattgaggcgattacagccgcgcaggatgccggttacgacaacctcatcattgacagccttacccatgaatggagcgggaccggtgggtgtctggaaatgctggattcactggccaaggctaaatttggcgggaatacgtggtctgcatggagcgtgatcacccctcgccacaataagtttctcgacgcgattctgcggtctgatgtgaatattatcgcgacaatgcggagcaaaacggaaacggctcaggttgacaaaggtaacggcaaaaggcgtgttgataagttagggatgaaatcagagcagcgtgatggcgttgaatatgagttcaccacggttctcgaccttaatcatgaaacccacacagcagtagccagcaaagaccggacagggttgttcagtaatgctgactttaccgtgattgacgaaaccaccggccagcgcttgatggcatggatgaatgacggcaatagcaaggctgatattgacctcgcacacttcacagagtcggcatcaaatgctcaggatatggacactctgaaagctgcgtttgccgaagcctacaaaactctccgtgacacaccagagcaggcaaaagctcaggaggtgtatgagtcacgcaaggaagaattaatcagcaaagaggcggcataa

SEQ ID NO: 278407 - DNA, 465 bp, Morganella morganii
atggcgagtagaggcgttaataaagtcattcttatcgggaacctcggacaagacccggaagttaagtttctgcaaagcaatagtgcggtggctaatttcactctggcgacaagcgaatcatggagagataagcagtcaggtgaaatgaaagaaaaaaccgaatggcacagggtcgtggtgttcgggaagctggctgaagttgccgggcaatacctgaaaaaaggaagtcaggtatacatcgaaggtcagttgcagacacggaagtggcaagaccagcaggggcaagatcgctacagcacggaggttgttgtgaatgtcggcgggtcaatacaaatgctcagtgggcgtaactcagggaatgataacgcgccagcggcagggagccagaaaccacagcagcaacggacgcagacacagaatcactgcgagccgccaatggattttgacgacgacattccgttttaa

SEQ ID NO: 278408 - DNA, 294 bp, Morganella morganii
atgaaagtctatctcgacgatgagcgcgagacaccacagggatttgtgcgcgtctactggcctgatgaggctattacgttattgcaaacaggcgaggtgacattaatcagtctcgaccatgatttaggtgatgatgaacgtggaaccggatatgacgttttattgtggatagaagaacaggtgtatttgaatggatttaaagcacctgaaattatcgttcattccgcaaatacatcggcgcgccagaaaatggaattagcaattaaccatattaagcggattcaggaggggtga

SEQ ID NO: 278409 - DNA, 285 bp, Morganella morganii
atggatatatcacgacagcagtttgaggaatacattaaattgcataccgacccagaagaactggagagaaaattaaaaaaggcgaataacggattaaattacgctgaccgggatgtcgatttaatgtggattggctggaaggaatcgcgtgaaagcctggaaattcagttgccagaagctgatgctgacgatgggtgccctaattaccatagtgggtacaacacagctatgggcgatgcttatgatgcaataacaaacgccggagtgaaagtaaaagatgaataa

SEQ ID NO: 278410 - DNA, 252 bp, Morganella morganii
atgaataacgaaatattggagatagcaaaatacttaaaaaataaaataacctctggcgaaggcgtcgatgaatataattggcaagaaataattgatgtctgcaatgagattgagcgtattaatgatttaaagccgatcggatatattccccctgttggtttagtgaatataagaagaaatcagccggtgatacttagtcagtttaacaaattatcaaccatcccactctaccgcctagacaaacaaccatga

SEQ ID NO: 278411 - DNA, 165 bp, Morganella morganii
atgacaatcggatttgtattactactggtaatgcacggctctgctgtgcctgttaccgatgatatttatacgctcgaagaatgtgagagccgcgcagtgcaggtaatgactgtgcggaatgttgaattagtgtgtgcggaggtggttcgtgagcagagaaattaa

SEQ ID NO: 278412 - DNA, 369 bp, Morganella morganii
gtgagcagagaaattaaagtaagttcaggtgcatttcagtgcgatttagaaattacctttcgcgttattgatgaagataaatttaaatcagaatgcgaacagataaataagttcttccttgatgataaatatcgtaaaaataaattcggtagtcacgcaaaggctggatttgcactgttttgcgctgagtgtttccagcaaatggctttcaataacttcaaggatgaatgctggcttaccgctcagtttaattatgacaaaggtgaaggaattgaagggttcccatcactggaagatatgggcgctgagattttacacgctgaaagttggtttattgatgctaacgaaattgatatatcaggatggtaa

SEQ ID NO: 278413 - DNA, 309 bp, Morganella morganii
atgaacaaatatcgtgacaaatcagactttgagattaataaggctgtggccgcatttaatggcatggttcgctacaatgttgttgagtctgacgagaaaatttatacatcattcgatgagttcgacccctgcaacaacccggcggacgcatggccgattattaatgagtatggtattagccttatatatcaagagagagagttccagtttgcaactaacgacggaaatatagagtgcagcattagcaatccattaaaagccgcaatgattattttcctgatgatgaaggatgcggagaatgaaagctga

SEQ ID NO: 278414 - DNA, 540 bp, Morganella morganii
atgaaagctgactacggcgggagcacaacaccaaaggaattgcgtgatttgtggcaaactcccctaccgttatttttagcactggacgctgaattcggtttttaccttgatgccgccgccaatagaaataataccctctgctctcattacctcaccgaaaaagacaacgcattaaactccgcctggcaaagctacggttctatatggtgcaacccgccgtatagcgacatacagccgtgggtaagcaaagccgccgaacaatgcagtgagcaattacagccggtcgtgatgcttgttccggctgatacttcagtgggttggtttaaatcggcactgaataccgtcgatgaagtcagatttattaccggtggccggatatcgtttattaacgccggtacaaacaaatcaaagaacggaaataataaaggctccatgcttttaatctggcgcccgttcacccagccccgccggataattaccacagttaaccgtgatgacctgatggatataggcaaccggttactggaagctcaaatctga

SEQ ID NO: 278415 - DNA, 213 bp, Morganella morganii
atgacaccacaggaagcagagaacggacgcagacgaatagcaagggaatgcctgaaggaattaatgcagtacacatcagacgaacaacacaccgcaatactcgataaatacacaccgaaatttaaaccacttaatcacctgcgctttccggcaaagagagtgctcgggtattacgtgcgtacgttacagaaggagatgaaggatggatcttaa

SEQ ID NO: 278416 - DNA, 1152 bp, Morganella morganii
atgtcaatcaaattacggtatggcgtgtggcactgtgatttcgtttccccgagtggtaagcgaattagacgaagccttgaaacatcggacaaaaggcaagcgcaggagctgcatgaccaattaaaggccgaagcgtggcgtgtcgaaaagctgggggactacccttctgtaacctttgatgatgcatgcctacgttggctccaggaaaaggagcataaaaaatcactggatgatgacaaaaccaaaattgaatattttcttcagttcttttccgggaaattattgtcatcaataacagagacagacatcttaaaagcaacgtcagggatgataaacaggaagcataaggaggtgtgggaaataaaggcggcgtcagcaaagaagaaaggtgccaaaattgcgccatataaaccaaaaccggcaactcaggcaacaaaggacaggtatcttgcctttttgcgctctcttttcagagcggctgttaatgactggaagtggatcgggaaatcaccaacaattaaagtcaggcaaaaaaaggaaatacgggtcaggtggctgaccaaagaagaagcaacaaccctgatacagtgtatgcctgatgtaatgaagcctgtcgttatgtttgcactcgcaaccggattgcgcaggtctaacatacttaatctagaatggacgcaaatagacctgcaacggaaagttgcctggattcatccggaagatacgaaaggcggcaaggcaataggtgtggctctcaacgaaacagcttgtcgggtactcaggatgcaaattggaaagcaccagcaatacgtgtttgtgcacactgaagcgtggcacagagctgacggatcaccaacagaaaaagtaaggaagatgagagtcgacgacaacactgcatggaatactgggcttcgccgagcaggaataacaaatttccgcttccatgaccttcgccacacgtgggcgagctggctcgttcaggccggagtcccgctgactgcgttacaggaaatgggagggtgggaatcgatagaaatggttcagaggtacgcacatttagccccgaatcatcttgttgaacacgcgcgaagaattgacgaggccatggggattaatggcacgaatatggcacgcgcactaataaaagcggtctaa

SEQ ID NO: 278417 - DNA, 2847 bp, Morganella morganii
ttgagatacttttcatctttccagacatcactgaaaatttcgcgttacctgttccggatcgtcggtgtgatgttatgggggctgggggcgctggtgacggtattctatttactgaatatctataacgggatgcgcaatgatatccgccagcaatattattccgattacgatgccttattagcctatttccggcaatccaccgatatgacccgcgatatccgttatatgaatgaacggtttgtcgaaaataaagaagtacggccgggagagcccgcagaccggaccaccgacggcttttttattgattaccgggcactgaataccaaaggcgactgcgcggccttccgcaccggcagcggcccgtatattattgcattcaaagatctcctgacgtactggcagaacaatatcgccgcaccgatggggctgaatcaggtctttctggtcggctcaaaaaccctgtgtatggtgtcatttccgatccgcaacctttccaccagcagcgaaacgttgcgcagaatggtcaatgattactctcagaactatttccgcctgaaaagtcaggggaaagagcgcaccatttactgggcggcgccgggtagtaatcagggaatggccagcctgtttgtgatgatgccgctgtattatgacgggcgttttctggcactgatgggtattgagcgtaatctgcagctggaaaactttaaccgcctgcgcgatttcccggccaatatggtgattattaatgagcaggatgatgtcgtgctctcttatccggaagaaattaacacacagaaaaataaagaccgttatctggtggacgataattatttcggctatgacgacgaattcacccaactggtctttaaacgcagactgacgccgtcgctgctgagtgtggtatataccacgccgctgagctcaatctatgaaaaactgaaatttcagatcctcaacggggcgattcttaatctgatctctgtcattattatcgggttgtttacctggctgctggaacggcggatatttatgccggccgaaaacagcgccatgcgtctggaggagcacgagcagttcaaccacaaaattgtggcctccgcaccggtcgggatttgcattctgcgcacactcgacggtacggcactgctgagtaatgagctggctcataattactggcgtatgctttcgtttgaggatcgcaaccgtatcggcctgctgataaaagataaacggcaggggatggaagatatggtgacccgtaacggcgggcaccttcaggtcagttttgtgcattcccgttaccagaacgaggaagtggcgatttgtgtgctggtggatatcagcgcccgtgtgcagctggaaagctcgttacaggatgcggcacaggcggcagagcaggctaaccagtcgaaatccatgttccttgccacggtcagccatgagctgcgcacgccgctgtacggtatcatcggtaacctggagctgttacagtccatggcgcattcgcgggatgcccagcgcctgctcggtacgatgaataactcctcgtcattattactgaaaattatcagtgatattctcgacttctccaaaattgaatccaaacagctgaaaattgagccgagagagtttaacttccgcgaacatattcattttgtggtggcaaactacctgccgctggtggcgaaaaaacacctttctctgtactgctttattgaaaaagatgtgccggagctggtctgtaatgacccggtacggatgcagcaggtgatcgccaacctgtttaataatgcgattaaatacacgcatgtcgggatggtgtgcattcacgtctatgtctgcggtgaatatctgcatgtggatattcaggataccggcggcggtatcagtgaggacgagctgcgtcagttattcgacccgttctatcagattatgccgaacacggacagcccgtcgcagggtaccgggctcgggctgcctatctgtgaaaaactgatctcactgatggacggtgacatgatggtggaatcgcagaaagaggtcggcagcttgttcgggatccgcttcccgtgctataccgcctatccgtccggtcatcatgcggatattgtgccgctgaccgtaccgctggtctttgagttccgcaatggcgtgctggcggattatatgcagcgttactggcaggatattgccccggcagcggttccgttgtctgaatgccctgacattgcctgtgccgtggtgatcacggacgtggtgaccccggcgatgaaacaggcgcgtctgctgattgaactggatgccggttataccgacaaaccggtgccgatgggcggcaatcactggcggcataatacccatcagcttgacgggttgtttgattttgtctctgaccgcctgaacaaccgccgtcaggaagccgatgatctgccgccgccgccactgccggacagtcagcaggcagcacatgtccggatcctgattgtggatgaccatccgattaaccgccatctgctgtcagatcagctgcatctgttcggcttccacaccgcaacggcggatgacgggctggatgcgctcgacttcctcgaaacccacgaggtggatattattctgtcagacgtcaacatgccgaatatgaacggttatgacctgacccgtgcactgagagagaaggggatgacactgccggttatcgggatcaccgccaatgcgatggcggaagaacgcgagcgctgtctggcttccggcatgaacgattgtctctccaaaccggtctctatgcaggcgctgcgcaccatgatacagcattatatcccgcaggtcacaccgcccggggcagaataa

SEQ ID NO: 278418 - DNA, 1446 bp, Morganella morganii
atggcaggcatagcatcgttaggcgtcggcgcaaatatggaccttaatcagcaaatggacatgctggaaaaagcagaaatgcgccgtctggagccgttaactgcccaaaaaacagcgtgtgaagcacagattagtgctttcggaaagttacagtcttcactggaaaaattaaaatccgcctctgaagcactgaaaaaatacggtgatatcagtaccaccaaagtcagtgaagaaaataaatactttggtgtgtccaccacaggtaaagcacagccgggtcagtatgatgtcagcatcgagcgactggctaaaaaccagaccttatccggaaaaggtgttgctgacggtaagacatcaatgggtaacagcaacgctgaacgaactgtttccattaaaatcggtgacggcagtgatgcgaaaaagaattttgatataaaactgagcagcgataaaacatcgccgattgaagtcgctgatgccataaataaagcggataaaggcgtctctgccagtgtggtaaaagataaacagggtgaataccacctggtgttaatcagtaaaacccaggggaccaattctgctatcagtatttctgttaccggcgatgatgatctggataaagccatcggcggaaaatcagaaaaacaaaccgacggtaccgttaaatttatcagtaacggcggcatgaagcagacgaccgcaccggaaaacgcactgttcactgtaaatggtatcgaacaggaatcacagactaacgaagtcaaagatgctttttttggtctgacactgacactgaaaaaaaccactgaaaaagacagtgccggaaaaccaattactgaaccgctggttgtttcttctgatattgaaccggcgaaaaagaaaattaaagagtgggtggatgcttataacgagtatcagaaactctgtaaagatctgaccaaatataccaagacagaaaaaggtgaggcggcggataaaagtaatggtccgctgattggtgattccacggtacgcggtatccagaataccatccgcgggcaaatcagaacaccgaatggtgacggtacactcaacaccatgagcaaactcggtatcaagcaaaagttagacggtaccctggagattgatgacaaagttctggataaagcattaaaagaaaatggttccagtgttaaagagttctttgcgggggacggaaaagagaccggttttgccactgaaaactttaattatctgaaaaagacattagacagccgtgaaggtacgattcataacgccaccgacggtctggagaaaaagaaaaaaggtatcgataaacgtatcgaacaaaccaataaacagatcgaaaacaccatggatctgtatcgccgtcagttccagaatctggacaaaatgatgaactccctgagtggcaccacacaagcactcggcagaatgttaggttaa

SEQ ID NO: 278419 - DNA, 339 bp, Morganella morganii
atgaagagatataaaacagtaatgacaagcgtgataatactggccggtttttatttccgggtatggttgtatacagttatcggaattgcactggtgcaacggataaataataacctgcgggaaccgccggtttctgctgaattctgggattcgttatacctggtcagtaaattcctggtggtcattctgctgctgatattgtcaggggatttgatccgtgtttaccgtaatatccggcggcacccggtaataactgcaccagggcatcgtttttgtctgtcggctgccgcgctgacgggaggaataatgattatcctgctgaccgtcagctattggtag

SEQ ID NO: 278420 - DNA, 303 bp, Morganella morganii; identical to SEQ ID NO: 275434

SEQ ID NO: 278421 - DNA, 165 bp, Morganella morganii
atgctttttgtttcctttgcccgttatcaccgtcatacttttcccgcagtgatgcacatttttgtgtctgtttttatccttattcctctgtaccttcccctgaaggcaacctctatcctccgtgtatacacaacacaggaagagaagaaacatatcgatgcataa

SEQ ID NO: 278422 - DNA, 579 bp, Morganella morganii
atggatccgctggggcatgccacccggctggtatgggatgagcagggggactgtcttcagcagactgacccgggcggcagcatcacccgttaccgctacaatacccgcggacagctgacccgttataccgactgctccggttatcacaccacactggcctatgatgagcgcgggcaactgaccacgatcaccgatgcactgagccagaccacttgctatcactggtcggagggcggacagctgttgcgggaggaattaccggacggccgtgacaaccgctattcctatgacgatgccgggcgtgtcaccgggtttaccgacagcggcgataaaaaaattaccttcgcccgtaatatcttcgggcaaatcactgagcgtaccgacccggcgggataccgtctcggcttccgttacgaccgcttcgggcggccgaaagtgctggtcaatgaaaaagacgaatcttaccggtttgaatatgacgcactgcaccgcctgatccgcagaggaaccagcgggcggaatatgattatgacatctccgggcacagaaccggcggccactcctggccacatccattaa

SEQ ID NO: 278423 - DNA, 498 bp, Morganella morganii
atgagtaaaaatgaccttggcagcgttgcgccgaaagaacgtattaatattaaatacacacctcatgacggcggaagccaggcagaaattgaattacctcatcatcttctggtcattggtgacttcaaaaataaggaagaagatacaccgattgaagaacgaaaaactgtttctatcgatcagaataatttcaattcagtgatggaaaactcaggtattaatctgacatttgctgttaaaaatcaccttgaagaagaaagtgattcagaaatccctgtcaatcttgatattaaatccctccgtgacttctcccctgacaatattgcgaaaaatgttcctgaattaaataagttacttgaactgcgggaagcattagttgcactgaaaggacctctgggaaatatccccgcattccgtaaacagcttcaggcgctgctggataatgaatccacccgtgagcaactgttaaaagaactggatatcgtcagcaataaataa

SEQ ID NO: 278424 - DNA, 1485 bp, Morganella morganii
atgtctacagcaacagaaagtgtaaaacaggaagcaggtcagctccctgccggtacatccctgcttgatgaaattatgtcgcagtcccggatgacaccggaaaccgaagcctacgatattgcgaaacagggtgtggccgcatttatcagtaatattctggccagtgattcaaaagaagagccgatcaataagttactgatcgataaaatgctggttgagctggataaaaaactcagtgcgcagatggatgaaattctgcataacgaccggtttcaggaagtggaatcttcctggcgttccctgaagttactcgtggaccgcactgatttccgtgaaaatattaaaattaatattattcatgccaccaaatccgaattgctggaagattttgaattttcacctgaaattgtccagtccggtttctataaacatgtctattctgccggttacggccagttcggtggtgagccggttgccgcgattgtcgggaactatgctttcagcaataccactccggatatgaaactgcttcagtacgtcagtgctgttggtgcgatggcacatgcgcctttcctgtcatccgtttcccctgactttttcggtgtgagcagctataccgaattaccggcgattaaagatctgaaatctgtttttgaaggtccggcacacaccaaatggcgctcactgcgtgaggcggaagattcccgttacctcggcctgaccgcaccgcgttttctgctgcgtcttccttacgatatggttgaaaacccgattaaaaatttcaactaccgtgaaagtgtcaagcaggatcacgaccactatctgtggggtaacaccgcatttctgctggcagccgggatcaacaacagtttcgccagataccgctggtgtccgaatatcatcgggccgcagagcggcggttctgtcagtgatctgccggttcactgctttgaggcactgggcgagctgcagactaaaatcccgaccgaaattcttattactgaccgccgcgagtttgagctggcagaagaaggtttcatcaccctgaccatgcgtaaaggcagtgataacgcagcattcttctccgctaactccgtacagaaaccgaaacattacccgaacacccgtgaaggtaagatggcggaaaccaactacaaactgggtactcagctgccgtacatgttcattatcaaccgcctggcacactacatcaaagtgttacagcgcgagcagatcggggcatggaaagagcgccaggacctggagcgtgaactgaatatctggctgaaacagtatatcgccgatcaggaaaacccgccgtcagatgtccgcagcaagcgccctctgcgctccgcacagattcaggtactggatgtcgaaggggatccgggctggtaccaggttgctatccaggtgcgcccgcatttcaaatacatgggtgccagcttcgaactgtcactggttggccggctcgataaggaataa

SEQ ID NO: 278425 - DNA, 438 bp, Morganella morganii
atgggggcgtattatcatcgtcagtcttcacaacccgtacgcctttttgaacggataagagggaagcacgccggtgcttcccgtcagtcccgcactgctgctctgattaattcggtcaaatcacacctgacactggtgctgaatacgcggccggaaacctgtcagagcagccgtgatctgggcgtgacggatcttaatgatgccaccgcgacggcggtggatttccgtgccagtctggaaacttccatccgggaatgcattctccgctatgaaccgcgtatcagtgatgtcgcggtggaaggtgtgattgatgagcataacccgctgctgctggagttccggataaccgcactggtattgctggaaaatcagtctcagttaattgaatttaatatgcagatggacagtcaccggcactacagactgaagcaggcctga

SEQ ID NO: 278426 - DNA, 1782 bp, Morganella morganii
atgccccgtaatccccgtttttctgatgaacttgaatatctgcaactgctggaagataccgttgcgcgtcacaagccgcatctggttaattttctggcagaaaaaagctcagatccggatgtgctgcgactgctggaaggttttgcttatctgtctgcctccctgcgcagtcagattgaacgccagtttccggaactgaccaacagtctggttacgatgctgtggcccagttatgcccggccgtttccgtcaatgacggtaatgcagttcactccctctcccgccctgcgtctgcctgtttcggtaccggcgggaacattgtttgagagtcagcaaatcacgctggatgaaagtgatgcggaagaagatgttctgcatcagatgacctgccattttacgcagagccgcgacctgcgcgttatgccgtttacggtttcctcggtgaccgctgacaggcagtcggtgacggtttcattttcactgccgcagccggtccggttatcagattccggcctgccggaactgcagttttatctcggcggggatgattacaccgcgcatgaactctattttctgctcagtcacgcagtgtcaggggcaacactgaccacggaaaagcacacgtatcaggcggaaaattttgccgtgtcaccggccggtttcagccgtgaggatgccctgctgccctacccgagaaacagttatgaagggcatcgcctgctgcaggaatacttcagttttccgcgcgcttttctgtttctgaatattgaagggcttgatgatatcccggcggtgatgtccggcgatcatttttccctgaccatccacttttcccgtccgctgccgccggctgcggatattaacaatgacagtatcctgatcaactgtgttccggcggctaacctgtttccgatggaaagtgaagccattgagctggatggcagacaaagtgagtacccgctgagtccgggctttgcccatcccggcagttacgacattttttctgtcaccagtgtggacggactgcgccgcagcggcagccagccggtcaaaatgacacattacacacagtttgaaagtttccatcatcaggatccggtcaataaaggtgatgatgagcagtattaccggctgcgtacactgccgtcacctgatgacggcgggttccgtcaccggatttcctttgtccgcagtaatgaaccggcgctggtcggctgtgatgaaacgatttccgtttctctgctctgcaccaaccgggatgtggccggttatctgcggacaggttctgttacccgctgcacagagccgctgccggatattgcggcggtcagcaatataatgaaaccgacacagacactgcgcccgctgctggatcactccctgcactggtcggtgctgactaacctgtcgctgaattatcagtccctgctgagcctggacgcactgcgcgaactgctgcagctttacgatctgacatcggtattccaccagcagactgcccgtcaggcacaaaaatgcctggatgccctggtgagcatgaccacacagcctgccgaatatctgtaccggggattaccggtgcgcgggctgaaatccaccttatctgtttatcagagtgcgttctcctccgagggcgggctctatttgttctgttccgttattgctcactttttcgggctctataccagtgtgaatacctttcatgagctggaagtgatcaatatggataaccgggaagtgtatttatggccggcgaaaatcaatcacaccgttctgtgctga

SEQ ID NO: 278427 - DNA, 1026 bp, Morganella morganii
atggccggcgaaaatcaatcacaccgttctgtgctgacatctcctgtcagcgacggcactgccgccatgacggagtatgacttttatcagctggcagagttactgagcaaatccgtgacagcggcgggaaaatccgcacaggagagtatccgtttctcggcaagtgccggaatcgcctttccgacacgggatgtggccggggtcacccgccgtgaggacggcagttatgaagtcaaagtggcgtttctgggtctgcacggcagtcagtccccgctgccggggtattacctcgacagcctggcgtgggaagaagcccagcagaccgaaagtgtcaccgattttcttaatctgtttaatcaccgctttgtcgcgctgctgcaccggatctggcggaaataccgctattacatttcgtttgagccggacggacgcgacccgttttcccgctatatgttcacactgctcgggctgggcagcgaaagcaaccgcagccggatccggatcaaccacaacaaaatgctggcttacgccggattactggcaagcccggggcgctccccggatgtggtgtgcagcctgatttcccactgttttgatctggacaacgtgaatctgtccggctgggaaagccgccgggtaccgattgcggacgatcagcagaaccggctgggcgaaatcctgtacagcgccagccgcaccgcgcagccgcgcaccctgctgggtgagaatttcagcctcggtgcacgtattgaagactgtaacggaaaatgcactatcgaaatcagtgagttatcactgacccgttatatgcgttttttaccgaacggcccggattatctgccgctggtcgcttttgtgtcttacatcatgcatgagcagctggcctgggatttacggctgcggatggcggaaaaacaggtcggcgggatggttctcggcgagaaagataacaaccaactgggctggcggagtttcctcgggcaaccggagctgaagccttttgtgacgatttcagtattggaataa

SEQ ID NO: 278428 - DNA, 1269 bp, Morganella morganii
atggataaaccacaacttaatttttatttagtcaacagtaaccggctggaaagcggccgggctgctgcggctcagttttcctcacagggcggtaccatcggcagtaacgccgactgcacctggtcactccaggacagcctcggcaaagtcgccggcatccagtgccgcattgtctggcaggatcagacattctgcctgaaaaccctgaccgagccggtccgtctcaatcagaccgcgatcccccgccacgccggtgctgtccgcctgtcccggggggatatcattgagatcggggaactgcagtttaaaacccatctggccatgactgatgaaccttaccgcgatccgatggccgtggcaccacaggatattgtgtccgcgggcagcaaccctctggataacctgatggacacccgcgccgctcaggatgatgccccgcttcagggggatgataccgcaccgtccgtccgtggttcacgcacccgtgacccgttgcaggcactggaaaatgaaagcctgaccaccggcggttcacagacagaaaacgacgttcccggcctgctggccgatcgccgcccggcctcgtccgccgccatgccgctctccgataacagagggaacaccatcgtgcaggaatatatggatctgccgaagctgtccgccaccgatcgcacggacgaattgctgccggtcactgatgcggatcatattgcggtaaatccgctgatgcacgggctggaagcccatctgccgatgcacaactcccgtcaggccaatgattttctgaccgaggtcggccggacactcaaagccgctattgaaggtcttctcgcattacagaaaacccaggacaacctgcgcgacaagcagctgcgtccgattgaggataacccgctgcgtctgaacgtggattatcaggaagccctgcatctgctgttcggcgatgagcgcagcccggtgcatctgtcaccgacagctgccgtcagcgagagcctgaccaatatgcaactgcattatcaggccaacctggaagcgatttccgtggcgctggataccatgcttgacgctttctcaccggagcggctgctggcgcgtttctctcagtatcagcgggccggggaggagtgcagttcagatccggcctgggcgtggcagatgtatgtcagctactaccgcgagctgaaatcctgccgccagcagggctttgaaaaactcttttatgaagtttacacccatgcctatgaccgggcattacgtaaaggcttataa

SEQ ID NO: 278429 - DNA, 540 bp, Morganella morganii
atgagtgtgaaactgcgatacggattgttgctgctggtactggtattaagcggatgcagcaaatcctgggaagcgaccaaaaaagtcggcaaggtgctgtgggatccggatattccggtgggcaaagcgaaccagcagccatctgaaattgcgatcacactcctggcggagccggatatgaacccgaatccggacggagagccgtctcctgtggagatgcagcttgtgtatctcagcgaggactcccgctttgaatcgatggatttcgaccagctggatgacaaaccgctgccggatgtgctcggtaaaaactatatcgatcaccaggattacacactgacaccggatcagtacaaaccgctggcgttactgcggacctccggcgagaaccgctatctgggcgtgattgtccgttactcggatcctaacatcactgaatggaagaaaatcatcaggttaagcgggatcggacggcagtattacatcctggttcatgtccgggcaaatgaagtggaattgcgcaaagaggaagaagaataa

SEQ ID NO: 278430 - DNA, 1353 bp, Morganella morganii
atgtcgatgaaaaaccgggttatctggcgcgaaggtctgtttatcaagccccagcattttcagcagcagcagcgccaccaggattatgtgacagagagtctgctctctgcgttcttcggccactatgccggatttacctctctggtgatcaacgaagatattctgcggctgggccgggtcggtatatcagaggcgaccggggttatgccggacggtaccttgttctcgatgccgtcacaggatgaactgccgccgccgattgatatcacgccgctcaatgataccggcaataacattatttatcttgctctgccgctgcacagtgccacggtcaatgaaatcgcggccgggcataataatcacctgacggcacgctataaagagttccgtctggatgtccgtgatctgcataccgaaagcggtgatgtcagtatgctgaatgtggcgagactcagcccggtgctgaaacagggtgccgcagagctgaatgcttatgtctccgtgcctgtctgccgcatcagcgaacagacggcagacggcggcctgatcctcgatgatacctttattccgtcctgcctgaatatccgcctgtcaccgtcactgaccggctttctcgatgaactgagcggcacactggctgagcgcgcccgccagctggccggacggatcggctcaccggggcagcagggtattgccgatgtggcggaatttatgatgttacagcttctgaaccgcgcatccccgcgttttgctcactttgccgctcaggatgtgctgcatccggagccgttattctgtgaactgcgctcattatgcggcgaactgcatacttttaccgatcagtcacggctggccggacaactgccgaaatataaccaccaggcactgacagagtgctatccgccgctgatgcgggcactgcgcctggcactgagtgtggtactgactccgcgcgccattgcgatccatcttcaggaacaggagcacggcatccgcgtggcgactatccaggatcagcaactgttgcagcaggccgagtttatcgtggcgatccgcgcccagatgccgcaggaacagctgcgccgccagttcactcagcagaccaaagtcacctccatcagccgcatccgcgacctggtcagtgtccagttgccgggcgtgccgctgatcgccctgtctgccgcgccgcgtcagctgccgtatcacgcgggttacacctatttccggctggatcgccagggcaccgcctggcaggaaattcagcagagcggctctgtcgccttccacgttgccggcaacttcccggagctggatattcagttctgggccatccgtaacgggggcgatttatga

SEQ ID NO: 278431 - DNA, 795 bp, Morganella morganii
atgaccgatgatttactgaccggcggcctgcatgatgatgtgtctgatgacgcgcagtacctgcgtcagcggatgcacaagcagtaccggatcccgctgcgcggggaaaatatcaatccgatgattgatgcggccaccccgctgctcggtatggtcatgcggatgcatactctgtccggctcaccgctgccggacaagctttaccagcaggtggtgaccgatattcaggctatcgagcagcagttacagtcccagggctatgagccgggtgcgattgtctccttccgctatgtgctctgtacctttattgatgaaaccgcgctgggtctcggctggaacacagacaacggctgggtgaaaaaatccctgctggtgcatttccataatgaatcctggggcggggagaaagtgttcattcttattgaacgtctgctcggtgaaccgaagcgctatctggatctgattgagtttatctggttgtgcctgtgcctcggttaccggggccgctataaagtgacgcagggccataacgatgaattcaaccgtctgctgcgccgcctgcaaaaacagatccgccagctgcgccccgaacagggctctgttgtgctgtatgaagataccgcctctgacccgcaccgttaccggccgggaaaacgcctgcgcctcaaatatatctttatcgccggtctgttgctggccgccggtatttacggcctgtatctgtcgcagctgaataatcagacacaacatattttggaacaactcactccgctactgagtcagggtatacactga

SEQ ID NO: 278432 - DNA, 2721 bp, Morganella morganii
atgataaatgtcgatctctcaacgctcgttaaccgtcttgatcctgttgcaaaacatgcactggaaaatgccgccgcccgcagtgtcagcgagcagcagccggaaatcaccactgcactgtttttaagcagtctgctggaaaccccgttaaccgatgtgcgggtgatttgccagcgcgccggtattgatcacagtgaactggcggacatgaccgcagaactgatcccgccgcatcaggcactgacccagggctatccggggttttccccgttgctgacagagctgctgaaagacagctggctggtcgcctccgccgaatatcaccacaccacactgcgctccggtattgtgcttctggttctgctgcagatgccgcagcgctatctgccgcagcaggcctgcacactgctcagcaacatcaaccgcgaacagttgaaacagcagtttgatgaatggacggcgggttcggcagaaagccagtccggtgatttcagcagtcagcctgcgggcagcaataccccggcagctgacagcctgctcgcgcgtttcacccagaatatgtcagagctggcacggcagaataagctggacccggttctgtgccgtgataatgaaatcgacctgatgatcgacatcctctgccgccgccgcaaaaataacccggtggttgtcggtgagcccggtgtcgggaaaagcgccctgattgaagggcttgcactgcgtattgaagccggtgaggtgcctgagaaactgcgcggctgtcagctgcatgtgctggatctgggcgcaattcaggccggtgccgccgtcaaaggtgagtttgaaaaacggttcaaagggctgattcaggaaatcatcagctccgccaccccgatcattctgtttattgatgaggctcacaccctgatcggagccggtaaccagcagggcggcactgatgtcgccaacctcctcaagccggttctggcgcggggtgagctctgcactatcgcggccaccacctggagtgaatacaaaaaatattttgagaaagatgcagcactggcacggcgcttccagctggttcaggtcaaagaaccgacagctgcggaagccgtgattatcatgcgcggcctgcggactgcctatgaatccgcccatcaggtctttattgatgacgatgcgctgcgtgcctcggcagagctgagtgaccgctatctgtccggccgtcagttaccggataaagccattgatgtgctggacactgcctgtgcacggaccgcgattaatctgacctcaccgccgaaacagatttccgccctgaaaacacagttacaccagattggcacggaatgtgatgtgctggagcgcgaagctctgctcgggctggtggatcacactgatcgcctggccgcattgtatcagcagtctgaacagttacagcagtcactggatcagttacagactgactggcaggcacagcagacattagtccgcgatatcatccgcttacgggcaaaattgctggacaatgcagcatcatctgacgaaccggcaccggaaaaaaccgcagagacaaacgacacaccggcacagacagataccgcagctgaaccggcagagacagacgacgccgctgagccggaagctgctgaaccggaaagcacagagagtatccgtgaacagttacaggctctgaacgcagaactggaaacccgtcagaaactctcctccctggtgtcgccgcatgtcggcaaaaaacagattgccgaagtgatagccgaatggaccggtgttccgctcaaccgtctgtcacaggatgccctcgcggtggttaccgaattaccggcttaccttgagcaatccatcaaaggccaggatctggcgattgcgcatctgcataaacaccttctgaccgcccgtgccgatctgcggcgccccggccgtccgctgggggctttcctgctggtcggtccgagcggtgtggggaaaaccgaaacggtattacagatagcgcaactgatgttcggcggcacacaatatctcaccaccatcaatatgtccgaattccaggaaaaacacacgatttcccgcctgatcggctccccgccggggtatgtcggctacggcgaaggcggtgtgctgacggaagctatccgccgcaaaccatactccgtagtgttgctggatgaagtggaaaaagcccatccggatgtgctgaatctcttttatcaggcatttgataaaggggaagtggctgacggcgaaggccgtgtgattgactgtaaaaatgtcgcctttttcctgacctcaaacctgggtgacagcacgattttcgcttatgaaaaccggcctgatgaactgccggatgcactgtatccggaactgaccgcgttcttcaaaccagcactgcttgcgaggatggaagtgatcccgttcctgccgctcaatgacgaaacactgacacggatcatccgcttcaaactcggccagcttgaaacacgtctggtacagcgtttcggcgcacaggtcactatcagtgatgccgtttataaggccattattcagcgcgccaaccgggctgagaacggcgcccgtattctggaatcggtgattgacggccatttactgccgccgctgtctctgctgctgctgaaacacaccgcagccggaaaaactatccgccatatcacgctgtcggcgactgatgaggaattcacggctgaggtggatgcggaataa

SEQ ID NO: 278433 - DNA, 798 bp, Morganella morganii
atgagaaaccgactgaaaaatgcgctgtcactgatggactgccagaccaccgaatctctgatatcgcagtttctgccgcactgtttttaccgcagctccctgagcgcactcgctgttgtggtgctcagcccgcgggataaccggctgctcagttactctgtcgattatgcacaaccgcaggtcaccaccggtctgctggatacggacgcttctgatatccgccagccgctggtacaggtgacatttaaccggacaccgctctgctggacaaatctgtcacagggcagctatctcgaggaatgcaccctgaaaacgtttatccgcgggctgccggcgaataccggtatccacggatttccgttctgtgaccacgagggcaaacccgccggggctatctgccgcctcggcaccgggcttatccgcacagaacacgaacggggcatgacggctatctattaccggattttttgtcatcacttctgcacactgacccgccggatgcagatccggatacagaaccagcaactgcggggactgcttcagctggctcaggaaaaggagcgcagactggaagcgatgatgacacagaccatggtgacaccagcaccggtgcagtcatccgaccctgatctgtcggggatcagggatctgactgccgccctcgaccggtatgaatctgacattctgaactaccggatgcaggcggataaccaggacctgaatgaaatcgccgtgaacctgaatatgtccaaacgtgcactggtgtataaattaaaaaaatacggatacatatcatga

SEQ ID NO: 278434 - DNA, 648 bp, Morganella morganii
atgaccaaaaggatccttcagagcgtgaccgccctgctgatactgacaccgctgtggggcacggcacaaccggcttccccgctttccggtgaaatgtcagcactgctggacacctgccgcaaagagccgtctccgctgatacgtctggactgctatgacaacatcggccgcgataaagccgtgccgcagacagagcaggctgcgaaaggcgatatctggcgcagggcggcagccaatgaagagaaacggacagaacatactgtcaccttcatcaccacccagccccgcgaaggcacctggcctgtggtcatgactgctccggctatcggcacacaaccgccccgcccgatcctgatgctcagttgtgtggataacatcacccgaatgcagctggtcatgaacaccccggtgacaacccgcaccatccgtttatccaccccgcagacctcattcagcagcgactggtttatccgcgaaaacggctatgtgctggaatccagccggggtctggccgggatcgatgaaatcaaacgcattatgaccggcgataaactgactatcacaccggaaaacggggaaccggtgacttttgatctgtctcagctgacagaaagtatcaaacctttacgtgcggcctgccgctggtga

SEQ ID NO: 278435 - DNA, 1458 bp, Morganella morganii
atgatagcgacacgttttaactggtctgaacaactgctcgccccgcttgaccccgggcagataagcagtgctgtcagtgacagtaacccggactgggaatatatcgacagcgaaatggttaaattcggctccctgactcacgcctcactggatattgaggctattcagtcgcggatcctgacactgctctccgccaccacaaaagatttccgcctcgtggtgcatctgctgcgaaccctgcagcatgccggaaatgcagaggaagtcgcgctcggcgcacaactgttttctctgttctgccgtcagttctggcacaactgttatcctgaaaatatcaggctcaaagtccgcctgacacaacaggttttacagcgctttgagctggcacaggataatttcacccgtcaggccaccaccgcacagcgcgatgatgtcctcggggactttgccggactggcacagttctggagtgaagaccatcaggcactgtcacaaaaactggatgacctgagccggggttaccgccgcattgaaaacagcacgccggatgatatcactgcctccgcacatccggcggcggatacagcaaaaaccgggccgtctgccgatccggcaccgcgtgctctgcctgccgcagatacagaaacagacacggactttccggctgcagacattgacagcggcaatgaccgcacccgcaaaacagccctgctgaatgccgcagatgccctttgccgccgcgcacctgaaaatgccatcggctatcagctgcgccgttatgccatctggcacaccattcagtcagtaccgtccgccgatgccgccggtaaaaccccgctggcggctgtttccgctgaccgggttaccgattaccgcaaacagctgacacaggctgacccggtattactggctgatattgaacagagtctcagcctcgccccttactggctggacggccattatctggccgcacaggccgcacaacagctggggctggatgcggttgcacaggctatccgccgctgtgcatcggaatttaccgcccgcctgccgcaactgaccacactcagtttttccgataaaacgccgttcgccgatgctgacaccctcgcctggctgaacaccacagacgccgccgccaccggtatcagtaccggcggtatacaggccgatacggatgagataacccgctgctgccgggaaaacggtctggatgcggcactgcaaaaaattgatgacgccataaaccgggctgaacagctgcgtgatcgcgtctgcctgcaacttctggccgcctctctgtttgaacagtccggcatgacggggctcgctcaggctcagtatcagcaactatatgacatcgtatcacgcagcacagtaacgcagtgggaacccgctttactgcaacagcttaccggaaagcttccggagtccgatttcagaaggaataacgtttaa

SEQ ID NO: 278436 - DNA, 3549 bp, Morganella morganii
atgaaaaaaccatccttatcatccgtgaatgcacagggtctgatcagaaaatggtttaaagccgataaacccagactcaaatcggcatgggctgtttttctggccatcattccggcgctgatccttatctggatttggatctggggtgcggatttccgcttccgtgatgactatccgctgcgtccggtcagtgcccgctggctggcgacgctcgggttattcctgattgttatcagttgggtcggatataccgcccggcggcgtgtccgcgagctggaaaaactgaaactggatgttgagctggctgtggcagacccggtccgcaaagatattgaatttcagaaccgctatctcagccgctggctcagtgaactgcgccgccatctcggtgacagcggtcattctctctatcagcgcccgtggtatctggtgctcggggcagagaacagcggcaaacatactctgttttccgccaatctcggcctgctggatctggtaccgcaggaccggatcatctcagaagacggtatcggcctgcatgtccgctgctcactgaccgataaagcggtgctgctgatgccgcgcgggcatctgatcacgcagccgcacgaagacagtgaaaaaccgcagctgtaccaccgtctgtggaacagcctgcttgagcgcatggtgacagaacgcacccgccagccgctgaacggtattattctgaccatcgacaccgcccggctgatgaccgaagacaaagaagcgggcagccgttattttaccgatattcatatgcgcctgcaggatatccgtcttgcttttaacacccgtccgccggtgtatattgtgctgaccaaactggatctgttacagggattcagtgccatgttccagtcactggatgtgacagagcaggaatccgttctcggtgtgacctttacccgcgacaaccagcacagttgggtcagtgaactcaccactttctgggagaaatggatccgtcagctcaatgccgcgctgccggaaatgatgctgaaccgggtggatgacagccagcgcagtgaactgttcagctttatccgccagatggtcggactgcagaataaagtgaccgagctgacagaacagctcatcggcagtaatgatgacgacattccgctgatccgcggtatctacctgacgtcctccgcccagcgcggccagatcgacgatattttcacccagagtgccgccgtgcagtacaatctgccgcccgcgccgacacatacctggccggtcagcgaaaaccagacctggtttaccggtcagctggtccgcgatgtgttattttcagagccgaacctggcggcggaaaaccgtttctggctgcgccgtcatcaccacaaagtctttttttcctcggttgccacagcggcggggatcatcgccctctggaccggctggcaccattactatgaccagaactaccaggccggtaaaaacgtgctttccgaagtcagtgcattcagcagtgtgacagcggataaccagcaggacaccaccggcgtccgccagttgcctatcctcaacccgctgtcggaagcgacactggcttacggcaactaccgtgagaaaaacggccttctgaccgacctcggtctctatcagggcaaaaaaatcggcccgtatgtggaaaaaagctatctccagttactaatcgaacgttttctgcctgccattatggccggattgcagcaggatctggcacaggcaccggaaaacagtgaggaaaaactcgctattctgcgtgtcatgcgcatgctggaagacaaaagcggccgtaatgatgcgattgtcaaaaattacctgcgcaagcgctggagccgtgaattcaccgggcaaaacgaaattcagtcacagctgatggcacacctcgattatgccctcgagcatactgactgggcggcagaccgcaatcgcggggaaatggtcgctaatcaggcctttaagccgttcgcgccggttatccgtgacgcccagaaagagctgagccagctctcactctatcagcgggtgtaccagacactgcgcctgaaaggctttaatgagctgtcatcgccgctggatctgcgccatatgatcgggccgggcttcagccacgttttcgtctcactggatgatgaaaaactggaagtgccgcagttcctgacccgcaacggcctgctcaattactttatccggcagaatgaggaactggtggatctgaccgcgctggatgcctgggtactgaacctgtcacaaaacgtccgttacagcgaaagtgaccgccaggaaattcagcatcagatcagcgaacagtatctcggtgattatgccgcgaactggcaggcggccatgagtaacctggaaatccgtgagtttgaaactattcaggatgaaatcaatgcgctggagcagatcatcagcggtgagcaaccgttacgccgtgccctgcagattctgcgggataacaccagcctgccggccgtggacagcaatctgacggagaaagaaaagcaggcctttatggcgcagagccagtaccgtttactcagccgcatcaaccgggaattctcaccacagacagaaattctggtcagtaataacggcgagaacctgcaaaacgtcaaccagaaactgaatgaactgcaccgttacctgctcagtatcgaaaatgcgccggtgccgggcaaagccgctctgaaagctgttttcctgcggctggaagaaaataaccgcgatgccatttttgaagtcagccagatggcgaaaaccatgccggaaccgctgggccgctggattggcgaactggccgatcaggcgtggatcgtggtacagaaagaggctatccgctatctcgaagtggaatggaatgaatcagtggtcaaacagtacaacagctatatcgcaggccgttatccgtttgatccgaaatcaaaccgtgatgtgccgctgagtgagtttgaacgcttcttcaaaccgggcggaacgctggatgccttctggcagcagaatctgcggccgtttgctgaaaacaacctgctggtcaatgaggatggtcagtcgctgatccgtccggatgtgctggagcagattgaaaccgccaaccgcatccgcaacaccttctttacgccgcagggcaacctcgaagcccagtttgccattgagccggtacaattatccggcagcaaacggcgcagcgtgctgaacctcgacgggcagatcctcgactatgcacacgggcgcagtaataccgctcatatgatctggcctaactccatgcgctccggcggggaaagcaagctgacgctggtttccggtaccaccggcaaatcaccgcgcgcaattgtccgtaacggtccgtgggcacagatccggcttattcagtccggaaaactgaccaatgtgaacaccaacagttttgatgtccgctttgcggtggatgacggggaaatgacttaccgcatctatattgatgagtcggataatccgttctccggcaatctgttctcccgtttcagcctgcctgaaacactgtattaa

SEQ ID NO: 278437 - DNA, 1356 bp, Morganella morganii
atgacggggctgaatatggacggcattattatccggacaggcacttctccgctggatttaccggagttcgcggaaatccgggaagagatcaacaaactcagccacccgtcacagccggaagtcagctggtcgcgggtggaagcaaaatccctggctctgttccggaaaaacggcgtggatttgcagacggcggtctactacaccctcgcccgcctgcaccgcaacggcctggccgggctgacggaaggcagcgaactgattgccatgatggtggttcatgactgggatgcagtgtggccgccgcaaatcaatcaccgcattgatattcttaactggtttatcacgcgggcaatggccgcagtgcggcgtcttaccttcagccgtgatgacctgcgcctgctctaccgggcagagcgggcgttacagctgatcaccgaacggctgacacagacaccgtccggtaaaacgccggtcacggacaacctgcaattttacttccgcaatgccgccaaagagattgaacaaccgtctccggcggcggatcatgaactgccggcggtcactgtcgccccgctggtctatatcgcggaagaaagcccggccgtttccggaaccgatgcggtttctgccggggtcgcggggcacagcaccgtccgcattgtgcaggtcgcggcagaaactccgccggtaccgcgcaaaacattcccgtttgccgggtttgcggccggtctgatcaccggactgattatcaccgccgtgttgttcttcacggtctataaaccagtgaaagatgagctggataccttctccgcgcaacccggcagtgcgccggtgctgtggtttgccaacccgcagcttgccacctacggacagtttctggccgatgcggaacagcagtccccgatcgccccgctgcttctgacagagaaaatgactgacattgcccgccagcgctggccgaatgatccggatcaggcctatgccacccgccactggcaggatgtattacagacccggattgccgatgtggcacaaacggacagctggtatctcaccaatgaacggttgcaggcactgtccgacaccattgtcgcgagagaaaaagatcgtggcagctttaccctgtcctatctgaaaactgaaatctacagcattcagcaggctcactcaaaaaccgtcccggcagaagaatatctgcgtgcgttgtctgacgatatccgcaacggtaaaccggtatcagcggcacagctgcaccggattgatcagcagcttaacggcctgaccgcactctatgcggacttacagaaacaggcggaacaggcaggtctgaaacccggcagcggcaaacaggaataa

SEQ ID NO: 278438 - DNA, 480 bp, Morganella morganii
atggcgaacatgatctatttaagtgttaacggcaaccagcagggcactatttcacagggttgctgcagtcttgattccatcggcaataaatatcagctgggccatgagaatgaaatatttgtactccatctgaataatatgtttaaccgcgcccagaacctggcattcagcccggtgaattttgtcaaactgctggataaatccacgccgttactggcgaatgcgattgccaataatgaagtgatggagatggtattcagcttttaccggacatcccagaacggttcacaggaaaaatacttcagtgtcacactgcgccaggcatccattgtcagcattaacagcaattatccgcactctgcggataataatgacgcacagccggaagaaaccatcagtgtgaaatacaaagatattattttccagcatgttatggcaggaacatccggctattgctgctgggaagagagcacatgttaa

SEQ ID NO: 278439 - DNA, 480 bp, Morganella morganii
ttgtcatatataacatacttaaaactaacaggttcaaggcaaggactgatctctgcaaagtgttcaacctcagaatccattggaaacagatttcaaactggccatgaagacgaaattcaagtgttaacattgaatcataacatatcacgtagtcaaaacttatcccaccatcctgttcaatttataaagccaatcgatatgtcatcacccctccttggtgtttcaatatcatcaaatgaacaacttgaagctatttttacttgttacagaacaaaccaaaatgggcggcttgaactatattacaaattgaaactaactaaggccagcatcgtagatatatcttccacatatactaatgtaacaaactccaatggtataattccacatgagaaaatattattaaactacgaatcaattagttgggaacacattacagccggaacaagtggttactccataatggaaaataatattttttga

SEQ ID NO: 278440 - DNA, 729 bp, Morganella morganii
atgaattatattcaggaagcattgaagaaaaaaatagaatcagataggcagttagctatatatgttgataactcaatggctgcagttagcgaagctgcatatgatactactgaacttgtagggcttggttttgatcgcacagttaagcatttatcatatttttttagtggctatgaagatgtaaattcgaatacatgggaagagaataaacgttttttcaattcgattgatttttttcttaaaaatagagatccaattcttgagatgatagatatatatatccaaaaatcagttgataagttagatggtgcagggttggccgaggtcatggatatgctctataactcacttaaaaccccagttgcaatagctagtaaatatacagtaaaaacagtcaccagggaggttatatcagcatctatttcagaaacaatatatataacaataatgagaaatgaagttgcacgaaagatatctaagggagcatcaagctctatatttatgatgttaggtggttatggtatcatcgaaaaggcatcgatatcaaaagaacaattaaagatacagaatccatcatattattggactttgtattttcatgaaatagaaatgttgtattttttaattgaaccatttatatcagggcatctgtatttcattggcaatgataagtttactccttttgagataggtaaaggattcaatgagattattagtaaggctcgttga

SEQ ID NO: 278441 - DNA, 249 bp, Morganella morganii
atggctattaacaaaaaacaatcctcaccgaagctcgcctctcaagctgcgaaagctctacaaaacgaaaactcctctgaaattaagaaaaagcttgctgcttctgtaattgcccaagcccgtacaagtaagcaaactggtgcagaaatggagacgattgcttctgatgttatgaaaagttcaaagtacagcgaggaaactaaaagctatgctgcctcactgttgtctcaatcgaataaatctcgataa

SEQ ID NO: 278442 - DNA, 165 bp, Morganella morganii
atgggtaaacagattttcaggtgtttttttgttttagctataatctcagtcataacatttggtgtgatcaattttgatagaagaatggagagcagcaaaagcgatatggtaaaaaaaacgcagcaaattgttgccatcaccaatgatgcaaagagtacctattga

SEQ ID NO: 278443 - DNA, 660 bp, Morganella morganii
gtgatttcagtattggtggcaaattcgaatgaattttaccgtgcagggattggtgccattatcacggcaacaccgggtatgaaaatggcgggggaggtcagggacagcaccggtgcagtgcgctggtgccgtgataatcatgcggatgtggcattgcttgatatcggttttccggtgatgagcggcctggaagctgcaaaaaaaatcacccgctatacctcagaaaccaaagtgattatcctgacagatgaacacagcctgatctcaccgtataaagtgatgaacagcggtgcggcggggtatttgtatcagagcagtgaccgtgaggatttactgcacgccatccggattatcagccggggccagcgctatgtggcaccggatatcgcccagcagaccattcttgacacccgcctgcatgcacatgacagcaatccgctggataaactgagtcaccaggagcgccaggtgatggttatgatagcgcagggcatcaaagtcacacaaattgccgacaaaatgtgtctcagcagcaagacggtgaacagttatagatatagaatatttaataagctgaatattaatggtgatattaaactcacccatctggcactgcgctacggactgatccatattgacagcgtggtgccggatgaatga

SEQ ID NO: 278444 - DNA, 1023 bp, Morganella morganii
atgggtaggaaaaggaaaaaccctgctgataactggatgccaaagcgggttaaacggggcaggtctgcttttgaatttattactccggataacaaaacaatccggctttgtgatttttcatgtactcaggctgaggtatgggtagcatacgaaaaactgatagacgatcagaaaaatgaggcaacattgacagcattgtttaactcatttttcatttccgccgactttactaacctgtcaccggaaacacagaaagattatcgtaaatattccggcaagctattacctgtattcgggaaaatgcagcctgataatataaagcctgagcatatccgtaaatatatggataagcgcggcactaaaagcccgacacaggcaaacagggaaaaaacgctgctatcccgtgtttttggctggggttatgagcgcggactggtaaaaagcaatccatgtaaaggtgtgcggcaattcaaggagcaagccagggatcgctatattacagatgatgaatataatgcgctctattccgtatcccctgtagttgtcaggatagcaatggaaatagcgtatctctgcgcagcccggcaagctgatgttttggcattaacttattcgcaattaacagaggatggtatttacattaagcaaggaaaaacaggtgtagcacaaataaaggcatggacggagcgcctgcatgcagctataaacctgagtaatactctcccccttgattctggtatcagcagtatttatgtacttcatcaatccagaggatccgggtatacacgggatggtttcaacagtcgctggagaaaagccaaagaagctgcagctaaaaaattcccgcacctgaattttaacttcacctttcatgatttgaaggctaaaggtatttcagatctcgatggaccactgtcagaaaaacagaaaatatctgggcataaaaatatcactcaaaccgcccgatatgacagaaaagtgatggttgttcctgttgtcggtggtcagaaaaagacagtttga

SEQ ID NO: 278445 - DNA, 177 bp, Morganella morganii
atgaaaaacgagagtgacgtaattaccccggacgaaatgatagaactgaccggctatcaattcccgtcaaaacagtgcgaagccctggagcgtgccggtatcttttttataaagcggccggatggatacccgaaaacgacctgggcgcattttaatagcccgctggctaaacggtag

SEQ ID NO: 278446 - DNA, 189 bp, Morganella morganii
atgatatacggattgttcatgctgatttgctctgccaccagctgcgagtaccagccctacggctacgtttatccggatgaaaaaaactgcctgatggataaagaaacactgaccgtgaaggggattttgtcagagtgctatctgatcgatgaaattatttcggccgattttgctcagacaaaaagttga

SEQ ID NO: 278447 - DNA, 168 bp, Morganella morganii
atgctaaaacaccaacactacaaagaccgaccggtaaagctcacgttccctgacggtagtcacggctacatccatacagaccgtcggtgtgatgtgtattacgacctgcctccgcaggtgaaaattgaggcccgtaacgaaccgcagcagaaggatgaaagcaaatga

SEQ ID NO: 278448 - DNA, 498 bp, Morganella morganii
atgagtacaaccgcaatcgcattagccgcagactatgaaaagctgcaacgactggtagagactggtgaattcaccccggaagatatagccgacacactggaaggtatcgaaggcgcgctcggcgataaactggacgcgattatgatccacgtccgtaaccttgaagggcaggcaaatacgctgggtgaagaagccaaacgcctggcggatcgtgaaaagtcatttaagcgtcaggccaaagacctgaaaaaatatgcactaacctgcttactggcatccggccaggacaagctgaaaacagtgaaaaacacatttaccgcggcaaaaggtcgggcatcagtagtcattgacgatgaatcacttatccctgattcactcgttgatgtacaaaccatcgtgtcaccggataaaaaagccatcaaagaagcgctggaaaatggtattgaagtccctggcgcccgaattgaaattggtgaacgttcactgatggtccggtaa

SEQ ID NO: 278449 - DNA, 2001 bp, Morganella morganii
atgaccaattatatctgtgcatttaatcccatagatgcggcacttaaagacggtgctgtaactgtagcaatcactatttccgccaattcagaaaagatggccagagcaatggcagcggtgatgctggaagaaacttacccggaaaatacgggaaaatttgatgtggcggcagcaatagtctgcgaagctcaggcaggcaaaccagcaccggccggtgatagttttgatgaacattttgccaaagagtacgagttcaacggcaccgactggcagaagcgtgaagaaaaaatggtcgtatttgcaaaaacagcacctgttgtgcgtattgccgccatcctgttgtacgggaaaacgcaatttacccgtagcgagtacctcaaagctgtcgattttgttcatatcggtgacgaatacccgctgctccggaatatagccaaaggtgtcgcggccacgcccggggtatccctgcttaacgagcaggaactggaagcgctggtgaattttgtcatgcaacaggcaccggacagcatcaccgaaaaagaggcacagaagctggcagaaaaatacttataccctgctgctgaaccagccacagggcagctcccgatcacagaacacaagcaacgcgattttgaccacaactatgcaacactggatcaggaaatagctctcgcccttcttcccggtgatttttcaccgtgggaaatacagccaagcaaactcaccgctgcgaaaaaactgatcagtgatgaagatgacagctggcggcgctggtctactgagttccgtataatcccgaccgcattgcagatcccgcgtgaaacagtctttgctgtcgtacgtgaaggaaaagaattacctgacctgataagcgatgcggtagcccgtaaacagtttgtggctgaccgtattggcataacgccggcagaaagcagtcatgaccaggaaacaggccggtccggtccggatattacggaagataaaccccccgtagcagcaaagcaggaaaagaccaagcgcacacgtactaaaaaagcagataaacaggcagagaaaccagctccggaagtagcagccaacgatgaagcgaccaccacggcgcagacaccagaaccggttcatgccgaggaacccgctactgatgacttccgcagccgcgccgaggtgattgccgaggttctggcagacacggacaatctgagtatctggaagcaggtacagcgcacagatccacgctttaccaagcctttagagggcgcgggatttcagggtaccagcattaacagtaactacatgtttatgcgtgctaccgaaattttcggaccgatcggtgagggctggggctatgaggtggtagaagaaaaattcctggacggcaaaccgctgactgaacctgttctggaaaacaacaaacaggttgctctgcgttacctgcgtgacgcagacggttctctgttctgcgaacaaaatcattcaataaaaatccagttttggtaccgcagcaaagatggcaagtgctgttattttgaaagctacggcgcgacaccataccgctatcagacccaatacggcataaaagttgatagtgaagtcatcaaaaagtcactgacagacgcgattaaaaaagcgctgtcaatgctcggattctcttctgatgtgtttatgggtatgcacgataaccctgaatacctcatcaaaaataagctggaatttgaaatcaaagcggccagcgagaacgcagaggacagcgtccggatccgcgaagaactggatgaaaaattcacccgtaacacggaaaccatgcgtaccgcagttacacagaacgaattacgcggtatcgcatccacccttacccgcgaaatatccgcacatcttaacagcgccaaatcgcgcggtgacaacgaatatgcaggatacctgtccggccgcctgcgccgcctgacagaaattgagaaagagtgtttaaccaaactgactgaaaaacaagaggcagaccaatga

SEQ ID NO: 278450 - DNA, 333 bp, Morganella morganii
atgaaagcacaacctaaccccctcaaagtcacgctttacgtccatgcacaaaagcggtttgacggaagtatcgcgtattcagtatacacccacaaattcaaagcaactgacggcatgggcttccctgttgccgaacaccagcttgaattacctgtcccctcagtcagcaaatttgatttagttcaggccgaaattgacagtttacgtgcagaacaaaacaagatccttgctgatgcaaccgccaaaaccagattactggaagaccagatacaggcgctgctatgcctggagggcaaagtaatttccaaagacgacgaagcattaccttactga

SEQ ID NO: 278451 - DNA, 219 bp, Morganella morganii
atggataataaaaatctggaacagcaattagatgcgcagcatattttgttaaaagctatttttaatgtgttaacctcagaacaaagggaagaagttaaacatcaaattagccatttaagtcaggctgcaaggtaccctcacttactgacatctttccaatcagaaacagcaattgaagacgcagaaaaagccgctttggatttacttcgccttatgtga

SEQ ID NO: 278452 - DNA, 315 bp, Morganella morganii
atgaaagaaaccgatagcaccaaaagcagagagcaggaaataaaggattacgttggctttgtaatgagtgacgttaacatcctatccacgagcatgatccctaaaatgattgaggcgggatctagccttaatgatatcaaagaaaaagtggacatactggcggaagcgtatatctacacgcgattaaaggtactgcatgaagggcgtaaattaattgaagatatcaacaaatatgacgccgccatgaatgcagaaatgacggccctgattaaatcgaatgcccgtaactacgaattgggagacagcttcacataa

SEQ ID NO: 278453 - DNA, 366 bp, Morganella morganii
atggagacgatcagatcgattgaatacacctccgatgaagctttacgcctgtttggacaccggccaagtgaaaacataaaaatgatcactgttgccggtgatagtatgcaaggtacaattaatcctggtgaccaagtttttattgatgtccacataaattactttgatggcgatggtgtatatgtttttgtctacggacaaacattacatatcaaacggttacagatgattaaagatcagcttacagttatttccgataataataattatcgtgactggcaaatcacgaaagaagacgaagataaatttttcattgccggaaaagtgctgattagtcagtccaaagtttacaagcgctacgcctaa

SEQ ID NO: 278454 - DNA, 246 bp, Morganella morganii
atgacaccaaatcttaaaagcaaaattgtcacactggccaaccagtcagaaattgcccgcaggttgggaataaaaccacaaacggtaaatctgtggtttaaaaacggagtgccggcacaaaaagttttaagtctgtgtgagtgcctcagctggaaaataactccccatgaggtagcgccagaaatttatccgaacattgctgatggcttacccgaccgtggtgaattatctcagctagccagttaa

SEQ ID NO: 278455 - DNA, 453 bp, Morganella morganii
atgatgaataacaaccaaataattaaggatgagattgaattatgggcggcagagaagggacaggagcatgtcgcaatcgaaattagcagggcgcattttttaatactgtgtggtgataaaccgtcacgcctgtacccgatagaagacggggccggtaacgcagattggaaagcgattaataacaacaggcagcaaattttccgttggttgcgcggtaattctccggcagcagacagaaagttcagtgagctgatcccggcaatcaaaattgcattacctgctgaccggttggcgcgggttaacggggatgagtcagttaattacctggcttccctggcaatcaaagaatttgccgcggcaatcagcgaaacacttttaggcagtcgtgacatgtcacagtacatatcaaaagcagtaaccgcattaaatgcgatgcgcatgaccagcgtatga

SEQ ID NO: 278456 - DNA, 225 bp, Morganella morganii
atgctgaatacaactgaaaaaatcacctaccgcaatgggtttatgcataacggcattcccgcagatatcgaaaccatacgcccaatttttgacgggcgccgggcggctgccctcagtgtgtgggaacagtacgaacgggccaaagcacggctgcgtatgcacaacctgacacctgagcagtaccagaacgcctgccgtgatatcgctgacgcgctgggggtgtga

SEQ ID NO: 278457 - DNA, 783 bp, Morganella morganii
atgattatggttcgcctggctgatttctccagtgatgaagggatcagctatccgagcgtagaaacactgtcccggcagattggggcaggagtcagcactatccgcgatgcatgcagtgagcttgaaaaggatggctggctgaggaaaaaacaacgccggaacggtaaccgcaacgcatcgaatttatattttctcaatgtcgataagttggaaactatcgcgttacaggaaatcgcaaagctgaaaaaacagcgtgaaaataacgcaatttctcaccctccagtttctgacggttcagaatccgaccggtcagaaaacagtaattccgggcgttttgaccctccggattctggcgttaaagggggttttcaccctccagaatctggaggcgatccatcagtaaattcaaaacatgatccatcagtaaattcaaaagaggatccgaagcctgcgacgcagaaaaaatccacggtgaaatttgacccgttgtcagtccgtccggaaaacgtcagtgaacttgtctggcaggattgggtgaagttccggaaggagattaaaaaaccactgacggaaaccagctgcaggcagattggcaaaaagctggccgggcatccggatcctgattctgtgctgtgtgactcgattgccaacggctggcagggaatattcccggaacgcaccacagcgcggaaaccggctaagccgagcacacacttcggattcagcgataaaaactacgagagccgctcagcggcatgggtgaacgggggcaagcatgtctga

SEQ ID NO: 278458 - DNA, 573 bp, Morganella morganii
atgtctgacgaactgaacgtgaacattccaccgcgctttgctgcagcgacatttgagacgtatcacccggcgaatccggatgcggaaagcaatctgaaaatctgccgcgagtatgccgatacatggctatcccgaaaaaccgccggagagggacttattttgtgcggaacaccaggaaccgggaaaacacacctcgcagtatcaatcgcccgtcaggttgccactgaggcgaaggaatcggtatttatcaccacagcggcgcgtatcatccgggcttttcgccgtacatgggctggcgatgcagaatacagcgagctcgacgtattggaaaaatactgcgagctgggtctgctaattatcgacgaaatcggggtgcagtacggaactgactcagagcgcaatattttgtttgaagtgattaacgaccggtacgagtacatgctgccgactatcatgatcagcaacctgccgctgaacgaactggccccgctgctgggtgaacgcgttgttgaccgcatgctggaaggtggggcagtgctgtcgttcaactggccaagctaccggagtaattga

SEQ ID NO: 278459 - DNA, 1371 bp, Morganella morganii
atgttcagtgagcaggaattagaagccgctgtcattggtggtttactggccggtggtgccactcaggatgcctatgacgttctggcaacactacctgatgatgctttcagtgtcgggtacttttccagggtgtaccgggaaataaaaaaacaggcactgacgagtgcaattatcgatccggtatttatcgcggacgctctcgggggaaatggtgattttgctcatatcatggagctcaccagaaaaaccatctcatacgcaaacctgaaagggtatgccgaaaaagtcaggaactatgcggctgttcgtaaaattacagcgctgataaataaatttcagaaagaaattactgatgcggccactcatgaccaggccgaaagcgtaattcagaagttcagcagcgagttcaccctgatcaccagcgagaaagaaagcctggtaccggttcacctcaacgaactgattgacggctatgttgatgtgctggagaagcggaaccgtggcgagggcagcggcatgatgatccggaccggtatcgaagcactggacgataaaatcggtggttttaaccctacggacctgatttttatcggcggccggccgggcatgggtaaaactgaactggcactcacgatgatggaaaaaatgacaaccgccggtgactctgtgctgatgttctccatggaaatggcgaacatgcagatcgccgagcgcatgattgccggggctgcgcagctgccggtttccaaaatgcgcaactgtgatttggacgacgagggctgggcgcggatcagttcagcaatcgcacatctgattgaccgggacattcacattatcgatgccagtaatctgaccattgatcagatatgcgccatcagtgaacggcataaacgcaaatatccggccacaaaaggtatttttatcgactacctcgggctgattaaaaagcctaaagcagagcgtaacgacctggcgattgccgcgatatcggctggtatgaaaggcttggctaaacggattcacacaccggttgtggctctgagtcagttatcccgcgacgtggataaacgaccactgaaccagcgccgcccggtggctgcggatctgcgtgattccggcagcctggaacaggatgccgattatatttttctcacctaccgggacgcggtttataacccgaacagtccggcaaaaaattatgcggagatcatcatcgagaagaaccggcacggagaaaccggcactgtgtatcaggaatttaaaaacggccactatctgccaaccgaccagatttcagcagcagaagtaagccgtatgcagcaacaggcggaggctcctaaaagacgccgctacgccgacaaagcattttaa

SEQ ID NO: 278460 - DNA, 1872 bp, Morganella morganii
atggcctatattacgccgtcaacattaagcttaaagatttgttttcaaagtaaatattcactcccttattttcagcgggattacaaatgggagagccgtcattttcttgaaatgttaaatgatatacaaaatgcctttctattagcatatgaaccaagccatggacgtagtaatgtttctgattatctgccgtatttccttggttccataattacatcaaccgaaactaacggaaaaaaacctttaattgatggccaacagcgtataacatcaatatttatccttcttatttttcttgaaagatatatcaaagataacaatatttccaatacattaaaacttgaaaattttattggtagtgtttcatatggagaacgtgattttaatattgaattttctgatgaaagaaaatcaatctttgaaaaatacacaaattcagataaaaacttaaatgatgcaatagaagatgtcgaaaatattgaaggcatgagtgatagtgatcgaagaataatcgatgcgattaaatcaattgaagatgctttagatccaactattaaagaaaaaatatctttttttattgattacctcatggaaaaggtatatttgatcgatatatcagtttcaagtgaatctgaagcacatagagttttcgtaactatgaatgaccgtggcttgagattaggtgcaatagaattacttaaaggatatatactctccagaattaccagctcagaagatagccaagaatgccatgaagaatgggttaaaacaatgtcattattgcgtaataaagatcctgaaggagattctctctttataagaactttactccgtgcaaaatgggctaattcaataagagggaaaagtaaaggtgatgaccctggtgatttcgataaaattaatgatgcctatcatcgctggtttgatgataatacaactaagctaaatcttaataactctgatgatttttataactttgctaaaaaagatattcctaagtatgctgatctatacctacaaattattaatgcagaggaaatttttaatgccgagtatcctgatgtatactataacggcattagaaaattcagcttccaatcaatgataattttatctgcccttcagttatcagatacccgcgaaattattcggaagaaaattcaactaatatcaaaattcatagacctaatattaacaagcagaataataacaaagaaagccaatacttatgacaatttaaaagatatctcctttaatttagcaaaagatgtcagaggaaaagaatatcctgacctgctagcttatataaaaaatgagtgggtaaaatattacccagcaatagataaactaacagaaatgacctatgagaataagactcgctctgaaatgctttatatcttatcacgaattgcatcctacatggaaaacaaaataaacttaactaacaaggtgggttttgatgtttatatgcaacgtgataaaggaatgaaaacttttgatatagaacatatcttacgcagtgtactaaatgatacagaagaaacatcatcatcattaggatttacaaatgatgctgaatataatttgcggcgtaatttaattggagcactaatcctactcccccgctcacgcaacagatccttaaaagataatatatatactgaaaaacgaacagcttatagtggtgaaaatatcctatgtcaatcattatgtgcaaatttttatcagaacaatccagagctcgacagattcctagcagaaaatccgaatatacaactacaggaacactcgcaatttacatcaagttcaattactgagcgaggagatttttataaggctattgcactagatatttggtcttgtccttcatga

SEQ ID NO: 278461 - DNA, 594 bp, Morganella morganii
atggcacagcatagctttatcaaactctctaacgatactctcgcgccagcaaacccggcggcgagggtttatctgcgttcaaaaatcaagtgcggtgatgtgctgtcagcagacttcaaaaaggcacgtaacccacgattccaccgtaaatatttcgcactcctgaacctcggttatgaatattgggaaccggtcggcggcaccatttcgccggaagaaaaagaattggttcgcgggtatgtgaaattcctctcgtattacacggacaatgacgatgctctgcagtcagcggctgacgtctatcttgatgatgtggcacaaaagcgcgcgcagaatattaccgcgacaaaatcctttgacgctttccgctcctgggctatcgaacaggccggccagtacgacacctacgaaatgcctgacggcagcctgcgccgcgtcgccaaatcaatcagctttgccaaaatggatgacctgcaatttggcgaactctataaatccacgctcgatgtgctgtggaacttcattctgtaccgcaatttttccacgcagcaggccgctgagaacgcggcagcacagttattagattttacctga

SEQ ID NO: 278462 - DNA, 312 bp, Morganella morganii
atgaccaaatcaaagaccaaagcagaacagcaatggctgtcggatgtggccgaactcggttgtatctgctgccgtaatatggggtacggggcatcccgtgcggaactgcatcatgtgcgcaacgggcagggcatgggacaaagggcggatcattattccgtactccctttatgtccgcagcaccaccgggcatgctacgaaacgggattccatgcagccccagcaacatggcagcagctccacggcagcgaacgtgaattgctggagcaggtaaaacaggaagtcagggagctgcgagcatgcggggtataa

SEQ ID NO: 278463 - DNA, 534 bp, Morganella morganii
atgcggggtataatgagtatttcagatggtttgcagctggatgaagaacgcgaggcttggttacagaattggctggcaaggttcggggcgtgggtgtacagcggtcggctggtgaaacggcagagcagcatgatagccgaatttatggctacagctgaacgccgcagctacccggacagaccgacctgcagtgatgaggatggactgctgatacaaggggtggttgatctcctttatcatctggaccgtgaggcatttaaaatgctgttggcccggtatgtattctgtgcctcggatcgtgaaattgcacggcagcatcataaggcctgtgcaccacgcgtcatggtgcgtagaaacggtatgttacgttcccgcaaaccgtcgttatctacatgccgtcgggaggtggatgaaatactaaaagcggctgagtatttattataccaaccgctggtagatgcatttaaaagcagggaaaaagaaaagatcatgaagcgaaataacaaaaacgtgttgacttctttgaatcaatga

SEQ ID NO: 278464 - DNA, 141 bp, Morganella morganii
atgatggaacacatcataaaagccggcagccacgaaggcgatatggttgctgatttttttatgggttcaggggcgacattgaaagccgctctgaagcacaatcgtcgcgttctgggcggagatggaagcggaacggtttga

SEQ ID NO: 278465 - DNA, 996 bp, Morganella morganii
atgaattttttacctacatctggttatatgaataatacttttgataaaaaaattcctgtaggtattagtgcttgcttattgggtgatagtgttagatttgatggtggacataggcgctttcactttgcagttgatgagttatcagattatttcgaataccaatctgcatgccctgagatggctattggtttgcctgcacccagacctgcattgaggttggttaagtctgaagaaaaaaacgttatactcaaattcagtgatggacgagaaggtgatttaactcaaaaaatggtggatttctctactgaatatctgagtaaaactattaatttatccggttatattgtttgtaaaaactcacctagttgtggtttggaaagagttcgggtatatgattctgtaggtaatggtaataaaaagtctgggatcggcctttttactgagcaattagtaaaagcgatgccgtggttgccggttgaggaagatggcaggttaagtgacccgcatattcgggaaaattttattatacgagtatttgctcttcatgaactgaatgaactaaagcaaaaatcattaaatcgtcgctcattaatggattttcatgctcgatacaaactccttttacttgcacactctcagcctctttatagagaattaggtcgtctcgttgctaataacaaagaatggaattcaatagaatcgttttttatagagtatcgaaataaattcatgaaactattgcaaaatcaagcaacacgacgcaatcacactaatgtgcttatgcatatccaaggttattttaaacgctatttaacatcaaaccaaagacaggcattaagtaaattaattttagaatatcgccagggaatacagcctttattggcgccattgacattaataacgcactatttatctgagtaccctgataactatctgaatcaacaaaggtattttaatccttaccctcaatcattaagattgcgttatgggttatga

SEQ ID NO: 278466 - DNA, 192 bp, Morganella morganii
atgcgcatgtctgacaaatattccagccctacagcgtacgcctggggacttataacctctgcttttggcgttttatccctggatcagtgggctattgttgccgggatcatctgtactgtcggaacgttcctggtgaactggtattacaaacggaaggagttccagctgaaagccggagaacatcatgaataa

SEQ ID NO: 278467 - DNA, 477 bp, Morganella morganii
atgaataaccgattatttaaaaaagtcatggccgcttgtgccgccggggcgattgctggtgcgctggtgctgatccccgcatacgagggggttgagtacaaaccttaccgtgatgtggccggagtgctcaccgtatgttacggccataccggtagtgatattcagcccggtaagctgtacacggatgctgaatgtaaggcgctgctgcataacgacctgacgaaagtccggcgcgcggttgacccgatgatcaaagtgccgattgatgacaatacccgggcggccatctattcatttgcatataacaccggggccggtgcgttctcgcgctccactatgctgcgcaaactcaatgccggtgatatcgccggtgcatgtgacgaaatgaagcgctggacgtttgccggaggtaaacagtggcagggtctgatcaaccggcgagagacggagaaagcgatatgccacggaaccctttaa

SEQ ID NO: 278468 - DNA, 159 bp, Morganella morganii
atgccacggaaccctttaactctgatcatcattgctatcattctgctgacggtcagcctgttggcaggctgttacctgtattcgctcgagactcactgtaagccgctgtcgggtaatttgttggacggggtgatccattatgagtgtgaagcgccatga

SEQ ID NO: 278469 - DNA, 450 bp, Morganella morganii
atgaactggaaagaagcgttaattgctgtgctgtttattgctgttgcatggtgggtatatgacacctaccgggataaccagcaactgaaggtagataacataaccctgagtggtcagcttgcagagcagatagcggagaatgaaaaatatcaggaacgcacacagaaacttcatgaactggacaccaggcacacacaggaactggcaaatgcaaaaactgaaattgaccggctgcgtgttgctgctgaccgtaaccctgaacgggtgtacatcaaagccagttgtccaaagaccggcagcgataccgccaccggcatggatgatgcagcccccgcccgacctgatgacaccgctgtcagaaattattggttactcagagagcgaattgcagagtcagagcagatgattaaagggttgcaggattacattaaaactcagtgtgtgaattaa

SEQ ID NO: 278470 - DNA, 309 bp, Morganella morganii
atgtccgaagatactcatgatgatgtcagagctgctgcatttaaaatgcattacattaaagcaatagaagttatagaaggtaatggtcactactggttcagtgctcccagaccaatggcttatgccttggatgaactaattcaagaatatggaattgaaaccattatgagtagtcatccaccagaatttgacttcgttatatgtaagcaacatcttcataacggagaaaaactccgaaaattagctcgtgttagatttgaattaaaggaacagggtaccgctgacgatttattaccaactaccccatag

SEQ ID NO: 278471 - DNA, 1017 bp, Morganella morganii
atgaaaccggattggggggtgttacaacaacagttcctcgccgagcattcagtaacgggaatatccccgaaagaatggtgtgagatacagggactgaactacgcaacagcgcgtaggtacatcaaaaagccaactgcgcagagtgcgcaaaaaactgcgcaaaagaaagtgcgcactgcgcagaaaaaagaatgcgcaaatgaaccgatgcgcaatagtgatataccggatgcgcagagtaatgaatccgacaatgtgcagaatgatgaaacagagttcgatctgcgcaaatacgggcttaacgatatgcaggtacgttttgtcactgagtatcttatcgacctgaacagaacagcggcatataaacgggctggctataaaggcgaagggaatacagcttatgtgaatgcaagccgactgctaagaaatgctaaggtttccaaagctattacagaagccctcgcagcgcgggaacgccggactgaaatcacccaggacgcagtattaaaaatgtggtgggacattgccactgcagacccgacagagttgacagaataccgccggttatgttgccgccactgctggggctttggttttaactatcagtggcgggactcaatagagtttgaggacgctgtcagtgaagcggtcgcaaagaagcagaaggaaccgaacgacaggggcggttatggttacgacagtacgcttgacccgaatcctgattgcccccgctgcaatggtgccggtattggtcgtcctcatttccacgatacacgggatttaaggggcgcaagccgccggttatttgccgggataaaagagggcaagttcggtattgaggttatcacccgtaatcaggatgacgcactgaaaatggttgcgcagcatttggggatgctgaaaaaccggactgaggtcaccggtgcagatggtggcccgatacaatcaacgggatttgacctcagtgggttgacgacagaacagcttttgcagttacgtgaaaaagcggggaaatag

SEQ ID NO: 278472 - DNA, 354 bp, Morganella morganii
atgaaaaaacagttaattgtgattaagagacatatttctgagtaccctaatcccattcatttctctgccggtgactcgctgactgtaggcgaaaaatacgtaggagatgagggctgggataattggtatctttgctcgtttaacggtttaagtggttgggttcctaagcagataattgaattaattagcgaaactacaggaattgccaaagaaaactatagtgcattggaactgaatgtggagacacaggaacatgtcattggatacaaagaaaccaatggttgggtttggtgcaaaaaattggatacaggagagcaaggctggctccctgtatcaaatctaaaagaaatttag

SEQ ID NO: 278473 - DNA, 1401 bp, Morganella morganii
atggatatcaatgtcgatctgtttgatcaagaagttcgcagagagatagcgcggcgcagcctgcatgaatttatccagtacattaacccggaatacatcaccagtcacttttcggaaacggtctgtgcatcactggataactttctgattgagatgatggccggtaagcggccgattctgattctcggcgcaccgccgcagcatggtaaatccgatattgtgtcgcggtatcttccggcgtatttcttcggtaagtatccggataaacgtgtaggcgcattgtcctattcgtcagatctggccagtgacatgaacactgatgttcagcgcatcatgtcgtcagatgagtaccggacgctgtttcctcaaagctggttaggtaataaaccgactgacggtgtggcggttaagcgtaataccgaagaattcggtattgccaatcacaggggaacatacgtctgtgccggtgttggcggcccgctgacaggtaaaaaagttgatctcgggattattgatgacccgataaaaaactcaaaggaagcgctcagtcccacggttaaaaagtcaatttggaactggtacgcatcaacgtttaaaacccgcctgtcccggaacagcggcgagatcatcatggcgacccgctgggccacagatgacctttccggccgggtaaaagagaaaacaccaaaagccagagtgctggcatttccggccatcaacgagcagggtgaagcgcttgtccctgagttgcatccactggaccaactgctcgaaacaaaagccattctcggtgattacttctggtctgccatgtatcagcagaaaccgaaaccgggtgacgggcagatcttccacgaagaattcgcccggtactacctgccgaaagatctgcctgacacctttgatgaagtcattcacagctgggatatgacgtttaaggacagtgacggcacggactacgttgtcggtcaggtatggggcaagaagggcgcaaatgcctatctgctgtatcagatccgcaaacgcatgagttttaccgaaaccctgaaagccgtgaaattactggctgaaaaatacccgcaggcgcggcgcaagctggtggaggataaagccaacggaccggcggtcattgatacgctgaaaacgacagtatcaggattggtgcccatagagccggacggcagcaaaatcgcccgtgctcacgcctgtaccgctgaatgggaagccgggaacgtctggctgccccataaagatattgcaccgtgggtcaccgaaacggtggaagaaatcacaacattcccgtttgccgggcacgatgacaccgtggatgccatgacacaggcactgcgctatctgtaccagaagaaaggcggcggattcttttcacgcaagaggacataa

SEQ ID NO: 278474 - DNA, 1281 bp, Morganella morganii
atgacaaagcgaacctatgacaacaacggctggctcgaagtaaaagacaaccccatctcaaaggctggggtttttgattatctgggggctgaaatcggcgcaccggagccggacagaatttacaaagtgttccggccgccggaggaactggccagtgacgaaaccattaaatcattccgcctgaccccgttcattgtcgatcacgaaatgttgggtaaaaacgccacaccggcagagaaaaaaggtattcagggcgttatcggcgaaaacgtgtattacgaccatccgtatttgcgcgggaatatcaaaatcttttctgacgccgctctgagcgatatcagcagcggaaaaattgacctttcaccgggctaccgcagccggtatgacttcggtaaccccggtgtgtacgagggggaggcatacgaagttgttcagcgccacctgcgtggcaatcaccttgcattagtcgatgaagggcgcaccggcgctgacgtggctgtgcaggatcatcttgttgtaaccattgatacaaaggaacttattcgtatgagcgaagaagacaaagacaaaaatcagccgaccggtgacgagaacggatttacaccggagcaggttgagcagattaaacaaatcgttgtggccgcactggctgccggtacaccggcaacggatgaagacccggagaaaaagcaaacgactgacggcgatcctgatcccgaaaagaaaaccggagatgccgacattgacgcggaaaaagccgttgaagacgcagagacggaagcagaaaaagcggaatcaggtgacccggaagcggtagaagcggcggaagtggctatcgaaaccgcagaggaagcgattgctgaagcgaaagaagaacttgaccaggcaacaaccgacagtctgacgcgtcgccttaagcgtctcaaacgcagtattgcgtccatggatgaaatgtcctcaatgaaacgcaaaattgcccgtctggaaaaagccaaaccgaccatggacaccggcgaactgttaaagcagatcggggaacgtgacgcactggcgcacaagctgacgccgtttatcggggtatttgaccacgcaccaatgacgaaacagcaggtggcggaatacggcgtggaaaaactcggtatccgctgcgataagggcacggaaagtattgccctgaatgcctggatgcaggggcgtacaccggattcacaaaaagcgcatgcgacgatggataccgccgcaggcacggactcaattatgaaaaagtggggtgaaaaataa

SEQ ID NO: 278475 - DNA, 1080 bp, Morganella morganii
atgagcattatttccgagaaaatatcatctaggataaaaacattgaagcaagaatttgctgtaaatagaaacgttaaacatcaaggcgtaaagggtggattaaacgaagtagaattgataaacataattaaagacgttattccaaggaagtatgagatttcaaaaggtataattgaaaactcatctggagagcagtcaaatgaaactgatattatcatttatgataatgaaatcctgccaccatatataaataatgaactcgccttcgtccctgtagaggcagttagatataacattgaggttaaatcatctttaacagcaaaagagctcaaaacaacaattgaaaaatttagaaaatttcgatcaattggcgggcattctcccactgttctatttgcgttttcaagtaacgcaaaaaaaaacgaacttagtagatattatgatagcgatgttaacttcttaacaaaccccgccattagtgtactctgcatttctgacaagtgttactatttcaaacacacagagactaaatacttaaaagaccaccttagtatttctgatgtttttaaagatttcattaacgatgacaacatcaaaatatcaagttttacagatgtcattcaagacactttaaaaaataatgatttcctatctggtttaacgagatctcaattcgctttaatattgcaatcttctattcaagcccaaaaaatagctcccgattttgacgcaaaaaaaataacaataaacggaattaattttaatgaaataacttttaaaatacaccaatggattggagttgaatgcaacgataatgatgttgaattatcacttcttgctggaatatcaaacacattatctaaagaatcatttggtaattatttacttaacggaaggaaagtagattccacgtctttttcgatatgctgtgaggatatgtggggaaacttgagttgtcaaaaatttgataaaaacggtctaggtgacaactttaaaaatttcagtttcagttttgaaagctcagctgaagaaagtaaaataatcttttactttaaacaaaacccaccacaggaagagtaa

SEQ ID NO: 278476 - DNA, 735 bp, Morganella morganii
atgaatggaaattttgaaagaaaactctggatatccaccgttccgcttgtgtctactaacgtgagaggccttccaacagggatagcttcggggtgttttgtaaggtatggcgaaaaaaaattgcttctatccgtccagcatgcaactggaaatggtgaagtgtgggctattcagcaacagtatgttcctaatcgaggtacagaattatacaggttaggaggagtcaactttctaaggaaaatcaacataaatacttcggaaattgtggatgttgatttttcctacgttgaagtgccagaatcaacaattgccaaacgccaagaaataaacccgagcactgctgaaatcctttctgaagaatatatttccacactgacatcgtctttagaaaatcaaccatgtgcaaacactaagtatggttttagtgggcttgttaagccatcaatagatcagtgcgggaaaaataattatctggttactgaatcccgcatttatactggtcttgagtatcttcgtaccgaaggtgactatcattattttaaacttcctttcaatcatcccggccaccaacatttccaaggttgtagcggtgcaccaattatcggtgaagatagcaaactggttgctttagtttgtggtgggaatattgatacaaatgagttatgggggatttcactaaaagcatataagcttgccgtagatgttattgttaaaggcctacaaaagcagacctaa

SEQ ID NO: 278477 - DNA, 195 bp, Morganella morganii
atgtcacaaaaatatcaccacggcgtgcgtgttattgagcacaataacggtacccggccaatccgcacagtcagcacggccgttatcggcatggtctgtacagcaaatgatgccggtctgctgaatgaaaacgacatccccccttatccgcgaagatggtttccgtttccggggttcccgcaagaaacaaattaa

SEQ ID NO: 278478 - DNA, 144 bp, Morganella morganii
atgttatacgaacggacaactaagaaaaacactgagattgactatgccgctatcaaagcgcagaagaatgcaatgcttcagcgtttcctgctggctaagaaaaaagccgaacagtccggtcaggttgtcactaagcctatctga

SEQ ID NO: 278479 - DNA, 1227 bp, Morganella morganii
atgtcctgcaaacgtaaaattccgctcggagaaaacgtgctggatgcagcacaaaagcggattgaatggctgtttgatacttttgaacaaatcaccctttccttttccggcggcaaagactccaccgttctttttcatctggttgcagcagaggccagaagacggcaccggaaattcaatgtcatgtttctcgactgggaagtacagtattccgctactatcagccatgttgctgccatgaaatcactctatgccgactgtactcagcggttttactggatagcgctgcctgtcaccaccgaaagtggtatttcccagtatgaaccggcctggacggcctgggaacccggtaaaaaatgggtccggcaaccaccggaagatgccattactgaccctgatttctttcccttctatcatccggggattatttttgaagattttactccctcatttaatcagtggatcaccggagatcatcacagctctgtcatactgctggggatccgcgccgatgaatcattaaaccggtttctcgccatcagtaataaccggaaactgcgttatgccgatgatatcccgtggacaaccgcatcaccggaaggattctattatatgggttacccgatttatgactggcatgtgaaagatatctggacttatatttcccgcagcagacttccttacaatacgatttatgatctgatgcatcaggccggtgtcagtctcagtaaaatgcggatctgtgaacccttcggcccggaacagcgcagagggttgtggctgtatcatgtcctggagccggaaacatggagccttgcctgtgcgcgggtcagtggtgcggatgccggtatgttgtacacacgacccggaaataaagccggttttttcggttcccgccaaatcagcaagcctgccggtcatacctggaaatcctacgcccgttttttactggccagcctgccggaaaaaaccgcagaacactaccggaacaaaattgcggtctatctgcactggtatgcagagcgggattatccggacgggatcccggatgaacaatccggtgatacaggcagtaaagatattccgtcctggcggcggatctgcaaaacccttttacgtaatgatttctggtgccgctcactggcattcagcccgaccaaatctcattgctacgacaagtattgcaggcgcatacaggcaaaacgcaaagactggcaactgatatag

SEQ ID NO: 278480 - DNA, 2367 bp, Morganella morganii
ttgttggcagaggcgttcgagacgctgacccgtgaattcactgcagggtgcgctgaaggcacactggcgaaggccctcgccgtattgcactgtatgtatgaggatttaggaatgtctgatatcgatgtaatgagactggatcagtctgtcacacgtccggaacaggatcgctatggctttcgctatgtcgctgcacagctggcacagtctatacaggctatcggtcgcaaaggaagcgccgttatcggcattgagggagtttggggctcgggaaaaacgagtctgcttaacctattgcacacggaactggataaacagaaagaggacaacacctttgttctgagtatatccccctggcttgacggcagcggaaccagtctggtggaatcgctgttgatacctgtggcaggtattattgccgctgaggaagagcgtcttctttcgcctgaagaccgagaaagcctcgaaaagaaaaaaatacttacccggacagctcggaccctgatggaatatacaagagcgactgcccgccatcttgctcccctagctcagactgcagcaatgatcccgggagtacctgatgccagcggtgcgctggatgcgctgtcagagtctcaatggttaaaagaaaaagaaaaaactacaacggagatgcgtactgaaattgcagaaaagattgtcggaatggatttaagctttattattcttcttgatgatctggacagactagagccagcgcaagctgtggaggtcgttcgcttagtcaaatccgtcgctgattttccccgcttccgctacatactctgttatgacaaatccgtgcttgcgctggccatcaaaaaaggtctaggcgtggaagatggcgaactttacttgcagaaaattgtgcaaatttcgtttagcctgcctagaccagaatctttcgacttgcgtcgtgaattttattcgggagttgtcgaattataccaaactgttaatggcgagtgtccggacgaagaatttataaatgacttgaaccgcgtgacagatatctacggtgctgcactgaaaactccccgtgaagttcatctgtccctgaataatctgcggttcagatatagcggaatacgtgactacgtctatttaccggatttgagctttctgcaattgatacgcaccaccaatcccggattgtatgactggatagaagaatatcttacagagcgggcaatcgtggaatctggtgacggcagtgtaagtgaggaagaacaaaaattactgacacaaaatttagttgagtatctgtcccgttaccgatcttcagaagcaaaatctgtaacctccttgaaaaactgggtgccgggaatttcagggtaccaaactgatatacagaagttatttgatcagacaagtgatgaagataaagcgattatgacagcaaatcgccgtctcgggagtacggcatattggcgttattactttgcattttcttcgcctcagaacgtactgccaccagcgtactttgatgagctgttccgtaaaagcagtaatcctgaagaacatccggcgatgacccaagaactcctggctaggatcaacagcaatggtgtgtcctcacgtacatggtttgaacatattctgagtcagctgacacggccgatgataaacaaacgtacagtcgcagaatgtcatggtctgctggcattcttctttaatgccggtgatgagatatatacacgttacaggcagagaaatcactggttttcccggtatgatcttgatgtaaacagcacagctaatcgtcttctgaaaaggatgttggataatgaccggacgaaagcgatgaaaaccctgctttcaatgacgatgaaaggaaccgcttgggtctggattgcgaattatatccgagatttgctatggcagaacgggttggccggcgaccgggcagagccagagcacgagcgcgtactgaacgatgaagaactgaactgtattcgtcatcatttctgcgaacgcctaaacaagggtgaactgaaatcactgtttgagcaggatggtgaactgaaatcacggtttgagcaggatggtgaactggggggctttatctgggcctggcaggatattgctggcccagaatccgttatttcgtggattactcaacatagtgacagcgataaagtgtttctgatgttgttactgaacctgcgatctcatattatttccagtgcaactgggcactatctgacactaaaaataagggatatagcccacctgtttggaggtgaggatatgctcttggaaaggttagagcgtattgagtccgagaataattttccagatcaagtaaaagacgttagggctgccatcgccctcagtaagtcattctga

SEQ ID NO: 278481 - DNA, 813 bp, Morganella morganii
atgaaaattgaattaacaaccttaggagatactgtaaatccagaaattattaaagcaattgattccataaaaaaagaaaaatcaaaagctatcaaatatggcgatgaaaaaaaagccaatgagtactggagagtacttaaagcatttgatctaaatgtgctttatattcgagcatttaataatataaaaaataagaaatatagagatgcatggaatgaactcgaacaatgtgaaataaattatgaattccttagtgaaaattcaactgaaaattttttaattaatacaagatctaagttcataatagacaaggttcttaaatggcagtcactttatccgtattgcctgtttattagtcccggttttaaagttggttactatacctgcagtatctgtgatcacagagttagaccaagatcaaggtgcggacataaaaaaggtaaaatctataacggtgaactatgtcttcatatagctcatgacatggaattccttgagttttcaattgtatcaacaccagctcaaaagtattcagtaatgcatgatgatgcaacccttgattttacactgatacaatatatatcaaatattttagaaaatgcattcgaggagtgggatttgaatagaacaactatgaggtttccaaaagaacgttttgcaaatgtgagaaacgaggatgattgcccttgcaaaagtggcagagagttccatagttgctgtagtgataaaaaagaaattgaaattccacatattgatttcatactttcaaaagctatccctcctgataaaaaagaaattagttttccgtattag

SEQ ID NO: 278482 - DNA, 489 bp, Morganella morganii
atggaaattttcaatgaccgtgaaaaatttgacatcaaagactcaatacttacgtttgaatccttaattacggacgcatcaccagaaatatcctcaatactcaaaggaaaaaacgttattattttaccatctcatgggtatgaagacgtttattacacaggcacattagatacactagattatcttaatgaaaataacattaatgccgaagtgtatgctaccgatgacgaatataaagagttggggttgcatgcggcagatatatggcttggtacctttattattaaaaatgttgtaatacctatattttgtagtgtgatgtcagcatatatttatgataaaataaaagcaaagaaaaatgataaaatttcgttaacatttatcgctgaaaagaaagatggaaagactgtttcaattgaatataatggaaaaatagaaaacttcaatgaagttctaaatgctgtcaaaggatttactaatgaaaattga

SEQ ID NO: 278483 - DNA, 213 bp, Morganella morganii
atgcaaacagaaccaattatcaccactaacaacatgtcagtagacgatgttgctgcgtggatcactgaaaaagctcaggcgattcagaaactgcaatcactacgtgcagaacgtgacagagagatccgcgaccacgaacgcaccatcagtcgactcgatgaagatatcatcaagtgggaagaccgctgtgctttaacagtacaaccgcagtaa

SEQ ID NO: 278484 - DNA, 633 bp, Morganella morganii
atggatactgtaggaagcaggattaagcggcttcgaagcctgacaaagacgactcaaaatgacctgggaaagtattgcggtgtgtctggtgttgctgttgggtattgggagaaagatctaaacctaccaaatggtgacgccctgattaaattagctcagttttttaacacctctgaggcctatattttacatggtatttcctcaaaacaagctgatagcgttgttactacaatgcagcgattgccggtaatttcctatgtacaggcaggtaaattcacagaaagtatcccttctgaaatatatgatgaagctaccgaatatttagagacttccattaaagtgtctccgaatagttttgcgcttatagttcagggtgattccatgacaaacccaactggaacgccctccattccggaaggagttatggttattgtcgatccgtctgcagaagccacccacggcaaaatagttgttgccagactaaacgggactaatgacgttaccattaaaaaattggttatagatggccccaatagatttttgtccccactgaatcctcgttatccgaatattgcaattaacggcaactgcgaaattgttggcgttgtcaaaggcgtacagtacgaactctaa

SEQ ID NO: 278485 - DNA, 207 bp, Morganella morganii
atgaccaccagcgaagttgaaagctatttcggagatgcaaacaaggtagctgatttttttgggataacccctgaagcattttaccaatggaagaaacgaccgggaggtttgatccctaaaagcagagcatttgaagcagcctgccgtactgacggaaagctgaagttcgatccaatcctttacaagcagggtaccaaaactatctga

SEQ ID NO: 278486 - DNA, 1482 bp, Morganella morganii
atgaaaaaattagtattagtttgtttaattgaagccgcaattgcgggctattctgccggagcactggcggatattcaggatgattttattatggaaaatacatccggagttacggttaaagataaccagcatttgtatgtaaacccaaatattactgctaccgatttcatcatagaaaatggcgggcagctttcactgaatgaagccagtatcctgaatggcgcggtgatcaaatccggcggtgagatccatttcagccaggatacccgctcaacgggcacactggtgattgaaaaaggtgcggaagctttcgccaacaataccaatgaatttgaaatcgatgtcacaacaaacaaccctgcggtgccgggaaatgtgatatttgaaaccgttgataatgccgggttactggaaatcggcccgtcctggaccggcggtgcgaatgttgaagattttgccccgatcccggataaacccggtgcggatctggtcaccaccatcaacaccctgaatatgaagggcggcatggttgctatggaagcctattctccggcggctcagcaaaaccacctgaaaatcggcacattaaccggacagggcgatttttatatctccacgcagatggcagacggctggggtgatcatattaccgtcagcaataaagccaccggtaatttcggtattgagtttgcggactccggtaaagagccgaaaagcgccacccgccacacggttgtgtccgttaacagcggtgatgctgccttccgtctgctgaataaagatgagactgctgaaatcggcgcttatcagtattccctgaagaaaacccaatccggcgaaagcacagagtggtatttgcagggtaaacgcaaaggcgataaagatactgacaatggtaataacggcggcgataacggcggtaccaaaccggtcctgagttacagcgccaaaaatgtgatggcaatggcggcagcgccgcgccaggtgttacaggcggaatccgtttccctgcaacaacgcccggggaattactacagtaacccgcagcacagttacggattatggacccgctatctgcacgacaacacccgcctgaatgataaaaacgataccgcgtttaaaaacaaactcgacggtatgcagatcggtgtggataagccgttacgtctggaagattccaccgtactggttggtatattcaccggcttcagccgcagcaaagtcagcacttctgattatggcaacggtacagttgaaagctggcacggcggcctctacgccacatatctgcatgataacggcttctatgcggatgccatgctcaaaggcaaccgtctggacaataccaataatggccggatgaaaaacggcagtgccgcccgtggtgactatcatcagaatgcgtttaccgcatcggttgaaagcggctttaactatgaaatcatgccagctctgaccgtacagccatacggcaaactgtag

SEQ ID NO: 278487 - DNA, 324 bp, Morganella morganii
atgcgtgctgatattcacagtgcggacagttttcagggtgaagccggtgcgctggtttccacgtcctttgaggtccgcagtgcggtgctgaaaccgtatgcccgccaggcggtggttcacgagttcaccaaagagaatgatgtgaccatcaaccgcaccaataccttcagcaacgatttctccggcagcaccggaaaatacggccagggactggatgcacagatcaccccgcaggctgcattctatactgaaatcaattacctgaacggtaataagcgtgagacaccggtcagtgcgaatctcggcttccgggtacgtttctga

SEQ ID NO: 278488 - DNA, 645 bp, Morganella morganii
atgcaaccaggtgcaatagcacagagtttggttaataaaacaccagtaagtcagattacagcggaaaaccggaatatttttcagaccgcagcggataaatttgtcgcggttgtgaacagttgtaaaacattctccacaggatgcagcacacagaaagatcacaatattatgaaagcgtgcggcgcattgctggcgcaaacgctggtgaaacaggaatgctatacagagggattcaccggtggttgtgtaaagcagctcgatatggcactgcctgataagatctttgccagaagtgaaacgggtgtacccggcagcgcgtctgttagcagattatctgcgctgaaagcatctgagtgctccgcacaggagctgtatgacatgctcagcaaacaactgcataaaccagacaccgcaccagagatgcaggaaaaaatacgggcggtactggagatggccgaaaagggggcagacagcaaatctgtccgggggactgaatttgcagagatcgctgaacgctatgcggataatataagaagagatgttatttccgatatattattggcagatgatattaataatatggaacatggcccggtattaaagatggctgatgttatcaggctgagatcgatgaaagacagctga

SEQ ID NO: 278489 - DNA, 1086 bp, Morganella morganii
atgatttatgagtactcccctctatttattataatattgtcattatcatttttaactatttctattatatttgatatacaaagtaataagaaattatccgctttaattgcattggtaatgatactatcctatgcaatactatttggattgcgggattattcaattggctcagatactaaagcttatattgataattttttaaatcggaattgggattttgagttactatttacccttttaacagatgcattacgatttatttcaataaatgagagaatatatcttatttccattacagtactatatggaatatttatatattactcttattatattcttggtaaaaacattaatgagcatatagtaatatttatatggtgcctcctattttctcaaagctcaataattggaaccataaattattttaggcaagtacttggcttttcttttttcttagttggctttagcctatatattaaaaacttaaagtttagcacagcatctattttcataatgacattgtcaatatttatccattcttcaaatgcattgttaatacttatagtaataatatctaaatatctcaatatccgtctgattattttaatattattactctccttggctacatttatatttgatgttggcgggtacatatctcgaaattataatgattactatataattagtcgcactatatctcggcatatctattttaatgatcgtagatctatatctactatatatttaaatatcattatgtatggttttcatctattagtattcttatatctattaaaaaataaaaatattcctgttgttcataacaaattatatagagcaataaaattctatatcttagtattcgcattagcaatatttatgtcatttaatagggaaatggcaattcgatattatttattattaccattcttaatccctattatttatatgttatcaatgaaaatagaaggtattaataaaataataaaaccatttctggtaacgattactctagttcacttaggatacttattaagtcgtccatggtttatcgatcaactttcaggtaatatcacaccctag

SEQ ID NO: 278490 - DNA, 1149 bp, Morganella morganii
atggtttcgcttaaaataggcagtggtagaagcctatcattagaaattatgttatctactattttttatgacagcttattgtttgaaataacagacgataatggtgaaaagataaattactcccttctcccaaaccgtatttctttcaaaaaaaataagatattagttgatagtaaaatttgcatgttacaagagcgttatggctataaaataaatatacgcaacccatcatactctcgttctatatttactccattactatacgctatattattttttaaaacattatttactaaaattttcatccccagccaatggattcttgcatttaaagaaaaaagcaccgataaatggtcaaaaataaagtttgataataatgaattaatggctgacccttttatatactatcataactcaaaatattatgttctatatgaagcattaaattatgatactgataaaggctatatttcaattggtacactagatgttaaaaacaaagaaataattgataatcatataattattgaagagaattatcatctttcctatccatttatattgaaaataaatgatgagctatatattattcctgaatcatcatataacaacactattgatttatataaatgtatagagttcccttataaatgggaaaaaataagaacactcattgataatatatctgctgttgatactaatttaattaataaaaatgggctatggtacctattaacctctgaaaaaaaaatgggtgtatcatttggtgatgaacttagtctatatgttacagacgacccattaagtggaacattcttacctgttatcgggaatcctgttgttcatgatatttcaaagtcacggaacgccggtgagatattaaataatataagagtttctcaggattgttcaaaacgttatggttaccgcgttaattttatggaaataaatgagctatcggagaataattatagtgaacgttatataaagagcttgaaattaccatttggaacaatagcaatgcatacctataatagcgcagaaaatattgaaatagttgatttaaaaatcataaatatatctccttattttttgtataggaacctttgcagaataattaaaaaactaaaaacaaaaatattaaaatga

SEQ ID NO: 278491 - DNA, 126 bp, Morganella morganii
atgaagctgaataatctggtttctctttataggaacatgacagaacagaaactgtataaggttaaattcccatacagacacaataacctacattttgatgtatttttatttatcatgaaattgtga

SEQ ID NO: 278492 - DNA, 1149 bp, Morganella morganii
atgtctgatatttcattaggatgtgtggttgttcataggttaataaaagagcggcataaagatttcaatcactcaaaaccatatagtcgtcgtgatacggttcttgaccgaaataatgaaatcgtaattaaactagtgtccagtatatctgcattatatggtaaaaaatataatagttcgcattatggtatatttaatttagatgaaaaacgtagggggccttttccagcggaatttgataaatatcgaaatgatacatccaagacgttagacgatgaattatttataggattatcaaaaaatattatgtatcagttatattctgaggcaaaggatcgacctgctgcatcaggaggattacttctttttgctgattatatcataaaatctacgcgttactttcttattgcaatgattaagcaaaaggaaggtatagttattagtgataaattagaaccaaaagagctagagcatcttgatctggcaaaactaaaccaagcggcacgaataaattatgatttatatgataaatatctttccgctgatgagaatgaaagacaggatgttaattatttaagttttgttagccccagctctaatcagacaacttcagggtattttatcactgccttaggttgtgataaaggtaatacatcaactaaggcgacgagtaatttaattaatgcatcatttaacttcttcagaaatcatcaagagttaaaagataatgcccgcaagtttaaaaatgaaattattgagtacttattcgattgttctgagaataacatttcagctaagctctctgttgtaagtgagatggcagcgaagcatatggctaatttagaagatgacattaaagataaattgtcagaagaattatatgctcatttgaatagtgaaattattcgtgtgcctgtggaatttaaggtaagcaaatcagtagttaagaaaaacaggaatattaaatatataagtgataatgttaattttgagtttaaatctaatttacttggaaatactcttgataacgagatatgctataataagaaaactggacatttaactttcactcggattactcctgagaaaaaaagtgaaatagctcaattgcttgatgagttaataaaagaaagaaatagcgaaaaataa

SEQ ID NO: 278493 - DNA, 1257 bp, Morganella morganii
atgtcatgttttgaaacggttgttgagattttcagatacgtagggcgtcctgaatttgatgctattaataatcgtttttcagcaactatttcttatgatgcttatatatatcaacgcttagtttctttgcaatcctatgacgcatggggagaaattgaagagattatcattgatgatttggatataaatgtcgatgatcgcattcccgatgaaggaacatcaataacactgacaatctctatatcaactggatctagtgagtcattttttatcaatgttaaagatctaattctaaagtctccaatgttaaatagaggtactttgagaaagtctttttacttggttgaggaagatttttattttaatgaaggaatagttgagggattaggaaaaataccagaactatctgttttaaagaatctttgtgatttcattttatgcctatcaaaagttgcacactacagcaatagtaaaagtgatgatataagccataagttggttttcttgaaaaatactaatgctaagtcattacctttaattattgaaaccaatgttgattattcacttcttttaactggtgttaaggatttaaaagtcatcgaatctttttctgatgaaaagagagctataacagatgataattattttgagcggaaagggattttcattaatacggtggttgattttcttgagtcaatcgatgcaaagaagcaatttcattttttattttgtgagtggaatgaatttctaaaattataccataataatctcggcgtatatcttagtggtttttcatttcataaagtaagaaaggaagtggcagaggcagaagctaatttggcagagcggttttcaaaaataatgtcagacatgatcgctaagcttttaggcattcctgtttctttggttgctacctttggtatgataaaattaaataccctaccggaaatgttagtagtgtttttaggtgtatttcttacgtcgataattatgttttttattgtaagaagtcaatacacacagtttaggatgatttgtgatgctaaagatattatattttccccgttagtgaaaaaatccgtaggttatacagaagatttgaaaaaattagtgtgtaatgcaaaggataatttagacaaaaatcaggtcatgttaaatcgttatcttattttctttcagtacttatgctgggttcctacagccttaggtggcggaatgatcttaattgctattatggttcatttaggattactataa

SEQ ID NO: 278494 - DNA, 705 bp, Morganella morganii
gtgattgatgctattcaggctgttttatctgagtcgcctcaggctggcttctggaaatgctattaccgtctcagatttaagggctataacttcaaccataaacgtgtttatcgtgtgtactgccggctgggcttaaacctgaaacggcgggtaaagaaaaaactacctgagcgaataaaagtgccgttaattgccaccacccgaattaatgaaggctgggcaatggattttatgagcgacagtctgtactgcggtaaacgtttcagagcattgaatattatcgatgaaagtacccgcgagtgcctggcaattgagatcgacacttcattaccggcagagcggattattcgtattttatcccggttaaaagaagaacgcgggttaccggaatatatccgggtggacaacggacctgaatttatatcggataaactggttcagttttgcacagaaaatgaggtcactctgaattatattcagccgcgaaaaccacaacaaaacgggtttattgagcgttttaacggatcattccgccgcgagtttttaaatgcgtatttgtttgaatcactgagtcaggtgaaggaaatggcctggttctggcagcaggattataacctgaatcgtacccatgaaagtctggggcatcttcccccggagatataccgaaaacagctagaaaattctaatcaggtttgtctcagataa

SEQ ID NO: 278495 - DNA, 708 bp, Morganella morganii
atgaaacccattattggattcaatcggcatttagagatggattggcttgttcaaaccgcatcctggtcggcgaatgggattcacggtctggcattaaaaaataaaattgatagtttacttgcccctagttttgacagcaaagtagcacaagataaaactagaaatcttctttttggaatttggaattcagaatcgaaatcagtacccaaagcatttcattccgacgcctgtaaattgctcattgaacacagcgaaataaatatagctattcattggggaatgatacttgttaaataccccttcttttataatatcgtagtacaaattggtagaatgaccaagcatgaaggtttgttcatttacaatcaattagaacaacgcattactgaaagctatggggatacttcaactatcaagcgctgtatgcaatttgttgttcgaaccttaataaatttagaattattatccaaccctaaatcaggcacataccagttgcgaaaatcaattgtgattaatcacgataacgttatcgcttggctgactgaagtatcagtgagggctcaaggaaactcaagcaaaagtatgactgctattattaatgacccagcctggttcccctttgatattaactttaatgaaaatagattatcttctaatctacgactagatgttcatcaccaagctaatgataccatcattttcctatga

SEQ ID NO: 278496 - DNA, 717 bp, Morganella morganii
atggttaaaactccagggttctgccgccatatcgagaaagaatggcttgaacaaacgctccgctgggttgctagcgaagcagatagtgtgcaattaaataaaaacctggaagtatttcttggtacgtatatagcgactaaagaaaatcggcgcaaagctcgaaatttattaacctcaatttggatgcgacaaaaaaataaagatgttttttttgagacaggcattcaattacatcaagagattgatgtattttcattacctattcactggggaatgttaattgcaaaaaaacctttctttgctgaagttgctcgttttatcggccgacaagctaggctaaatgacgcatttaccttttctcaagtatttcgccgaatgagtatgttatatggcgagacacaagcaaccagtagagcgctgagtgctgttttaaggactatgatcgagttaggggtgatagatagaagtaataaactaacatcatattcaatcgttccaattcaagaaaaagttagcaaccatatcgcaaattggttaaccacggctgctatgatttcattgaataaagttagcattagtcttgatgaagtattagctgatcaagtgttcttcccatttcaaattgatatcaacttgaatacacttgatgtatcaacatttgaatacttgcagcaaggaaactcaatagtcgttttcaaaaggaatctttactcatga

SEQ ID NO: 278497 - DNA, 1968 bp, Morganella morganii
atgacctggcaggatgacgttattcataaagtaaatttggatggggattttgtatacatcataaacgatccagatggactactatatgagcctgttatagcaacctcacttcaagaaaaaaatgcgttcatttttgatgatgatgatccattagcattacgtctggcctatgaaatatggcgtagtggtgagaataaaatatctttcctgattcggctgacagttgagcgtgatatttttatacctcatgatattcaacatgagtcaaaagagattgattttcatctatcagaatttttccaggatattgattcagatatactaagattactaccagccacgttatatcagtcagtcatggatgcgctgaaattatttgctccgggtaggctcagccaacagtccagtctagatttcttattgcgccatatatatagaattgcacctgagataatccaatccagtacggaccttgttagattattgattagaaagcattatattggtattgaaatgccaatgcaaattgaaacgagactaattcatctactgagtttagtgcctagttttggtttatggaatatcaatcgactaatttccaataaagcttatttttttgatttccttcaaaaacaatgggaaatatacttacaagatgaagaaaaaagtcctatctactttgcatctcgaccaaacactcaactaattgttcctttttctgatggtgatattcgcgtttttattgataatctgtttgctgaaggcattataaaaccagtggcgataaaaagcttacctcctgaacactgggcatcatttgctgtactaaaagaaccaaaaataacagaaaaagaacgaatactgcacctacttaataatgcaaaaaaaatattcaaccaatactcagaagaaagtgcaaatgcagatttctggcttgagcagtcacgttctcttggtatcatgaacgcccttttttatcaaaataaaaatttgcctgcaattgaagttttgtttgatgatattaaaaatattaacactgatgccgatgaattatttcaacattggttactaatcaattatgcaaaaatacaaaccataccaactgttcgttatccatctatgttgcataaagttcctgactggatatcacgcaggatagattctggtaataaaatttgtttgcttgttttagatggtatgggagctcgccaatggccattattacgtaagcaattgcaaatatgcgaaaatatttcaatagaagagcattcttgttttgcttgggtgccgacgataacgtcaatttcacggcaaactttgttctcagggaaacgtccatttttgtttggtgaatctttactgaccacaaataaagaagaacaactatggcttaattattggatgaataaaggcttaaacaaacgagaaattaagtatgcaaagaaaattgagaactattcagtcgatgaatggcaatcactagttgggtcactaccagttaaaattgccggtttagtcataaattttatcgatgaacagatgcacggcatgaaaatgggaatggctggactaaatttagtagttgatagctggctggccgaatggaaattcaaagataaaatttcggaccttctggagaatgggtttgaagttataattacttcagaccatggtaaccaagaggctatcggtatgggatatatcaatgacggggtaaaagcggagactcggggagaacgagtacgaatttataataaccccagtttgcgagacagctctgctgcaaactatcaagattctgtgatagtatggcccggtccagagatgggcctgccaaaagggacataccctttgctagcctgctctgataaggcctttaaaaataaaggggatgtcgttgtagggcatggtggaatcagcctccatgaggcaatagtgcctttcattattgttaacaaaataaagtag

SEQ ID NO: 278498 - DNA, 387 bp, Morganella morganii
atggaaaccacgttcgttccggatgcactggagcaggcactgtgggcaaggcggccgacaggtactatccatcacagcgataaggggtcacaatatgtctcactggcctatacacaacgactgcatgatgctcagttgctggcttcaacagggagcacgggggactcttacgataacgctatggccgagagtattaatggtctgtataaggcagaggcaatacaccgtcggatctggaaaaaccggtcagaagtggagctggcaacactggcatgggttgactggtataataaccgcagactgctggagcggctgggacatatcccgccggcagaagctgaacaacgttattatgcttcactgaaagtgcaggatgtggcagcatga

SEQ ID NO: 278499 - DNA, 255 bp, Morganella morganii
gtggaacggtgtacggttgaacgcctgatgaaggtgatggggctgtcaggcgtcctacggggtaaaaaagtgcgcccgacggtcagccgtaaagaaaatgcggcacatgatctggtgaatcgagagttccgtgccgaacgtccggatcagttatgggtggctgacttcacatatgtcagtacgtggcagggttttacctatgtggcgttcatcattgatgtgttcgccggcatgatcgtcggatggaggctctag

SEQ ID NO: 278500 - DNA, 231 bp, Morganella morganii
gtggaaaaagtaatccctctggtcaacagcctgcgggaacaatacggggtcggaccggtatgccatgaactggcagtcgccccgtcaacttactaccaccatcagcagcgtctgtgtaaccctgaacggcgctgtaacagagataagcgtgatgaccttctgaaaccagatatacagcgcgtgtacgaaaaaaacttcagtgtgtacggtgcgcgtaaagtctggcggtag

SEQ ID NO: 278501 - DNA, 228 bp, Morganella morganii
atgacaaaaaatacacgtttttcccctgaagtccgtcagcgggccgttcgcatggtgctggaaagtgagcacgaatatccgtcacagtgggcagcccttcagtctattgcccagaaaatcggctgtacccctgtacccctgaaaccctgcgcatctggctgcgtcactatgagcaggaggccggaacgggtgatggcgggcttaatgccgccgagcgtcggcgtctga

SEQ ID NO: 278502 - DNA, 489 bp, Morganella morganii
atgtggcaggtaggtgactgggcctggagtcaggcccatcagcaatatgtcaaagtgattgatgctgctggcctatggggtcagcagttttaccgtgtctggttgcagcaacaaaatgtagtactcaaggtattagacacggatctccacaaccaaccagcacagaccatcgtaacggctgatgcgttatgctacttggccacagctgccaaaataaccaatgttcagcaggaggataccctcctagcaccaatagaatcgaatgtcattcctttgccgcaccagttgaaggcgctcaccaaggcgatgaacaaaaaacaggtgcgctatctgtttgcggatgaagtaggtctgggcaaaaccattgaggctgggttggtcatgcgtgaattgaagttgcgcggactggcaaagcgaattctagtttgtgcacctaaagggttggttacccagtgggtaagtgaaatgcagactgaactgccccgataa

SEQ ID NO: 278503 - DNA, 2829 bp, Morganella morganii
atgcaacaagatagtctatttagcagtgataactccaaacaaatgcaggcagcaggtccagtgatctgcctaggaaaaaccttcgctaacgaccaagaacgccgcgaatattttctggctttgctggctgaaaagctaaaagacccagaatttcgtaaaatagaaggctttccagtcggtagcgataaggatattttaaccttaagcaaccctccgtattatacagtatgccctaatccttggattgctgattttattgcagaatgggagctacagaagtcagaacagccctctgattatcactatcatagagaaccctttgctgccgatgttagtgaagggaaaaatgatcctatttataacgcgcactcctaccataccaaggtaccgcataaagctattatgcgttatatcctccactatactcagccgggtgatacaatatttgacggtttctgtggtacaggaatgactggagtcgcagctcaaatgtgtggagatcgtgaagcagtcttatcgttaggctataaagttatgccagatggtactattttgcgggaagaagaagatgataatggtaaaatagtttggaaaactttctctaaactagggtttcgtaaagcgatattaagtgatttgtcacctgcagcaactttcattgcgaacaattataatacacctgttgatgtccttgcttttgagaagcacgccaaacgtattctgaaagatgtagaaaaagaatgcggttggatgtatgaaaccctccatactgatggaaaaactaagggcaaaatcaactacacaatttggtccgatgtttttatgtgttcagaatgtactgaggaagttatctattgggaaaattcattagaccaagatgaaggtaaagtactagacgaattcccctgccctaattgctcagcaaaactaaataaaagaaacatggcaagagtgtgggttaataaatttgatgaccttctaaaaaaaacagtaaaacaagcaaaacaagttcctgtattaattaactacaccattgagggtaagaaatacaaaaaaaaaccagacactttagattttgctttaatagataaaattgagtcgagtgtaataccgtattggataccgatttatgaattgccgaatggtttcaatacgaaacaaccgaaagcttcgcatggtttcgatcatgcgcatcaattttatacaaaacgcaatctatgggtactatctgcttgctgggaacgtttagtaaaagcaggtccccgcttcccatttttattcacagccagccaacgagctctttctaaaatggcaagcatcgccttttcatattttttccatggcggtggtggttttatcaatgccggaacaaaaggaaccctatacgtttcaagcactaatccagaggtttcggtttttcatagtttgacatctaggattcgctctttaaagtattccttcgaagctgatcgttccaattgcataattgaaacaaaaagcactacctctaagtcttctatattagataactccttagattatatttttatcgaccccccatttggggcaaatattaattactccgaactcaatacactttgggaaccttggttaggactcacaactaatataaatcaagaagcgatcgaaaactccgtacaaggtaaaggactacccgaatatcgtgaattaatgacaagggctttttcagaggcctatcgaatattaaaacctggtcgctggataactgttgagttttctaacactagagcttcagtctggaataatattcagacagcaataactgaagctggatttgttgttgcgaatgtttcagctctcgataaaaaacaaggaagctttaaggcttatacaactcctacagcagttaagcaagaccttgtcatttctgcttataaaccaaatggtggattcgaggaacgattccttgaagaggcgcagactgaggagggagtgtgggattttgtccgcacacacttaaaatacctaccggtgactaaacagcagaatggtttgctgcagtttatcccagaacgtgatccacgtattctatttgatcagatggttgcttattatgttcggaaaggttatctcataccggtttccagcctagagttccagctaggtttagcgcagtggtttatacagcgtgatgggatgtactttcttccagagcaagttgctgagtatgatcggaaaaagatgtctataggcgaagtaaaacaattatctatgtttgttaccgacgaagcatcggcgatacagtggctccgtcaattgctaaaagaaaaacctctaactttctcagacattaatccacaatttatgcaacagcttagtggctggaacaaaaatgaaatgatgttggatctacgtgagttactaagccaaaacttcctctgttatgactgccaggatgatgtaccagaccagatccacagttatctttctagtaactggaaggaactacgtaatctatccaaagataaccccgttttaatcactaaggctaaaggtcgctggtatgtacccgatccaaataaggcagaagatctagaaaaactacgtgaaaaatcactacttaaagagtttgaagagtacaaaaccaccaagaaaaaacttaaagttttccgcatcgaagcggtacgggctggctttaagaacttgtgggagcgacaggagtatcctgctttgatcgctgtagccgataaactgccaagcagtgtattggaagaagatccagtattactgatgtattacgatcaagcggttaccttgagtcaagccgataccaatgacgagtggtga

SEQ ID NO: 278504 - DNA, 3726 bp, Morganella morganii
atgaaaaggtacggagagctcattcaatttgagcccgtaacaactattatcaaactcaaagagtctgccgaacagcacaaagctcggcagttggtggcgtcttatgttatctcggacaagatggcactaaagttggcggacatcattattccacagttgcagtttgaggaatcagttgataacaaatccctctgggttgttggtaactacggttcaggtaaatcacacctgatgtcagtcatctcagcaattgctgagttcccagaacttgcacaatttattactaacgacagagttcgccaggctgctggcaaaattgccggaaaatttaaagttatcagatttgaagtgggagctagtaaaaaagcctttgctgatatcgtcacagacaacttgacgtttagcttagcggagatggggattgattaccaattcccatcaatggatgaaatttcatccaatcacaaaccctactttgaagaaatgatggcgctatttcatcaacactatccagatcaaggtttgcttttgatttgtgatgaaattctcgactatctgcgctctcgtaaccagcaacaactgccgttggatatggcgatgatgcgcgtcatgggggaggtgattgatggcacacgcttccgatttatttgtggcgttcaggaagccattttcgacagtactcagcttgcttttgcaactcaggaggtcaagcgcatccgtgatcgtgcagagcaggtactgatcactcgtgacgatattaaatatgtggttgctgaacgtctacttaaaaaagatgcccagcaattgcactggatccgaaagtacctgcaacaattcaccccttgttttgatcgcatgaatgaacgactcgacgaatttgttcggatgttccctgttcatcctgactacatcaatactttcgagcgagttcatggtgcaggcatcgaacaacgacaggtattgcgtagcctctcgcggcagatgcaagctttaatggagcaacaagttccccttgataagccaggcgtattttcttatgacacctactgggatgaactcagaagcgatcccagcgccaagaccaacccagatataggtcaggtcattgatgtcggtgaaaccctgtttactcgtattgaccaagcctatccaaccgcaactgaaatagactttgccaaacgcctggtagcaggtttggcaattcatcgtttgactgttggagatgtttataacgagatgggagcaactgccgccgaactgcgtgattcactctgtctctatctgcctggtatcgagcaattgcctggagaaaaaagtaaaaatctggaaactcagattgttgctgtattgactaagattcgaaaaaccgtcaatggccagttcttttcaaagaacaaggcaaacgatcagttctttttggatttgaaaaagactgaagattttgatgcttacattgaaaacaagattcccttgcttacggatgatagtcgtaacggtgcctatcgtgaagctatgctgcagatcctggaagaaactgatatgcagcaaccaaatattcagatgtggcagcacgaattgaaatggttggatcgcaatgtcaatcgtccaggttggatgttcttaggctcacccaatgagcgagaaacagccaagccgccgctcgactattacatgtactttatacagccatacaacccaccgaaacagaaaaaagagtacattcgcagcgatgaagtactatttatactgcaaaatgctaacggagattttgatcgcagcctgaactactatgcagccgctatcgatttgcatgcttctgctacaggtaacgccaagaatgtctacaaacttaaggcggatggttatctgagagagatgcagacttggctaaaaagccatttccaagatgcctacattgcccaatactatgggcaaagcaaaccgatgatggactggctcaaaggtacctctgtccgcaacatttctgtgctcggcgatagccaaattggcagcctcaaggatatttttgaatccgttgccagtcatattttggctaatcactttgtttcattagcacccgaatatcctacttttagtcagtggatcacctatgagaacatagaaagtgccgccaaagatgcattaagtgttgtctccggtggcgctgcgaccaagcgagccaatgcagtccttgacgcacttgaattactggatggcgataaaatttctccgctacaatcacgctatgccaaggcggttttagctgttttgcaaagcaagccacaaggccaagtggtaaatcaggcagaactattggaggccatcaattctcgactctattttaagccagaaagcttccgactagaaccggaatggctactagttctgatcgcctgtttggtttacagcggcgagcttgaattagtcgtggtcggccataccctgactgccagcgatgccgtcaaattcaaatccatttcatttgatgtactgaaagactttaaacatatccaagcgcccaaggattttaatgtcactgcattaaaatctctactcactctgttggacatgaatgacggcttagctacctcgatccagcaaggtgatgagagaatagtacgcgaaatgttaaagcgtaccgaggtgctgattaacgagctagtcaagggacatcagagtgtcaaggatcgcttaccgctatggggacaattagttctagaagagggagaggaacagacgctgtcggcccagctgtctgagctgaagagttttttggaaaccattcagcgctacgataaaccgggtaagctgaaaaaccttaaggcgaccgctgcagaaatcacagatttccaaaagatactgcaggcatggcacaactttgtgcagcttaaagcagttgtaagcgagctgacccctctatgcacttacctcaaagaggctcaactggtactacctgaggagttcccttggcaagaaaaagtgaaactggcgcgagatgcgctaagacaaggtttggctgatccggtattacgtagtgatgaaagctttaaatcagagcagatcaccgctttgactgcgttgaaaactgagtatgccaagcactatattgagctatatatgcgggtgcgtctcgatagtagcgatgaaaaaaccaaagccaagctgttaagtgacgagcgcctagcagagttggatatcttgagcggaatcgccttgctccctgcccagcaactggctgattggcgcaaagacgctgcgcaattgcaagcggccaagcctattgatcccaaacagttagcgatgaatgccaatccggcagaattcaatgcgcgtcaagaaagcggcaaggcaccggccagcgaacaattaaagaatctggaacagcggctcgatagcttgcagagcgattggctcagtaacctgagcaacctgctagatgacccgtttattaaccttgaactacttaaaccggttcaagcgcagttaattcgtgattttattcagcaaggtctgttacccgaaccaatggatttcacctttgtgcaggcagtaaacttggtgctggcggggttggaagaggtgaggattagctcagtcgaactcgtaagtgccctcggtcaaggtatgcctcagagtcgcgatgaaataactgatcgctttaaccggctacttaccaagctctgtcagggtaaagacctgaataaaatccgcattatcatcgattaa

SEQ ID NO: 278505 - DNA, 519 bp, Morganella morganii
atgattagtcaaaacacctatactacaatcgtatcatcgatttatgatttgctgacggaaaccaattcagcccttatgagattgtgtgaccaagctagctcgttagtgctaatcgtcaattcaactgaacaagccatagggccttctctgctgtcagaagagataacgttacttgagctatctgaacagctatgtgaatatctactaccgctatcacgtagtgatcgatctcgcaaggcaccagatatcctcactcaaatactaaattgtataacatctgaagtagtgtggatggaccggattcaagctctatttgaaccatctttggaactagatcctttgcgccagctacaagagctagcacgtatcaagcctatcatcgctatctggccagggcagattacagaacaatttttaaccttttcagttccgggaagggtcgattatcaatcttacacagcgaatgagttagcaaatctgcccatcattcactttgtcgagcagagggaatataaatga

SEQ ID NO: 278506 - DNA, 303 bp, Morganella morganii
atgtttaaggtttgcattaatagatatacaggcgataatatcagggaattaagaaaaaataacaaccttactactgctcagctcggtggtgtagttggggtatcccagcaacagatgtcaagatatgaaagaggggagagtaaaatagacataattttaatatatacgttaagtgtttactttgattgtccggtggaatatttttttcctgacgatactgaaattgtttgtgatgtattatgtagtaatgaagataaagttataaatagtatctgcagttcatctcttttgatgattaaataa

SEQ ID NO: 278507 - DNA, 723 bp, Morganella morganii
atggtaaccatcagcataataaaaaaaatggtatttctaataatgataatctgtccattgtcagctgcggcggataatgcctggtatgtgagcataccaaagtcgagatttgatccttctgcgccatgggggactcggttccaatatacctccatactgtatctcactgagcaaggccttaattcaacacttcctctcaattatagctcttgtgcaactaatggctgctatgtcgctgtcaatacgcaaagtgcagaaaacccagctaaagccttcaatctagacccagtacatgaacgcgttttttttagaggctcaaccgtcggtgaagccctcacagccttatacaagcgtctaggctcaatgacttattcgaccgattcaaccgcaccagatcgtacaaacgaagggatcacttggtgcggtgctgtcagcatttcccccacggggtctggcgcatcgtatgtcgtgatgaatggtggtgaatgtggtgaactacctccgccaaatgtcgagtgtgcattattaacttcagatacctatttagatcacggtacgttatctgtagctcaaattaaaaattcggatcaactcgcctcagatacctttaaaattcggtgtaaccgcgataccaacatcctgctttctattattagtcccgatgaatcaaaaagtacggaacaagatggtacacgaattgtttttgaagacagggggggttag

SEQ ID NO: 278508 - DNA, 936 bp, Morganella morganii
gtgtctgactccctgacacttcgtcccccagtgaacggtcataaaattcaccgtcattatctgcctgtctttaaaggcaaattaccggccattgcggcggtgcgccgtttttcggcggcactatcccgtcatgactggaaccggaatccccatatctataatctgcgctgtgaacgtaatcagcgggtctctgtgcgctccgagcgccgggaaacctggtatgcgctggcgctggcgatgatagccaatgcggactacaacccggacagtgaagcactgtttgaggtgatgtgtccggtcgaaacactggccgcacagtgcggtcagctgcatcagtatgagaacggccgcaaaagctatgatccggtgctgcacgcgctgcacgactgggaagcggcaaatctgattattattcaccgtgactttgaccgtgaggcgaaacagtacaaggcgatgcgtatctggctgcggccggagttttttgccgggctgggatttggtctggcggcactgcgtgacattgtcacgcgtttccggcgctggatggagcgcaaagggctgcgggaagagtatcagaaacgctatgcccgtcatgtgctgcgcctgagccgctcaaatgtggcgtcactggataaccggcacgcgctgaaaaacctgctgaaaaagctgcgccgtctggtcaccggggacgatgaggcgctggaaagcgagaagaaacacctggaaaaagccctgaaagagaagaaagcacagctgaaagcgtcccggctgcaggaagatacactgggggatgcctggcggctgtatgagcgctggaagcagataaacccggtggctgttgtccttgcgctggagcagcggataaaatcgcagttcccggcgctgcacggcgagctgctgtatcagtgttacctcgataacctgccggatcactaa

SEQ ID NO: 278509 - DNA, 5082 bp, Morganella morganii
atgctgagtgtcgcaccgatagcccaaaatgcggaaaattactataccgctcaggataactactattttctcggtaacgcggagtcccgctggctggggaaaggcgcggaagcgctgggactgaccggagaggtcagcaaagagcagctgcgggagatactggccgggcgtctgccggagggcagcagcctggagcgcacggaaaacgggaaaaacacgcaccggcaggggcatgacctgaccttttccgccccgaaaagcgtgtcggtactggcggtggtgctcggggatgagcggatgcttgccgcgcacaatgcggcggtgaccgccgccctgaaagagacggaaacactggcctccacgcgggtgatgaaagacgggatatcagctccggtcatgaccggcaatctggtgattgccgcgtttaaccatgatacctcccgcgaacttgacccgcagctgcacacccacgcactggtgatgaatatgacagcgcatgaggggcagtggcggacactctccagtgacacccggcataacagcggattcagcgaggcggtgtataaaacccgtatttcactggggcggatatatctgcatgaattacggcaacaggttgaaaaaatgggatttaaaacacatgacaccggccgtaactggttatgggaaattgaggggataccggttgcacctttttcgcagcggcggcagcagattctggacgccgccgggcatgacgcctccctgaaatcccgggatgtggccgcgctggatacccggcaggccaaacggacgccggacaaagcggaactgctcacggagtggtatgaccggctggataaaaacggcttcggcagtgaggagcgcagccggtttaatacggccgcgcaatcccgtgagcaggacagtctcaccccgccgccgttaccggcagcactgcagaaagcggcggatgccgcgctgacagaagcggtgaacgcgctcagtgagcggcaggtcagtatgacctacagcgcggtgctggcaaagacgttaagcggactggatgcccgccccggtatcatcacggtggtgagggctgccattgaccgggccattgaacagcgtcagctgataccgctggacgaacagaaagggctgtttacctccgccgcccacctgacggatgagctgaccctgcagcagctggccgcagaggtgcggacagaaaaccgcacgccggtgttccgggtgccggttaccccgttcaccggcaccgcacaaaaactggcggacaccctgccgaacgcggccgtgattgacagccggggcaaccggcagatgcagcgtgaccggctggcggaaaccgccgccgttgccctgctgcagggaaggacagtcctggtgattgaggcggacagtaaacacaccccgccgccggtcagcggcaccctgagcacagacaaacgccgctggacggaaaaacccgcgctgccggtgaacggcaccgtgattgtcaccggcgcggaaacctggtcactgaaagagacggtacagctgtttgcgcaggcaaaagagaccaatacacagatactgctgctcgacagtgccggacgcaaaggcaccgggaatgcgctgcgcaccctggaggatgccggggttgtccgttttacggccgccggtaaaccgccggtgcagacggaaatacacagtataggggacaagcagcagcgttatgccgccgtggctgcccgttatcaggcactgcgccgggagggggtgccggtcacggtacaggtgacgggaacccgcgaacgggcagcactgacggacgcggtcagggcggaactgaccgcgcagggcgtattacagggcagtccggtcagtgtcaccctgctgacgccggtgtggtcagacagcaaaacccgccgggatatcagtcagtaccgggagggaatgatactggagcagtggcaggacggtaaaaaaagcgcggagcgttttaccgtctcccgggtgacgcctgccacccggagtgtgacgctggaagacagccgggggcagtctcaggtgataaaggtgacgaaacttgacagcagctggtcattgtttcatccggcacagaaagccgttgcggcaggggaaacgctgaccctgctggcaaaacatggccggatggccgccggtgacaccctgaccgtgaccgcagtgacggacagcatcctgacggcagagcatcgcggccgccgggtgacactgccgctcacagccggtctcaaagcggattacgcttatgtgaccacgcccgggcagtccctgccggataatcaggtggtgctggccgccgcgtccgtccgtgatacccgggccgatttttttaacaccgttgcccgcagcggagaaaaaattgaactgttcaccccgctggacaacaccgaaactgaccgccgcctcgccaagtcaccgcactatcagaccgtggccgcccgactcgggactgacccgcaaaatccggataactccgtaacacaggcggcagagcgtctgtggtcagtgccggagaaagctgtgcggcagggcattgtgttaacgcaggaaaatcaggtgatgttctccgtcacggatgtggtggcaaaaacgctgccgctgcacccgtccctgacggcggaaagcatccgcctgcagaccgcaaaaatggcggcggccggtgaactgatcccggtgccggggtcgggaaaaaatgagtacgtgacggctgccgcgtgggaatcggaaaagcagattatccgcgccatcctgcagggcaagggcacacagcagccgttttttgagcgcgtaccggaggccatgctgaccggactgaccccggggcagcaggcggccacacggttaattctggagagcaccgaccggtttatcgcggttcaggggtatgccggggtcgggaaaaccacccagtttaaggcggtgatgcgcagtctggatttgctgccggaagatgcacggccggaggttcgcggtctggcaccgacacaccgggcggtcggggaaatggcggcaaccggcgtgaaagcgcagaccctgcagtcgtttctgactgataccgcgcagcagctgcgtaacggggaaaccccgcgctttgacaataccctgttcctgattgatgaaagctccatgattggtaaccgcaacatggcggaagtggtggcggtgattgaggcaggcggcggccgtgcggtcaagagcggtgacaccgcacaggagcaggcaattgacagcggtacgccgtttgaactggcacagacccgctccgcgctggataccgcgattatgaaggaaattgtccgccagaccccggcactgaaaccggcggtcgaggcggtgattgccgggcagatgaaacaggcggccgccctgctggaaaacgtgtcccctgacatcgtgccgcgtctgccggatgcgcatgtaccggaaaaatcggttatgcaggccggagaggagggcgttatccgcgatattgtccgtgactacagcagccggacaccggaagcacgggaaaaaaccctgatagtggtacagaccaatgcagacagggcagcggtcaacgccggggtgcatgaggctctgacggcggggcaggacgtgcgcagaatccggataccggtactggtgcaggaaaaaacacagacggagtccctgcactcggtggccggactggcacagcatcacggcaaaaccgtcctcgccggtgataactattacaccctgatagtcacggagcgtgacaaagcggacggtgtggtgatgttgcgggatgcggataagcgggagtttccgctgtccgcctttgagaacagctcgcgggatattcaggtgttccggacagaaacccgtgagatggccgaaggggagaaagtctcctttacccgtaccgaccgtaaccggggacgggtggttaacagcacccgcaccgtcagtcagatacacgatgacggcaccctgacgctgacggacgggcgggacagtatccggattaacccggcggagcctgctgaccggcacattgactacggttatgcgggcacggcgcacaaggcacagggggcgagtgaggagtatgtgattgtgctcggcggcgtgaccggcggccgtcagccgctggcctcgcggcgtaatgcctatgtggcgctgtccaggatgaaaacccatgtgcaggtgtacagcgatgacctggacaaatggctggataaaaccggcagtaacgctgtccgcccgaccgttcatgaccttctgctggcagacagtgaccgggcagccgcgaccggcaaccggctgtacgcgggagcaaaaccgctcagtgatacggccgtcggccgcacgctgtcccgtgaactggggctgaccgcagagagtaccgcccgctttgtgtacggcagtcagaaataccccgagccgggtgtggcgtggccggtgtatgaccggcacggcagaccggcgggtacgcggataatgccggtgctgctgaatgaacaggggcacctgaacggcgcagggcaggaacatcgtcttgtcggtcgtgaggaagccgcctggatggtactgcagcgcggccgtaacggggaaacgcggattgcggagagcatgacggaagcactggcacagcttaaacagaccccggaaagtggtgtggttgtccggctgcagccggaggagccggtgaacgcggcggtgatgcaaaaactgaccggcgggcttccggctgacctcagcgtgccggacacactccgtgccggtgtcccggcagcggatgacccgatgaccctgaaaacagcggaagagcagcgccgtgaggccgaactgaaagccgccgcattaccgtcaaaaacggacaccgtccgtgatgcgccgcaggacgcccgtctggaagcggaaattacccgtgaacagcagcgtctgcagtcacaggaaaacgcgcatgaacagaaagcagccatcagcctcgatgacatgatccggcaggaacagttacaccgtatgcggcagacggaacaactgcagcaggccgagaaagatatcgtgagagaaaaagagatcggggaatag

SEQ ID NO: 278510 - DNA, 2208 bp, Morganella morganii
atgagttcaacaaaacatattacccagggcgggcaggtattcggctacatgctcgggatgtttatgcaggtgaataaacgtatttcattttacctgatattattttatctgattctgaccccggttattttttatctgaaagtcccgctgcaggaaattaaaaacggcggcctttactggtggttatattttatgtcgccgggtgagaaagccttataccgggtgccgccggtttatgattttaattttgacggaacggtgtaccacttcacgtcagcgaatatcttaaaagatccgtacatgacctatgccggggacatttttctgcaggaactctggttatccctgttctggtcttctgtcctggtattactgctggcgtttgtggtctattccctgctgcaccggctgggcgaaaagcaggccagagacgagacaaccggcggccgtgagctgacagaggatgtcagtgccgttgcccgccagatgcagcgccgccgtgaggcgtcccccatccggattgataagctgccgctcattctcaacagcgaagtcaaaaacatgctgatgcacggtacgcccggctccggtaaatccaataccatcaataaactgctgctgcagctgcgtgagcgcggcgatatggtgatcatcttcgacaaaggctgttccctagtcaaaaagcactttaatgaaaactgcgacaaattactcaatccgctggatgcgcggtgtgagaactgggatctgtggcgcgaatgcctgacaacccccgattttgacagtatgtccaatacccttatcccgcagggcaccaaagaagatccgttctggacgggatctgcccggaccatcttcacggcggtggccgcaaagctgagaaacgacccagaacgctcttacaacaaactgctgcgcaccctgctggccatcgatttaaaggcactgcgggagtatgtggccggaaccgaggccagtaacctgatggaggagaaagtcgagaaaacggcgatttccatccggggcgtgctgaccaactacgtcaaggcactgcgctatctgcaggggattgagcgtaacggcaaagccccgtttgccatccgtgagtggatgaagcaggccaatgagccgaaaaaaccgcacggctggctgtggatcaccagtaatgcccggcagcacgaatcgttaaaacccctgatctcgatgtggctggcacaggcggccaattgtgtgctggaaatgaatgagaatccggaacggcgtatctggtttatctatgacgagctggcctccctgcataaactccccgaattaccgcaggtactgtccgaagcccgtaagttcggcggctgttttgtgctgggattccagaacaaaccgcagctggacttcacctacggggaggattatgccgatgcgatgatggatttgctcaacacgcggttctttttccgttcccctgaccagaatgtggcgatgtgggtgcgtgaccagctggggcagaagcgggcaaaactctttaacgaacagtacagctacggcgcggataccgtgcgtgacggggtgtcgttcaccaaacaggaggacgacaagaccctggtgagttattccgatatccagaaactgccggatctggagtgctatgtcaccctgccgggggattatccggtggtcagaatgaaaatgacctatgaaaaaatccggccggtggctgccgaatttattgaacgtgaactcaatgacagcctggagcaggacatcaccgcacggctggatgccggagagcaggatgacgcacggctgcaacgtctgctcagcagcagcaccccggcaccggaaaccccgtccggtcttccgccgcagacagcggcagtgcttgtcgtaccgccggtgctgacaatggcggccgcacacccggcgccggttgttccgtccgtgacaacaccggtaacagcagtctcatcagaaaacaccacacagaccgcacagactgacactgccgtgaccggcggccgtgagcaggacgtgcctgacatggtgatagacaccgcgaccggtgagattgtgtatccgggggcagacgaaccggatgcggagacccgggccgtgatgtatgagaactacagcgccctgcatcaggaggagaaaaatatcgcggttcaccgcagggcggagccggatgatcacgatgaaccggaggtgtggtaa

SEQ ID NO: 278511 - DNA, 378 bp, Morganella morganii
atgaaaaaattaatattcagtcagtcagcactgatgtttcttttattgctgaacaccggttcggttagtggtttacaggtcagtgatactgtttattaccagacgctgcgggatgttattaaaagttgcagtagttacgttgtgggaattaatcatcctgagtactcagaaaaagaaagtgtcacagagtatctgaattatctcgggatacccctgaaaagtgccggtgaactggcagatgatattttagctgataataaaaccggcgttacacctgacattcagaagtccatttttgttaacgggtttaacagagagcagggcgtaacgtattgcgctgttaaatctgctgaaagcctgaatttactgaataactga

SEQ ID NO: 278512 - DNA, 207 bp, Morganella morganii
atggctgatgaaatcgatgtctctcaggctgagagtgattttttactgtctttgcggttaagtaaacgggcacagtatcagggggaaagtgctgaacattgtgttgactgcggtgagactattcctgttggccgccggtcggcactgccgggtgtgcggtactgtgtgttttgttctgaataccgggaggccgcagacgtacggtaa

SEQ ID NO: 278513 - DNA, 273 bp, Morganella morganii
atgaaaattaaaaaatatgttttctttttttctatattttctcttgtcggctgttcatcggttacaatgaataacaagagggaatataaagatacattatcttataaaaccagtgcttttattgcggatgctaactgttttcaatcgttagggataataaaaaacggggagtattatgaaaaaacactggagttttggagttttattatcaatcacgttgtgatttacataattatttttctgatgagtgcaaagatgaaggtggcgaattga

SEQ ID NO: 278514 - DNA, 324 bp, Morganella morganii
atgggaatattttctaaaaataaaaaaatagaaaatgtattttcttctcattctacggtctgttttatctcttcggtaattccacaacgaaaaataatcactaatttaggcatggtaaaggctagtatttctcatcgtttttgtggtacttacgatggagatgataatttaatacaggacgagttaataaaaaaagctaatagtgttggcggtaatgcaattataaactttaggtatgaaacattcctctttcagtctggtggtgatggatggaataatgcttttattattgcatatggtgatgctgttcttattgatggttaa

SEQ ID NO: 278515 - DNA, 2868 bp, Morganella morganii
atggcggttgatacagtctatgtgatggcaggcggtgcctacatggcacagattttcaacggtgtggcaacgatggtcggcacttccgcgtgggactccatgatgcggattgtgatgctgatttccgggatgagtgcgctggcagtgtatatgcggtcacatgacccgaaagaactggtgaaatttgtcgcgttcatcattctgatcaccagtgtgctgctgattccgaaacgctccgtgcagattattgaccgcagcgacccgaccggcgtgtaccgcgtggataatgtaccgctggggctggccgttccggcgaagtttatcaccagtatcgggacggatatcactgaaatctatgaacgtctgttccatctgccggattccctgatgtacagcaagaccgggatgctgtacggggctgacctggtcggtcatgtcagcgatgtgatgacggtgaacggcgaccttgcggaactgatggggatgtatgtcaaaaactgtgtgattggcgacatcatgattaatcataagtattcctttcaggaactgatgaacagccgggacccgtataccctgatattccggcagccgagtccgctgcgcggggtgatggtgccgtacggcaacagtgaggcacagcaggagggattctggacatgtgagatgctggcgaaaaatgtgctgatgccgaagctggggatagacaccacaaccggcggggcaacctgggaatatactgtccgccgcctgttcggcggaaaaccgaatgccgatgtgctgtatgccacgctgctcggtgacagctacaattactattatcagggcgggcagaccgccggtcagctgatgcgtacctcggtggtgatgaacgcgctgcgcaacggtatcagtgcctacagtgcacagagcggtgacacggccagtctggtgaatctctcatcctcttcgtcgtataacaaaatgcggttaagctgggcaacttccggctctatcggggtgaaatttctgccgctgatgaacaccattctgcaggcgctgatttttgcgttattcccgatcaccattttactggcgacaattcatgcgctgaccatcgggatgctgaaaaactacattttcagtattatctatctgcagtcatggccgccgatgtttgccattctcaacagtgccgccaccttttatctgcgcggcaaaaccggcggcacggaatttaacctcgccaatctggcgtccatacaggaaatgcacagtgatatcgggctggtcgcgggctggctgaccctgtccattccgtttatcgcttacggtattgtgaaaggcatggggtcagtggtctcgcaggccggtaactacctgggtacggcgattaacagctccgccaccgcatcttcatcccaggcggcagacgggacatgggcattcaataatatgcagacggacaatgtctccggcaacaaatgggataccaactattcgcaccgtgagggacagaccacgcagcagcttgccagtggtgcctcggtaacacagacggccagcggacagatggtgtatgacagctcaaccgccatgtcccgtctgccggtgtccatcaaaggatcggatgtcacggccagtaccctgcaggatatggcgcggcgggcggatgttcaggcgtcctccgcccagcacggttaccagagcagtgtgaacagcggctggaatcagctgagtcagttctccacacaaaccggtaacagtgcgacgctgtcctcgggcacggattccggtatgaccgcgaaccagtcacaggcggtggcgaaaatgcagaatgcggtgaatacggttgcgaaaaaccaggggatctcaaaacgtgaagcctatgaaatgctgatgaacaatcaggtcagcagcgggtatacagcaggtattaaaggaagtgttggtggcaatacccctgcagtattcggagttaaagcgggtggtgaaatttatatagatactaataaatccgatcgtgacagcatcaccaaaggcacccaggaaagcggcagccggaataccgattaccattacgggcagaatgtccaggcgcagaaagacttccgcgaaggctgggatgtgctggaaagtgaacggatgagccacggcaccagtcagaacgataataccgccaattctgatattaaccagtttgcggccacactgtcagtcagtcagaacagttacgaccagtatatgaccagccggacacgcagtcaggaatacagcgagatggcctccctggcgaaaagtcacagtgcgcagattgacagtaactttgaccagcagtttgtgaactatgtgatggagaaaacaccaagtagtgcagaccgtattctgagtgatacctcatccccggacgttgcccgtgagcgtgacgtgctggcgaagtcgtttgcggaagaacggatagttccgcaactggagtcggaacatgcggcgaacaaagcgaaagtcagtgaaccgggcatttctgacaccggtgctggttcagtatcggcagatccggcgacaagttttgtggagaacaagagaaaaattgaaaaaatgagcgatgaggcaaatatccggcgggatattcctggtaaagtggctgagcagcagtccaaaaccgaacagcatatccgtgataaccgtgataaggtggcggaagaaaaacaatctcttgatactcagaaagaggtcgccgtgacggaaaatcaggtacagcaggtacgtcacactgggaattttaatcaggccaaaaatgagcagaaactgaatcctgaagtccaggaacgagagcaacaggaacgggaaaaatcattaagagaacaaagtttcaggcaaccaagaaagtattaa

SEQ ID NO: 278516 - DNA, 1398 bp, Morganella morganii
atgaataaacaggcattttccctgttactggccggggttctgttctccggcgcggcggcagcggatgtgaacggtgatatgaataagtttttcaacaagctggggtttgacagtaacgtcaccggtgccgctgcgtggcagggacaggctgcagggtacgccaccgggggcaatatctttctgcgcaaccaggtgaaacagttacaggtggtctcctttaccccgccgtctctcaatgccggctgcggcggcattgatgcctatctcgggtcattttcctacctcaacagcgaacagctgacccagtttgtgcagcagctgatgactaatgctgccggatacctgtttgatctcgccctgcagaccaccgtaccggagctgaaacaggccaaagatttcctgcagaaaatggcctcggacatcaacagtaccaacatttcctcctgtcaggcagcacagggcattatcggcggcctgtggccgaccaactccgtccagagccagaaaatctgtcaggacattgccggggaaaccaatatgttcgcggactgggcggcttcccgtcagggctgtacggtcggcgggaaaatggacagcgcgtttgataagtcacccgacaacatgaaagaccaggtgatgcgcaacaagaacctgatgtgggaggtgctgaaaaaaaacagcatgctcgacgggaatgatgagctgaaagaactggtgatgaacctcaccggtactattattttcggcccgacaaacggggatgtgagattcatccccgtgaaagccaaccggcaggacgtcatcaaagccctgatgtacggcggacagattgaaatcagcggctgtgtgtccgtgggggactgtctggaattacgcaccaaaaccatcaccgtcagtcagaaaaatgcgctcaatgaaatggtgaaaacaaatattgaggggattcagggcaaactgcagtccgataccgcgctgtcttcgcaggagaaagggtttatccagagcacctctgtccccattctgcgctaccttgttgacccgatgatgctcaatatcaaaagctctgttttgccgacgctgtcagactacattgcctatgacattttgttccagtatctgcaggagctggttgaccaggccagagcgcagatgaacagcaaaaactttccggaaggacatatgaaatcgttacgggagaatatctcggaggctaaccgccagctggagtccctgcagcagaccgtggaggtgaaatccaatgtgctgatggatctggacagacagatgagctatctgcgccagcagacctcaagccagctgcaggagcgttttcagcagaattaccggtttaacattgtctcacctgaaccgaaagggagtaacagcaatggcggttga

SEQ ID NO: 278517 - DNA, 348 bp, Morganella morganii
atgaaatttagaaacgaaaaaaccacgatactgactgacagagaaataaggacaaaccgtgcctttgacaacttcattatttacctgacggccgctgttgtcgtctggctgttactgagcgctttatttaataatgcctggccgggcaatgatattccggttccggaaaatgcgtcacgggtaaaagacatgctgaatgtcctgatgtacgtcataccactgtcatttgccggagtcgctctcggtaatgcctgcatggttctggtgaactgtttttatgttctgctggtatacggcattcctgtcctgtaccgcagaattatccgtcggggggaaagccatgaataa

SEQ ID NO: 278518 - DNA, 525 bp, Morganella morganii
atgaaacgtctgtgtattctgctgctgatggtgtgcttaccggcggcggcaggcactctggaggatatcgccgccctggaggcggccaaggggcagaaagcaccgggcggtgacactgtcaccgcgcccgctccgctgcgccgtgccccggctccgcgtccgtatgccctgccggacggccggacggtcaacctgaatgattacaccctggtgctgtttatgcagtcggagtgtatttactgccgtcagtttgacccgctgctgaaacagtgggcggacatgcgcggatttaaggtgtttgtctacagcctgaacgggcagggtgacccgtcttttccggatgcgataccggcgcctcagtccgtggtacagacctttttcggcagcgggataccggtgatgacgccgaccctgtttctggttgaggtcaataccctgaaaaccgcgccgctggcacagggattaaccccgctgccggagattgaaaaccggctgcaccgcaccctgatggcggcacagccataa

SEQ ID NO: 278519 - DNA, 285 bp, Morganella morganii
atgaaaaaactgactctgaccaccctgcttgaaaatattttcctgtttgcgggcggggcgttactggccgcgtcgatgctgttttacgtgctggccgacataatgatgaataaccggatgctgccggacggcagcgggattccggcggaatttatccgcgacagcggcacggtgtttatctttgtgaccggcgcggcgttcagtctgaccggtctgatttacagcggactcaatgcctggaaaaaatttgtcagcggcaaaccggcagcggggaaatccgtatga

SEQ ID NO: 278520 - DNA, 792 bp, Morganella morganii
atgagaaaacccgcactgatgaccctgctgtgtctgtgtgccgccgctgccggtgcgcagcccggtacggtgcagccgcagacacacacttatgtggacgacccgctgaccggctggcactggtataacgaaccgcagccggaggaggacgatgagagtgaaccgccgccgcaggacactgtcccgttgtcctcgctgcctgcggcggtgcagaaaaaagtgatgcagaagatgacgcaggaggcactggatacggccatcatggtgccgagtgcggaaaatgccgcccggtttctgaccctgcagcgttactggctgacgaagtccaccgaatttgagcggtcagcccgcaaagccctgctgtattaccccgcactggattacaacctcgaacacagccactacaacagcacggtgccgctgcagctggctgccacccgggagaaagaggaacaggctgtccgcgaactgtccggccgttacgggttatttctgttttaccggggccgtgagccggttgataaccagatgagcaccgttgtcgcccagtttgcgcaggataacgggatcaccctgatcccggtcagcatggacggggcacgcagtgacgcgctgcccggcacccggacggacagcggacaggccgccgcaatgggggtcagtcattttccggcactctatctggttgaccccgcctctgaacactaccagccgctggcgttcggctttatgacgcaggacgcgctgtcccgccgttttcttgagatagcgaccgattttgccgctgattaa

SEQ ID NO: 278521 - DNA, 1818 bp, Morganella morganii
atgactgatatccgtgtgttaccgctgctgtgtgcaatggcctttccggtcaccgtcttcggtgattacgatgccgggtcccgctttgcccatgagcagaaaggacagggcaccggcaccattcagaacatgaagccggaagagatgatccccgggtataccgcaaacccgccggagggcggctattacggcggtgtgcaggccggagcggcgccgggtcttgagaatgccggaacggatgcactccataacacggaggccggaaaaaccgtgatggacgttatcaaaaaccgtcagccggacagaccgggtctggatgccccgtttatcagtaacgggctggcggtgcatgataatgccgaaacggtcaccggcggtacgtctgtcccgtgcaaagacgtgacgctggataaaaccgatatcaccacgcattactgtgagcggtcaccggcggtacagctggcctgtacgcgcaaagcggtggtgaactttaaggaaaaggttattaccacaacggaaaccaaaacctgggcattcggggatggcggccgtaatccggatcattattcccgctccggggacaacttcacctatgtgtttccgtataacggcaaaataacccgggcggtctgggcttcaaaaaaaggaataggccggggagctacggtgacctcttatcttttcggcacctctgtcacgtataacacccgcaatgcaaccaccgccgcattttacccggtgaaaagggatttcaggcagggggagcattttgtggtgacacatcccggcagttacggatctgtccagagtatcaccagttatccgctgcgcatcaccctgaccattgaggttgataagaaagaagtcacgtatgagccgtatattgaatgggtcgaaaactgcccgttcgataaatcacaggaagtgaaactctcaacacagtgtacggaggcaggcggcaccagaaccgttgagtacggcggtaaacaatacccggtgtacagtgactgctggcagtataccgacaactatatttcccaggaggcggataacggctcctgtgatgcgctgatgaaagatcccgcctgcaccctggcaaaaaccacctgtaccgaacaatccggcgccgcctgtctgcgggagcaggcagttttttcctgtgagaaaaaagtcagtgccgccgggcagttgtgcggtatggatctggtctgcaccagcggagaatgtgaccagattaacagcggcggggtgaatgattttcagcacgcggtctccgcactggcggcggtggccgctgccggtgaggatgtggcggcactgaatgatgtaaatgtccgtgcctttaccggacaggggcagtcctgccgtaaagcggctgccggattcagtaactgctgtaaaaacagcggctggggtaatgatacgggactggccggatgcgacagtgaggaaaaagctatcggcaaggcaaaagaccgcaaactggcggtgtatgtcggtacgtactgctcaaaaaaagtgctcggtgtctgtctgcagaaaaaagagggttactgcgtgtttgacagtaagcttgccaaaattgtccaggagcaggggcggagctggcaactggggatcggcttcggcagcggcagtaatccggattgccggggaatttccattgaggaactgcaggcaatagatttcggccgtcttaatttcgcggacttctacgaggatatggaaaacggcacggatatcccgtcagaccaggcgctgattgaccgtgtgaaagagcagatcagtaaccatctgcagcgggggacacagccatga

SEQ ID NO: 278522 - DNA, 606 bp, Morganella morganii
atgaaacgattaattctgctgctgaccggactggctgcctttgcggccgccgccggaacggtgcaggaacagcagcagtttatggagtcgctgcgcgacaaaagccagtccctgcgcgaagcgccgcccgcgctcccggaaacggccgcacagggtgaactcagtgaaactgacgcggcatggcttgcgcagctgcagcaacgccgtcagcagaacagtcaggcatcacagccgcgcacgcagtcagacgcactgtacctgatttcgttctccgtgccggaagacggcctgaaactgatgatcccggaagccgccggattcgggataccgtctgtgattaacggtctgattgacaatgatttccgcaaaacggccgccgccgtattccggctgacaaaagagaatgaacacagcggggtgcagattgatccgaccgcgtttgaccgtttcggtatccgtcaggtgcccgcgctggttgtccgctgcggggagcagtatgacgtggtgtacggcaacctgaaaatcggcagtgcactggaagcagtcgcccgtgacggcgaatgtgcggacacggcgcagcgtctgctgaacggaggggaaaagtaa

SEQ ID NO: 278523 - DNA, 984 bp, Morganella morganii
gtgaaaacaggatggattgcgctcggttttgcggtgtttttcctcaccgcaccggtgaaagctgacccggcgtgtgccggaaaattcgtcaacccgatcaccgatatctgctggaactgtctgtttccgatgactatcggtaacgtgccggtgttcccgggcattgccccggatactgaaaacccgtcgatgccgatccagatctgccagatgggaattttgttccgtatcgggctggcgattggttactgggagccgtttgccctcaccgatgtgacccgttccccgtactgcatggtgaatctcggcgggtttaacctcaatatcggcaagatgggcggcggcacggccggtcagagtgacaaagaggcgccgggggcgttttatcatgtccactggtacaaatacccgctgacctactggctcaatatcattacctccgccgggtgtctgcaggccggggatatggatatcggctatctgtccgaactggatccgatgtgggaggacagctcactgtcctcggtgattgccccggaagcgtttgtctttgccaaccccatcgcacagggtgcctgtgcggcggatgccattgccagtgcctttaacaaaccgctcaatgttctgttctggtgcgccggttcccagggcagcatgtacccgttcaccggctatacctccaatgagttcagcccgcaggcgtcttctgtgctgctgtcggagcggatggcgttcaaactgcaccggcagggcatgatcatgaacagcaccggtcagaataccgccgtctgctatgaatacccgtcccccgttatgccgaaagaccgttaccgctatcagatggtgaatatgtatccggatacggccatgtgtcacccgttcggccggtcagtcatgcactggcaggtcgggcacgcgtctccggccagccggaaaaacttcggttacctgatctggcgcaaacgcaactgtgtttttctgtga

SEQ ID NO: 278524 - DNA, 627 bp, Morganella morganii
atgccgcgtttacctgtgatggtgttatgtctgctgccggtctgtgtgtccgcaaaagatctcggtgtgcgcggggatgtctggccggtcgcggagcagagtctgttatccctgattgagacccggctgaaaacgatggagcagaccggcgagctggcacatcggcaggaggactttaaaaaccgcgtgattgagaacacgctgcgcccggccccggtggaggggctggaaactgacacggagtcccataccgtctggtatgacccgacctttacggtcagacaggatctcgctgacgacaaaggccgggtgttcgcccgtaaggggcagcaggtgaatccgctggagagtatcgcgtttgcgcagaccctctattttctcgatgccgatgacccgcgtcaggtcgcctggatgaacgcacagaaaccggcgaccgtccgttacaaagtgatcctcacccggggcaatatccgcgaggccacgcagaccctgaacacgcggatttactttgatcagggcggggcgctgacgtcacagctggggatacgttatatcccgtcggtggtcacgcaggaaggtaaccggctgcggattgtgtctgccgccatgacggagggacagccgtga

SEQ ID NO: 278525 - DNA, 432 bp, Morganella morganii
atggcagccacaaacccggcattaacacaaaatactccggtaaaaccaccacggcgccgcagtcgccgccgtcatgactgtatccgtgccgtctgtttttttctggccgtctcggtggccgtcagtgccgggatatcggtactggttcaccgctggctggcaccggtcaccgtatcgtttgatctgacccgtaccgtggatcagttccgtgaccagatggcacagcaaatcagcgcggcgcatccgctgacggaagaacagattgcacagaccagcctccgttttcaggatgcgatgaatgacagcctgcaggaatacagccggtctcatcacgcggtcattctggttacaccggctgtggttaccggcacacccgatatcacggcggatattcaggcggcgatagcggaaaaaatgaacgggggggagtga

SEQ ID NO: 278526 - DNA, 2709 bp, Morganella morganii
atgagcgaaccgatatccgtgatggacatcctgaaaaacctgttccgggtgtccggcagaccgcaggcggaggcggatgaaccggtctccggcctgcacgaaaataccctgaaagagctgtttaccgactggcgtaaaccggacggtaaacagcgtgcaaatgcggcactggaagatatggattatccgtcattcagtaccctgctgccgtaccggctgtacgacccggattccgggctgttcctcaatgacaccacgctcggttttgtgctggaatgcaccccgctgattggcgccaacgacaagattgtcgatgcgctggactactttctgcgtaacaagctgccccgcaaaatccccctgacctttctgctgctcggcagcaaatgcgtcagtgacacactggcatacgggctgcaggacatgcagtggaaaggggatatggccgataagtttaacgccgtcacccgcgcctattatgagaacggggcattaaacagctttccgaacggcaaagactacccgctgaccctgcgcaattaccggttgtttgtcagctacgctgaaccgtgcaaaaagccggatgccctggcctttcagtcggtcaacaaaaccctcagtatcatccagcagtccctgtccggcgccagtattgcctcggaaaggatggatgataaggggcttatccgcctggtccgtgagctgattaatttccgccatgaccagatcctgccgccggatgacgcactcgatccgtatgaggagctgaattttcagggggttgaccgttccctgaccctgaccgtggagccggatgcgctgcgccagaccctgtcggtgccgggcggcaggaaaagccgcacccggatactgaattatgccctggagaaaaacccggtccgctttgccctgtggcagggcggggataatctcagcaatctgttagacccggcgtccaccgtgccctgtccgtttgcgatcacgctgaccacggaggtggaagatctggtggcctcgcagaatgaggccaaccgcaaattcatgaccaatgacagccgtgccaactccaaatacgccagctggataccgggggtgaaacaggcacgggatgagtggggggagctgcgcacccggctcagtaaaaaccagtccgccctggcgcggtacagtttcggtatcacgctgttctgcgaggatgatgatgacaaggcactgatggcggaaatggcgctgatgaacactttcaccggcaacgggctgacggtaagttccccgacctttatgcagctgcgcaactatctgtcgctgtttccgttcaagatgcaggaggggatgtgggcggatatgcgccgctccggggccacgttccgggcggaagcctttaatgtcgccaacctgctgccggtcgtggccgataaccgtatctcgccgcgggggctgccgataccgtcttaccggaatcagttgtcttttctgaatatctttgacacggcctcgggtctcggcaacgacaactacaatatggcggtctgcgggacatccggcggcggcaaatcgtttctgatccaggcgatgatccgccaggtgctggacggcggcggccgcggctgggtgcttgacctcggggattcctacaaggggttgtgtgaggcggtcggcggggtgtatgtcgatgccaccaccctgaaattcaacccgttcgccggtatcaccgacattaaggaatcggcggaaagtatccgtgacctgctgctggtactgtctaatccggcaggcggcatggatgacacctcaaaatccatcctgctcaatgccgtgcaggaggtgtgggaggggaaatccccgtcagggcgcaaaggccgctcggcgctgattgatgatgtgtccctgtatctgcaggcgcagattgacggcgggtattttgagaatgccgatactgtccggttccggatgcaggaaatcattgtttccctgaaaaagtataccacggaggggatttacggggagtatttcaacaatccggagcctgccctgaaagacgatgtccgtttttccgtgctggagatgggaaagctcaaaaacaagccggatttgctggccgccatcatgttttccatgatgatttacattgagcagcagatgtacctgtccccgcgcagtgagttaaaaattgccacgattgatgagggctggcggctgctcaaaagcacgaacacctttgtcggtgacttcattgagaacggctaccgcactgcccgtaaacacggcggtgcgtatatcaccatttcccaggggatcgaggattttgacggcgaacaggccagtctggccgcccgtgctgcctggtctaactcgtcctttaaaatcatcctcaagcagaaccccgaagcgttccgcaaatacaaccagtacaaccccgatcagttctccgtcagcgagcgtgccgtgatagagggattccctgccgcccgtgatgcgcatttcagtgcctttatgctgcgcatctccggtcaggtgtcctatcaccggctgctgcttgaccccctcagccgcgtcatgttctcaaccaacggtgaggactttgagttccgcgaaaatgcccggaaacaggggatgacgatcaacgaaaccctgtatcagctggcgcagcgtaattttccccgtgaaatggaggcgttatcacaatggcagccacaaacccggcattaa

SEQ ID NO: 278527 - DNA, 522 bp, Morganella morganii
atgaaaaatgtactcattatcagttgtgtctgtctgctgtccggctgtgccggaatgaaaagcagttttgactgtaacgccacggcgcaggattcctgcatgacgatggaggaggccaacaaaaaagcacaaagtcagtccctgtccgcgccgggggcaaaaaagtccgttccggcacagccagaggctgtccgtctgcccgctcaggcgcgtaacactgaaaccggctcaccggcaggcaccctgacgccgcgtccggcaccggtgatgaccacggcacagacggtaaaatccggcacggccgtctccccgcagccggttaccggccgcacttccggcacggtgaaccgcgccggttcggtctctgccctgaatgataccggcatcacacaggcggtatatcagcccgcaccgaccgcccgcgtctggattgccggatggattgatgaacatgacaacttttatcagccgtctgtcgtctcctttgtcgtgaaacgcggtcagtgggcggagtatcagtga

SEQ ID NO: 278528 - DNA, 369 bp, Morganella morganii
atgaataaatatccggtacttttcctgaatatcaccgtttaccttcttaaatataccgcttctgtatttttttatattccggtcgtctttttctggctgtgtgttttgttttatgtcaccgggaaagctgacctgtctgttccgggatatctgcctgaattaggtgtgatggccggtcttctcacgctgttggcggtatgggttgcagacctcgtcacgttcgccggaaaacaccggacgcagcctttctttttccgtgaatatccggcggataccgctgctctgctggtgatcacggtgacagtcttcgccgtcacttattgcctgccgtctgatgttttttccctcactgaaagcgcgttgcgctga

SEQ ID NO: 278529 - DNA, 252 bp, Morganella morganii
atgacaaaagatattaatatgaaacaaagccagatttccccgtgcagtccgtatgatttacggtctgttactgataatgagagaagtaccttccttattcagacgtcattaattattactgcccgcaacagcacactgacaaatgatgaaaccgtggtggaactgattacgggagaaacactgcggctcagtatgccggtcagtgagtttattgatgcgcttaaccttaaatatccttacgggattaaataa

SEQ ID NO: 278530 - DNA, 327 bp, Morganella morganii
atgacatttagttttgtttttttaggggttttaattattatttattttgtttcgctgcttattgactggtctggtatttatctttttccgctggtattcatgatgatgattatgatgtggaatatgattgaagccagtgaggaagggattgctcagggggaatattacttaaaacagtgccggttaactgagactgacattgataatggttttttctcctctgccaccaataaacttaactgcggcggcaccatcgtcaatgttaaaaaatctgattatgacaagtcagtcagcgaatataaatcagcagctgaaaatacaccgtaa

SEQ ID NO: 278531 - DNA, 243 bp, Morganella morganii
atgataataacagggttagctgtcgggtttattataattcatattggtgtatggcgatattatcattgtgaaaaaagagccggaaatataatcagtgccggtatcattataaccggtgttctggttattgccggagtttttgcaattgatgcagtaaactataaagaaaaccctttccggaagacttcaggcaaatatcacagtgaagaatgtaaacctcttgtgttatcagatggtatttaa

SEQ ID NO: 278532 - DNA, 510 bp, Morganella morganii
atgctgatttcaggtattgttctgctttacagtgcattgtttgtgtttgtgtttgtatgcaaaacggttaaattccgtgttatccggatgagccggatcaccggcatgctctttctctttgttgttctgctgatatccggtgccgccttcattaatcaggcattttatcagcgtgacggtctcagcctgtgggcgaagatgacaggtcagggtcatgttcagactgaaccgtgtcctccggagattggtgtgaatctcagtaccggcgaactgatttggatgcagccaaatttcgggtgtgacggtttttttcctgatatcagggatatcaatttcaccgtgacagccggtatgtttctgctgctgatttcatttagtatgtttatattaatggcaactaacctcagatatatcagaaaaagaccttataaaggttttatttttgtggctgttgtgatgctgatatccggaattgcaatgatttatcatgcgttttatcaatatatgtaa

SEQ ID NO: 278533 - DNA, 165 bp, Morganella morganii
atgaatgtggtcactcttgtgcagtgcctgaccgggcttattttcttcctgatatcactgtatgttcccggcgtcccggctgaggtggtgatgtttgccttatcagtcggcggacttgcggtgctggcaggtaaatatattcagtccgatattcaggccggttaa

SEQ ID NO: 278534 - DNA, 1383 bp, Morganella morganii
atggcgaatattaatgtgaaaacccgccgcaaacagatggtggtactgatagcggtactctgcgggctgggtgtcatcggcggtgttgcctggtatctcgggcagccggtgaaaccggcggcaaaagccgcacctaaaccggcaccgaacatgaccggcgtggtctcgtcctcgtttgacaagaaactggagggtgccgccgtggcaaacctgcaggaaaccgcgtctgaggcggacaagaaaatccgggcgttttccggccgtatcgacaaactggagcagaccaacaaagcctaccgcgacaagatagagcagcaggaaaaggacttgtccgtactgcaggagcagctgacagagctgcagagtgaacgggcatttccgacatcggataccggcggtaacggttttccggcaggcagtatgccgtcaccgaacgcaggagccagtcagccggtgatcccgccgccgactgccttttatccgggcgggcagggctatgccgccccgcagagtcagcttgtcgtgaatccggatctggggcgcggtctgtcttccgtgacgattgagtatgaggatgataaggagccggaagccgctgtcccggaattaccgtatatcccgtccggcagttttgcgcaggcggttattattgagggggcggatgccaatgcttctgtcaccggcaacagtaatccgtccccgatgcagttccgtctcaccgggccggtactgatggcgaacaatgaggaatacgatctgcgcggctgcatggtgaccgccggggtgtacggggatatctccagtgagcgggcgctggtgagaaccgaccggctgtcctgcaaactctttggtcataccgtggatatgaagtttaagggacacatttcctttatggggaaaaacggtatcaaaggggagccggtgatccgcaacggggaaatgatcggatatgcctttgcgggcggcgcgattgatgccatcggcggcggtatcggcaaagtgggtcagaccacagtcggtatcggggcgacggacaccacgtcgttcggggatgtcgcccgcgccgggttaggttccggaacctcacaggtcggtaaaaccctgtccgattatttcatcaaacgggcagagcagtaccatcctgtgatcccgattggcgccggtgtcgatgtgactgtggtgtttcaggaaggttttcagctggaatttgccgatgtgaagaaaaagaaagcggcgaaaacgccggtgaaagaggcggtacagcaggggatcacggtttcaaaagaaaccctgcgtgagctgaacctcgggtcacctgtaccttcaaatccggcaccggcacccgcttacgggtattcgcagccgtccggttatccgcagtaa

SEQ ID NO: 278535 - DNA, 774 bp, Morganella morganii
atgagaagaagaaaaaatagcccgccggtcagcacggcacccggcctgatgctctgtgccggtctgctgttttccgcgccggtattcagtgaaccggcggcacagcagccggtgcggattccggtgaccgcagacagtcaggtgaaagtagcgttcagcaatacccagcccaatatgctgattgtgccgggtgaccggattgtggctgtggacagcgcgtccgggatgctcctgaatgacggtcagaccgggcgcaccgggatggccaacggcggcgtggtgctgatgacggcacagactgagccgttcactttttatctgcgcaccgcaggcggactgaccgtctccgtggtggcggtgccgcagaagagggacggccgggtgctgcagtttatctcagaccgtccggcggtcagtaaaccggcagagcgctgggagcggtcacaggcgtatccggacacgctgattgccttacagaaaggggtgcttaacggtcagctgccggacggctttgtcagtgcaccggtgaccccgctgccgccgctgtccctgccgttcccgctgaccgtgcaggctgagaaaatgtggaacggcggtcagctgcgtatctatcagaccacgctgcgcaataccggggtgagagcggcggcggtgccggaacggctgttcagggcggacggggtacgggcggtgatgatccacccgtttgtctctgtgctgaaaccgggggccaccgcacaggtctggctgacggtgagcggggaggataactga

SEQ ID NO: 278536 - DNA, 573 bp, Morganella morganii
atgaaactgagcgcagccaaatcggctaaccgttttatctccctggtcttcattaccctcgtttttctgctgataaccagccttgccggtaacctgctggcctggatgcggatagacaccctgattaattcccgccaggaaacctatatcccgatgttttttgacacgccgttcaccttaagccgcacccatgcggatgccaattatctcgaacagacggcgcagtccctgattttcctgcgttacaacgtgtcaccggaaacggtgcgtgccaaccacaaagcggtgctgcggttcgtggacaaagacagccgcacggagatgcaggatgcgctggccgacgaagcgcggatcatcaccgacaataacgtgacctcggcgttttatatcagcagccttgatgtctatcccgatcagggcatagcggatatcaccggcacgctgcagacctggataggcaaccggaagtccctgccggaggaaaaacggctccggctggagctgaaatatgaccgggggctgaccaccatccgtgattttaaggaaatgattgatgagaagaagaaaaaatag

SEQ ID NO: 278537 - DNA, 306 bp, Morganella morganii
atggaagaggagcgtattaaacgtttcagttttcctcagactctcacggagcagagccgtccgataggactgccgctggatgaaaccgccgttatcggcatcccgatgggatggggatttatggacggtcagcatcttgcagggctggtgatcggcgctctgctctggttcggactgaggtatttcaagaaagggcggggaaccacctggctgctcaatgcctgctactggtatctgcccgcttactgtttcagaggtctttataaagtcattccggagtccgcgttcaggctctggctgagatag

SEQ ID NO: 278538 - DNA, 378 bp, Morganella morganii
atgagtgaaatctcggtcatgaataataacgccgcacaaccggcggcaaaaaagggtctgcttgcccgtgcgctggcggcggtcaacagccggacggccaaagccctgtttaagggtgttgctgtaccgctggcgctctggctggctgcccgtggtgtggcacatgcggaagacctgaccgccgccggtaaagaggatgcggcggacaccttcggtgaagactccaccatgatgtattacttcatgctggccgaagttatcctggtcttcattctttacctgcgtaaccacaacccggcgaccttcctgctgatcccggtctttattgtggtcaccaaaatcatcttctctattatctcatcccgctccggcggctga

SEQ ID NO: 278539 - DNA, 192 bp, Morganella morganii
atgaatcagaaagaataccgtccggtcacgatcagtatttcaatttctgccgaaaccaaccgcttactgactgaatccgccagacagtcaaaacgcacaaaggctattgaggcaattatccgtttatctgaaagtctccggtctgtagatcatattgaggggcattatcagcagttactgacgaaatattaa

SEQ ID NO: 278540 - DNA, 750 bp, Morganella morganii
atgtctaacgaacatgctattgatctttgtgagagatctcaagaagattttaaaaatttattgctaaatctgaataaaaaatcatcttactggtgtgtttttgataaaaattgccatatcctcgagatgagcgatatcctgcctgaatgttttttcctacctaaaaaaaacgaacaatattttttatttaaatcagatattatctttttacaagatgaagttgaatcagtatttaaaccatatgaaattaattttgattcgtttgttattgatgatgatgaatattgtgcaatgttccttactttaaataatgaaaattatcttgatttaattcttatggatttgaataatttctattataaggataacttaggtaataaattaacaatagaatacgccattgagttactaagggatgttaatccatttgataaaatcagtcagaaagattggcttattgcttggttggtaattcatgatttcacaacagaaagaatttctatttatctaaaacaaaagcctaactccataaatatagcgataaagcgtctgttaggtgtaaaaaaactagagttatttgatcgtgacttgtttaaaaaagtagcaaggttattgggttggtataattatgttcctgcatcgttaatatataaaaataccattaaaaccactgtatataaaaacataccattaaatggtacagacacagtaaaaattttcacatatagtcattcaaattttaatttataa

SEQ ID NO: 278541 - DNA, 384 bp, Morganella morganii
atgcctcgtcaacatatatacatgaaacaaaaaacactggatggtatccgtgggcttgtcgataagcgacgtaatgaaggagcctcagccagtgaggctaatatctccagtgtaggttctgagctgctggaaatcggcttaagggttgttgaaaatctggagaaagaaaaagaaggggatgacggattaacttttgaagaacgctatagacgtcaggttattgaggaattatccaaatcccggcagtgtattcaggttatgtttaagatgatgtttgacctgactgaaatatccggtgataaccgatacaactatcgtgaatatgtagaagaatttaaaagcagaacacaacaactgcttgtggaaatgttcccttataaatga

SEQ ID NO: 278542 - DNA, 450 bp, Morganella morganii
atgagaacgctttttacattattttctgcattgatgtttcccgccctgtcagttgcacaggattgctataatcttgccggtcgtgattaccatattgatccggatttattaagggctgtctcattcagagagtcatcatttcgtactgatgcccttaaccgtgtgtctgatgaaaaatatgccgttggtctgatgcagatccattctcagaattttaatgaactcagagaatacggtattcatgaaaacatgctgaaacatgacccctgtatgaatatttataccggcgcttattacctggctaaattcattcagcttgaaaaggatatctggcggggagtgggggcttataatgcaggcaggaaaaaatcaccggagcaagaacgtaaaaggcaacgttacgctgatgaaatttatgttatctatagaaatataaaaaacagtcattga

SEQ ID NO: 278543 - DNA, 945 bp, Morganella morganii
atgactatgaatcagctcacccaaactactgtccctaacactgcagcggcgaccagcgtatccccgctggagcagtcaggctcctcaaaaacgaaattttcaaagcgcaaagcaaaaccggatatatatcagacggtgacagataacatcatcagggcgctggaagtaggtgtaaaaccctgggtttgtccgtggacaggtaacggggcagcctccggattaccggccaatttttcaaccggcacagcttacagcgggattaatattatgctgttgtggagcagtgcagcggagcagggttatacagatccccgctggctgacttataaacaggcggcagagcagggcggtcaagttcgtaaaggcgagcacggcaccaccattatttattacaaaatgctggaaaaagaaaacgaggccggggagactgaacatatcccgatgctgaaaacatttaccgtttttaatgtgcagcagatcgataatttagcggttgaatatgcagcattaccggcaatgttatttgatccgattgcaaacgctgaggcactgacagcccgcagcggtgccaaaattacagagaaaggtatacaggcattttaccgtccgtctacagatgaaatatatttgcctgaaagatatcggtttaataatgccgctgatttttacgcgacacagcttcatgaattaattcactggacaggtgcgaaatcccgcttaaacagagagaagggcggtaaatacggttcagacaaatatgcatttgaggaattgatcgcagaattagggtgcgcctttttaatggcggatttgggaataaccggtgatgtgcagcatgaaagctatatatcctcatggctgaaagcactgaatgatgataagcggtttatatttaaagctgcgagcgcagcatcaaaagcacaccggtatctgacagagtgttaa

SEQ ID NO: 278544 - DNA, 714 bp, Morganella morganii
atgcacagtatcaataaagccaactttgcgatcctgcactggtttggcctacgctttgagccccattttatcgatctgaacaagcaactgcaggagctgtacagcaccagagatctatcggcatataaaaaatacctgattcagcccgccgggcagattgacctgaacttaatcacccgtgaaaaaagcaacctcgatcgcatcgtcgccacgctggggctgaaagaaatgacgcagggaacgttgatccgcaaactgtgcacgtacacaacaaccaacccgacaagacaggctgtatttgaatatgaccgactggttcgcagcatttacacgctgaaatatctgcgggatccgcagctggaacgcaatatccgtcgctcccagaacaggattgaatcttatcaccagcttcgcgccgcagtcgccaaagtcggaggaaagaaagagttaaccgggaaaaatgacattgaaacggaaataagtaatcaatgcgggaggttgatcgccaacgcgatcgtttactacaactccgcgatcctgtcgcgtttactggagcggctggaagaagaaggaaatgccaaaggtattgaggcacttaccaggatatcgccggtggcctggcagcatattttgctgaacgggcattacaccttccagaacaacaatgagattattgacctggatacactggttgccggactgaaactggggtga

SEQ ID NO: 278545 - DNA, 432 bp, Morganella morganii
atgaaaaatatcgtattagcatctttgctgggctttggtttaatttcatcggcctgggccactgaaaccgtgaatatccatgatcgcgtcaacaatgcacaggctcctgctcaccagatgcagtctgctgcggctcctgtcgggatccaggggactgctcctcgtatgaccggtatggaccagcatgaacaggccattattgctcatgaaaccatgacgaacggctcggcggatgcgcaccagaaaatggtggaaagtcatcagaagatgatgggaaataacacggtatccacgaccgtcccgtcaacgtcttacgcggcgatgaatgagcatgaaagagcagcggttgcccatgaattcatgaataacgggcaatccggcccacatcaggccatggccgaagcgcaccgccgcatgatcaatgcagactga

SEQ ID NO: 278546 - DNA, 1476 bp, Morganella morganii
atgcatagcaaaccttccaggcgccctttctcactcgccctgcggctgaccttttttatcagcctgtccacgatactggcttttatcgccttcacctggtttatgctgcattctgttgaaaatcattttgccgagcaggatgtcagcgatcttcaacaaatcagcactaccctgaaccgtatactgcagtccccggtggatccggatgaaaaaaaagtaagcaaaataaaggagtcgattgccagctaccgcaacgttgcccttttgctcctcaatcccaggggggaagtgctctttagttcagcgcagggggcggcactacacccggccgtgaattccgcagattttagcgagcacagccgcgcacgggatgtctttctctggacggtggaggatcctgcgagaccgatggataccgggtctgaaatgaagatggaaacataccggattatcgcctcctctggccaggcgatatttcagggcaaacagcagaattatgtcatgctgactggcctctccattaatttccatctccattacctcgatgcgctgaaaaaaaatctgattgcgatcgccgtcgtgataagcctgctgattgttctgatcattcgcatcgctgtccgtcaggggcacctgccccttcgtaatgtcagcaatgccattaaaaacatcacctccgagaatcttgatgcgcggctggaaccgacacgcgttcccattgagctggagcaactggttatctcgttcaatcatatgattggaaagattgaggacgtctttacccgccaggccaatttctctgccgatatcgcgcatgagatcagaacgcccatcaccaatctggtgacgcagactgaaatcgcactgagtcaggatcgaacccagaaggaacttgaggatgtcctctactccagtcttgaagagtataaccggatgaccaaaatggtcagcgacatgctgtttctggcacaggcggacaataaccagcttatacctgacagggtccgttttgacctcagagcagaagtcatgaaagtcttcgagtttttcgaagcctgggccgaagaacgcaatatcacgctcaaatttaacgggatgccctgcctggttgagggagatccacaaatgttcagaagagcgatcaataatctgttatccaatgccctgcgttataccccggagggacaggccatcaccgtctcaataagaaagcaggagagcttttttgaccttgtgattgaaaatccagggaaaccgatccctgaagaacatttatcaaggctgtttgaccgtttttatcgggtggatccatccagacaacgaaaaggagaaggcagcggcatcggccttgcgattgtgaagtcaatcgtggaagcacatcacggaagagtgcaggtggaatcagacgtacgctccacgcgttttatcttatccgtgcccagactggagaaaatgctcccggaaacccaatgctga

SEQ ID NO: 278547 - DNA, 681 bp, Morganella morganii
atgaaaatattgatcgtcgaagacgaaattaaaacaggtgaatatctcagcaaagggcttacagaggcagggttcgtagtggatcacgctgataatggtcttaccggatatcatctcgccatgacagccgagtatgatttagtcattctggacatcatgctgcctgatgtgaacggctgggatatcatccgcatgctgcgcactgccggaaagggtatgccggtcttactactgacggccctcggcacgatcgaacacagggtcaaaggactggaactgggtgcggacgattatctggttaaaccctttgcgtttgccgaactgctggcccgggtgagaacccttctgaggcggggaaacgcgatgatcacggaaagccagtttagggtggctgatctctcgatggatctcgtatccagaaaagtcagtcgcgccggaaaccgcattgtgctcaccagtaaagagttcagcctgctggaatttttcattcgccatcagggcgaggttcttccccgttccctgattgcctctcaggtctgggacatgaattttgacagcgacactaacgcgattgatgtcgccgtaaagcgactccgcgctaaaatagacaacgattacgggacaaagctgatccagactgtccggggcgtgggctatatgctggaggccccggatgcatag

SEQ ID NO: 278548 - DNA, 1386 bp, Morganella morganii
atgttcaaattaaaactactcagcatcagcacaatcttcattctggctggttgtgtctctctggcgcctgaatatcagcgtccggcagcaccggtaccccagcagttttcactgtcccgtaacagcctgacgccagcggtgaatggctatcaggatacgggctggcgtaacttttttgtcgatccccaggtcacccggctgattactgaagccctgactaataaccgtgatttgagaatggctgcactgaaggttgaagaggcccgggcccagttcaacgtcacggatgcagatcgttatccccagctgaatgcctcatccgggatcacatacagcggtggtctgaaaggtgacaagccgaccacacaggagtacgacgcaggtctggagttcagttatgagctcgattttttcggcaaacttaagaacatgagtgatgctgatcgccagaactactttgccagcgaagaagcccgtcgggccgtacacatcctgctggtatccaacgtttcacaaagctatttcagccagcaactggcgtacgaacaacttcgtattgcgcgggaaacgctgaaaaattatcaacagtcctatgctttcgttgagcagcagctcgtgaccgggagtacgaacgttctggcacttgaacaggcgcgaggacaaatcgaaagtacccgcgccgaaatagccaaacgagaaggcgatctggctcaggcaaacaatgccctgcaactggtgctgggaacgtaccgcgcacttccgtcagaaaaagggatgaaaggcggggagatagccccagtaaaattgccaccaaatctgtcttcacaaattttgctgcagcgaccggatattatggaagcggaatatcagctgaaagcggctgatgccaatattggcgcagcgcgagcggcctttttcccctcaattaccctgaccagtggtctttccgcaagcagtacggagctgtccagcctgtttacgtcaggaagtggaatgtggaattttatccctaaaattgaaattcctatatttaatgctggcaggaataaagccaatctgaagctggctgaaattcgccagcaacagtcggtggttaattacgaacaaaaaattcagtcagcctttaaggatgtttccgacacgcttgcgctgcgcgacagccttagccagcaacttgagtcacagcagcgttatcttgattcacttcagataactctccagcgtgccagaggattatattccagtggtgctgtcagttacattgaagtgctggatgcagagcgttctctcttcgctacgcagcaaaccattctcgatcttacctattcccggcaggttaacgaaattaatctgtttaccgcactgggtggcggttgggtagagtaa

SEQ ID NO: 278549 - DNA, 354 bp, Morganella morganii
atgcgtaattcacttaaagccgttttatttggtgccttctctgtcatgttttctgccggtcttcatgctgaaacacatcagcatggcgatatgaatactgccagtgatgcttcggtacagcaggttatcaagggcaccggtgtcgttaaagaaattgatataaatagtaaaaagatcaccatttcgcacgaagcaatccctgcggtgggctggcctgcaatgaccatgcgcttcacttttgttaatgcaaacgacgctatcaatgccctgaaaaccggcaaccatgtcgatttctcgtttattcagcagggtaatatttctttacttaaaagcattaacgtgacgcagtcctga

SEQ ID NO: 278550 - DNA, 1293 bp, Morganella morganii; identical to SEQ ID NO: 117748

SEQ ID NO: 278551 - DNA, 3147 bp, Morganella morganii
atgattgaatggattatccggcgctctgtcgccaaccgtttcctggtcatgatgggggccctgtttctcagcatctggggcacatggacgattattaacacgcctgtcgatgccttgcctgacctgtcagatgtgcaggtcattatcaaaaccagctatcccggccaggccccgcagattgtagaaaaccaggtcacctatccacttaccaccaccatgctgtccgtgcctggcgcaaaaaccgtgcgtggtttttcacagttcggtgattcgtatgtgtatgtcatttttgaagacggcaccgatctgtactgggcccgttcccgcgtgctggagtacctgaaccaggtacagggaaaactgcccgccggtgtgagttctgaaatcggtccggacgccacgggggtgggctggatatttgaatatgcccttgtcgatcgcagcggaaaacacgacctttcagaactgcgttctctgcaggactggttcctgaaatttgagctgaaaaccatcccgaacgtggctgaggtcgcttcggttggcggcgtggtgaaacagtaccagattcaggtcaatccggtaaaactgtctcagtatggtatcagcctgcccgaagtgaaacaggcccttgaatcgtctaaccaggaggccggtggctcatccgttgaaatggccgaagctgagtatatggtccgtgccagcggttatcttcagagcattgatgattttaataacatcgtcctgaaaacaggcgagaacggcgtgccggtttatctgcgggatgttgcccgcgtgcagaccgggcctgaaatgcggcgtggtattgccgagctgaacggccagggcgaagtcgctggcggcgtggtgatcctgcggtcgggtaaaaatgcacgcgacgttatcacggcagtgagggataaacttgagacgctgaaggccagcctgccggaaggcgttgaaatcgtgaccacctacgatcgcagccagctcatcgaccgggcgattgataacctcagttccaaacttctggaagagtttatcgtggtggccatcgtctgtgccctgttcctgtggcacgtacgttctgccctggtggcgattatctctctgccgcttggtctgtgtatcgcctttatcgtcatgcacttccagggactgaacgccaatatcatgtcgctgggagggatagcgattgccgtcggtgcgatggtggatgccgccattgtgatgattgagaatgcgcataagcggcttgaggagtgggatcatcagcatcctggtgagcagattgacaacgccacccgctggaaggtgattaccgatgcctccgttgaagtgggacccgcactgtttatcagcctgctgatcatcaccctgtcctttattcctatctttaccctggaaggtcaggaaggacgtctgtttggcccgctggcattcacgaaaacgtactccatggcgggcgcggccgcgctggccatcatcgtcattccgattctgatgggattctggatccgggggaaaattcctgcagagaccagtaaccccctgaaccgggtactgatcaaagcgtatcatccattgctgttgcgggttctccactggccaaaaacaaccctgctggttgcggccttgtccattttcaccgttatctggccgctgagccaggtgggcggtgagtttctgccgaagattaacgagggcgacctgttgtatatgccgtcgaccctgccgggtgtctctccggctgaagctgcagcgctcctgcagacgacggacaagttaatcaaaagcgttcctgaagtggcctctgtatttggcaagaccggtaaagcagagaccgccacggattccgcaccgctcgaaatggttgaaaccacgatccagctcaaacctgaggatcagtggcgtccaggcatgacgattgacaagattattgaagaactcgacaggaccgtccgtttaccggggctggcaaacctctgggtgccgccaatccgtaaccgtattgatatgctctcaaccgggatcaaaagcccgataggtatcaaggtgtccggaacggttctgtccgatatcgatgcaacggcgcagagtatcgaagcggtcgccaaaaccgtacccggcgtagtgtctgctctcgcagagcgactggaaggcgggcgctacattgatgtggatatcaaccgggaaaaagcctcccgctacggaatgacggtgggcgatgtgcagctgttcatctcatcagccatcggtggggctatggtgggtgagacggttgaaggcgtggcccggtacccgattaatatccgctatccgcaggattaccggaacagcccgcaggccctgaaacagatgccgatcctgaccccgatgaagcagcagatcacgctgggcgatgttgcggatattaaggtcgtttccgggccgactatgctgaaaactgaaaatgcccgtccagccagctggatttacattgacgcgcgcggcagggatatggtgtcggtggttaatgacattaaaacggcgatcagtcagaaagtgaaactgagaccgggtaccagcgtgtcattctccggacagtttgaactgcttgagcatgccaacaagaaactgaagctgatggtgccgatgacggtgatgatcatcttcatcctgttgtatctggcattccgccgggttgatgaagccctgctgatcctgatgagcctgccgttcgccctggttggcgggatatggttcctgtactggcagggcttccatatgtctgtcgcaaccggaacggggtttatcgctctggccggggtggcagcagagtttggcgtggtcatgctgatgtatctgcgtcatgccattgaagcgcacccggaattgtcccgtaaagagacgttcacaccggaaggccttgatgaagccctctatcatggtgccgtactgcgtgtccggccgaaagccatgaccgtggcggtgatcattgcaggtctgctgccaatactctggggaaccggtgcaggttcagaagtcatgagccgtatcgcggcacccatgattggtgggatgatcacggctccgctgctgtccctgttcattattcctgccgcctacaaattaatctggctgcgcagacataaaaaaagcgtgtcctga

SEQ ID NO: 278552 - DNA, 441 bp, Morganella morganii
atgaaaaaagtggttctgatggcgctggctctcggcctttcactgcccgcgatggcgagtgaaaaagtgattgatatgtacaaatctgaaaactgtggctgttgttctctgtggggcaaggcgatggaaaaagacgggtttgaagtacgaactcacgtcatgaatgatcaggcgctgtcagccctgaaagaaaagcatgctattcctgcaggactgcgaagttgtcataccgcggttgccggtaatttgatcattgaaggccatgtgcctgcgacaacgatacataaggcaatgcagtctggttcaggtatatacggtctcgccacccccggtatgccagcaggaagtcctggaatggagatgggagcccgaaaagaggcttacgatgttatcgcattctcaccggatggaagtaaaaaagtcttccagcgaatcgaatag

SEQ ID NO: 278553 - DNA, 2448 bp, Morganella morganii
gtgaaaaatgacaatgcagtgcaacacaacaaccagactgcttctgagcagacattatccccggacgagggccacgtattgcataaggtgagagatcccgtgtgcgggatggacatcctgcccgacagggcgcacagcagcattcgataccaggaccatcaactttatttctgctccgccagctgtgagagtaaatttaaagcccatcccgatcgttatcttaccgaagatgccagtgaacattcccatcaccatcaccacgatcatcacgaagtcagccctgatcagataaaacagcctcaccaccaggcggagaaagagaattctgaaggtgtgtggacatgtccgatgcacccggagatacgccgcagtggtcccggaagctgtcctgtctgtggaatggcactggagccgctcgtagctacggcatccacggggccaagtgatgaacttcgcgacatgacaagacgcttctggctggggttgttgctggcgtttccggttctggtactcgaaatgggatctcatctgtttcccgccttgaggaatacagtaccgccacagcacaacacatggctgcagctgcttctggcctctcctgtcgtgttgtggtgtggctggccattcttcgcccgggccggaatgtcgttacgtaaccgctccctgaatatgtttacccttgttgcaatgggcaccggcgtagcctgggtgtacagcgtcattgcaaccgtcttcccctcctggtttcctgcatcgttcagaaacatggatggcctggtggccgtttattttgaagccgcagcagttattacggtgcttgttctgctgggacaggttcttgagctgcgggcacgggaacaaacctcaggtgccattactgcactactgaatcttgcccccaaaaccgccaggcggctggatcatgacggtcatgaaacggatattaatgcggaagatgttctgcctggcgataagctccgcatcagaccaggagagagtattccggtcgacggtattgtgatcgaaggcaaaacaaccgttgatgaatcgatggtgaccggggaatctatgccggttaccaaaacggagggtgaccctgtcatcggggggaccattaatcagacagggagtctcatcatccgtgcagagaaagtcggtgatgaaacaatgctctcacgaattgttcagatggtcgctgatgcacagcgttcgcgtgcccccatccagagaatggctgacagcgtttcaggctggtttgttcctctggtgatacttatcgcggttgttgctttcgtgatctggtctgtctgggggcccgagcccaggatggcgcacggtctcattgcggctgtgtcggtcctgattattgcctgtccctgcgcgctggggctggccacgccgatgtcgataatggtgggggtgggcaaaggagcccaggccggggtgttaatcaggaatgccgaagcccttgagcgtcttgaaaaagtggacacgctggttgtcgacaaaacaggcacgctcacggaaggttcgcctacggtgacagggattatcagtctcaatccgggtggggaaacatctcttttgcgtgtaacagccgcagtggaaaaaggctcgcagcatccgctgggtatggcagtagttaaagcagcacaggaaaaggggatcgcaatacccgcagtcactcatttcgatgcaccgtcgggtaaaggtgtctcaggcgatgtcgaaggtcaacgggttgttattggtaatgaactggctatgcaggaaaacagtatcgttattgataatcaaaaggccgttgcggatacgttgcggatggaaggcgctaccgttatctatgtggccacagacggggaccttgcaggcctgatagctatctcggatcccgtgaaaacaaccacgccggatgcgcttaaagctttgcgtcaggcggggatccgcattgttatgctcaccggggataaccagcttactgctgaagcagtcgcacggaaactgggaatagatgaggttgaagccggaattctgccggatggcaaaaaagcagtgataacccgactgaaagagtctggccatgtggttgcgatggccggagacggtgtgaatgatgccccggcgctggcagcggctgacgtgggtatagccatgggaacgggtacagatgtggcaattgaaagtgccggagtcacccttctcaaaggcgacttgatgatactgaacagggcccgtcatctgtcagagatcaccatgaaaaatatccgtcagaatctgttttttgcatttatctacaacgcacttggcgtgcctgtggctgcaggtctgctttatcctgtgtatggaatactgctgtcgccagttattgcggcggcggccatggctctttcctccgtcagcgtcattgtgaatgcgttgcgtctgaaaagtgtcaggctcgggaaataa

SEQ ID NO: 278554 - DNA, 198 bp, Morganella morganii; identical to SEQ ID NO: 117752

SEQ ID NO: 278555 - DNA, 738 bp, Morganella morganii; identical to SEQ ID NO: 117753

SEQ ID NO: 278556 - DNA, 450 bp, Morganella morganii; identical to SEQ ID NO: 97793

SEQ ID NO: 278557 - DNA, 1224 bp, Morganella morganii
atgctgttgaaaacgtctcgacgaactttcctgaaggggttaaccctctctggcgtagccggaagtcttggcgtatggagtttcaatgcgcgttccagtctgagcctgccagttgccgcatccctgcagggtactcagtttgacctgaccattggtgaaacggccgtcaatatcacgggcagtgagcgtcaggccaaaacaatcaatggaggcctgccggggcccgttcttcgctggaaagaaggtgacaccattaccctgaaggtcaaaaaccgtcttaatgaacagacgtccattcactggcacggcattattcttccggccaatatggatggtgttccggggctgagttttatgggcatagagcctgatgatacctacgtttacacctttaaggttaagcagaacgggacttactggtaccacagccattccggtctgcaggaacaggagggggtatacggtgccattatcatcgatgccagggagccagaaccgtttgcttacgatcgtgagcatgtggtcatgttgtctgactggaccgatgaaaatcctcacagcctgctgaaaaaattaaaaaaacagtcggattactacaatttcaataaaccaaccgttggctcttttttccgcgacgtgaataccagggggctgtcagccaccattgccgatcggaaaatgtgggctgaaatgaaaatgaatccgactgacctcgcggatgtcagtggctacacctacacctatctcatgaacgggcaggccccgctgaaaaactggaccggactgttccgtcccggtgaaaagatacgcttacggtttatcaacggctcggcaatgacctatttcgatatccgtatccccgggctgaaaatgacggtcgtggctgcagatggccagtatgtaaacccggttaccgttgacgaattcaggattgccgttgccgaaacctatgatgtcattgtggagcctcagggtgaggcctataccatcttcgcacaatccatggacaggaccggttacgctcgagggacactggccacgagagaggggttaagtgctgccgttccccccctcgatccccgtcctctgttgaccatggaagatatgggtatggggggaatgggacatgatatggcaggaatggaccacagccagatgggaggcatggataacagcggagagatgatgtctatggacggtgctgaccttccggatatccgttga

SEQ ID NO: 278558 - DNA, 2247 bp, Morganella morganii
atggccaataaaaacaaactcctcagtattctttcggacgccgagcaggaagcgctgtatggtctccctgatttcgatgatgtacaacggctggattttttggctctggatgaatcagagctggcactggtgaacggccgcaatgggcttcatgctcaactttattgccttctgcagattgcttactttaaagctaaacacctgttttttcgcttcggctggaatgatgttcaggacgactgtagttttgcccttagtcgttatttccccggggaggcacttccggaaaaattgcccacaaagcatgagcgctatgctcagcgggaaaaaatctgcgtattgtatggttaccgcccgtggtcatcttcgctgtcttctctgctcgaacaacaggcttcccacattgttcaccgcgatgtgactcccggctttgtcgccaccgggctgattatctggctcaacacgcataaaataatccggcctggctataccacgctccaggagctggtgagtcgtgtactttctggtgaaagacagcggctgggccgtattctgacggaacggcttgatgacgtcactattgccgacctggacaaactgattgaacgcgatgataccctttcccggctcgccgtcctcaggcaggatgcgcgtgattttggctggcgccagatgatccacgaacgggaaaaacgggccatcctggggccgctgcatcgtaaagcctgtgatatcctgccggcactgaatatttcccaacaaaacctgctgtattacgccagtctggcgaacttctataccgtttacgatctccgcaacctgaaaccggagcagacccgcctttacctgctgtgctatgcctggatccgttatcgccagttcagcgataacctggtggatgcgatgcttttccatatgaaacagcttgaggatgagagccgcagcgtggctaaacagcttatggctgacgtgcaggaaaaacaccggcgtgaaacctctaaaatcgggcgtcttctgtcgctttatgttgacgacagcgttccggaccccacaacctttggcgaagtccgtcgtcgggcctggaaaatcatgccacgggagacactgaaaagcaccgcacaacgcatgagtgtgaaacccgtcagtaaactggcgctgcagtggcaggccgtggacggtatgacggcattaatccggcgtcacctgcgaccattatatctgtcactcgatctcaccagtgtagtccaggacagcccgtgggctgcggcgctgagctggctcagaatagtgttcggcaaaaaacagacactttcgcagcgaccacttgaggaatgcccgccggaaacgttaccagcacggctgcgtccgtacctgctggaatacggtgaggatggtgagcctacaggcctgaatgccggtcgctatgagttctggctctatcgtcagataagaaagcgctttcagtcaggtgaattccacctaaatgacagtctccgccatcgtcatctttctgatgaactggtaccggaaggggaacagacagctgtgctggctgaaatgaatatcccgtttttgcaaaatccggttaaatcgcagttaaaggcgctggagtcagaactgcaccgacagtggaaagccttcaaccgcgagctaaagcaggggaagctgaaacatctggaatacgataaagaaacgcagaagctgacctggcataaatccgtggtcagtcgccataaggcgcaggagacgcgtttttatgagcaactaccattctgtgatgtgactgatgtctttcgttttgttaacgagcagtgtcggttcctccccgccatgaagccgttgcagccccgttatgccaaaaaagaagctgatgcagacagcctgatggcggtcattgttgctcaggcaatgaatcatggcaatcatgtcatggcgagaaccagcgatataccgttccatgtgctggaaaccacgtacgaacagtacctccgcctggcctcactggtcacggccaatgactgtatcaccgatgccatagaggcactgccgattttcccgcactattcgtttgatccggagaccctttacggagctgttgacgggcagaaatttggcgttgagcgaccgacagtgaaagcccggtactcgcgtaaatactttggtcgcggtaaaggcatggtggcttatacgttgctgtgtaaccacattccgatcaacggatatccggaaggtcagcaccgtccatag

SEQ ID NO: 278559 - DNA, 276 bp, Morganella morganii; identical to SEQ ID NO: 121653

SEQ ID NO: 278560 - DNA, 246 bp, Morganella morganii; identical to SEQ ID NO: 108023

SEQ ID NO: 278561 - DNA, 1647 bp, Morganella morganii
atgaccgaaatcaccgtgaatggcatgacctgcacatcctgcgccacccatgtcaaagatgctttggaaaagattcccggcgtgaatgccgctgtggtgtcctatccagaaagccgcgcgcaagtcatggcagacaccgccgtgagccacaaccaactgctggccgccatcgccgcattgggttatcaaggctcgatccgggttggtgatttcaaagatgaaccaaaaatccgtgatgcacttgagggcgccggtttgcatatcgccatcattggcagcggcggggccgcgatggcggcggcgctgaaggccgtcgagcaaggcgcgacggtcacgctgatcgaacgcggcaccatcggcggcacctgcgtcaatatcggctgtgtgccgtccaagatcatgatccgcgctgcccatattgcccatctgcgccgggaaagtccgttcgacggcggtattgcggcaactgtgcctgcgattgaccgcagcaaactgctggcccagcagcaggcccgtgtcgatgaactgcggcacgccaaatacgaaggcatcctggacggcaatccagccatcaccgttttgcacggtgaagcgcgtttcaaggacgaccagagcctggtcgtccgtttgaacgagggtggcgagcgcgaggtaacgttcgaccgctgcctggtcgccaccggtgccagtccggccgtgccgccgattccgggcctgaaagagtcaccctactggacttccaccgaagcgcttgtcagcgacaccattcccgcacgcctggccgtgatcggttcgtcggtggtggcgttggaactggcgcaagcctttgcccggctcggcagccaggtcacgatcctggcacgcggcaccttgttcttccgggaagacccggccatcggcgaggccgtgacagccgctttccgcgccgagggcatcgaggtgctggagcacacgcaagccagccaggtcgcccatgtgaacggcgaattcgtgctgaccaccggacacggtgaattgcgcgctgacaagttgctggttgccaccggtcgggcaccgaatacgcgcagcctcgcgctggacgcggcgggggtcactgtcaatgcgcaaggggccatcgttatcgaccaaggcatgcgcacgagcaacccgaacatctacgcggccggcgactgcaccgaccagccgcagttcgtctacgtggcagcggccgccggcacccgtgccgcgatcaacatgaccggcggcgacgcagccctcaatctgaccgcgatgccggcagtggtgttcaccgacccgcaagtcgccaccgtgggctacagcgaggcggaagcgcaccacgatggcatcgagaccgacagtcgcacgctgacactcgacaacgttccgcgagcgcttgccaacttcgacacacgcggcttcatcaagctggtcatcgaggaaggtagcggacggctcatcggcgtgcaggcggtggccccggaagcgggcgaactgatccagacggcggtgctcgccatccgcaaccgcatgacggtgcaggaactggccgaccagttgttcccctacctgacaatggtcgaggggttgaagcttgcggcgcagaccttcaacaaggacgtgaagcagctttcctgctgcgctggataa

SEQ ID NO: 278562 - DNA, 366 bp, Morganella morganii; identical to SEQ ID NO: 121650

SEQ ID NO: 278563 - DNA, 237 bp, Morganella morganii; identical to SEQ ID NO: 121649

SEQ ID NO: 278564 - DNA, 615 bp, Morganella morganii; identical to SEQ ID NO: 108024

SEQ ID NO: 278565 - DNA, 1218 bp, Morganella morganii
gtgaagccagcgccacactggccactgcatccggcacccaaggaaggcgaagccctgtcctcatggctcaaccgggtcgccgcctgctaccagatggacgtgcacgagctgctggcccacgatcttggtcacagccaacttgatgacctggataccgcaccatccttgtcgttgctgacggcgctctgccagcgcagtggcgtcgagctggagcggttgcgcagcatgagtcttgcaggctgggtgccgtggctgctcgacagtctcgacgattcggtaccagcagccttggaaacctatacattccaatgcgcggtgctcctgcccaagcgcacccgcaaggtgcggtccatcactcgctggcgtgcctggctaccgagccagacgattcgccgggcgtgtccgcagtgtctgaacgatccaacgaatcaagctgtgctactcgtctggcagatccccttgatgctgagctgcccgcagcatggctgctggctggagtcctactggggcatgcccggccggtatcttcagtgggaaatcgccgatgctgcgccgcgccctgccgatgacgcaatcgcctgcatggaccggcgcacctggcaggcgctgacgacgggttttgtggagctgccgcgtcggcgtgtccacgccggcttgtggttccggctgctgcgcaccctgcttgatgagctgaacacgccgctctcgcactgcggcagttgctcggcgagcatccgccatgtctgggagcgctgcggccatccgctgcgcgccgggcagagtctgtggcgtccctacgagattctggccccggcggtgcagtggcagatgctggaggcggcggccaccgccatcacgctgatcgagtcaaaggcgctgatcccgcgcggggaacaggccgcgctgtttcagacggagccgcacactggtttcaccaacggcctgccggcgaaggtgccgaagccggaacccatcaaccactggcaacgagcagcccaggccatcgatgaggccatcattgaagcgcgacacaacccggagacggcccgcttgctgttcacactggcgtcctacgggcgacgcgaccccgaatccctggaacgtttgcgcgccacgttcaccaaggagggcatcccgccggagtttttgtcacattacgagcctgaatggccgtttgcaggtcttagactaaatgacgggttaagtgacagtttttga

SEQ ID NO: 278566 - DNA, 909 bp, Morganella morganii; identical to SEQ ID NO: 121646

SEQ ID NO: 278567 - DNA, 1683 bp, Morganella morganii
atggcgtcagacacattaccaattgccgagcagggcgtggccaccctgcccgatgcggcatgggcacaggcccggcaccggaccgaaatcatcgggccgctggcagcgcttgaagtggttgggcatgaagccgccgatgccgctgctcaagcgctgggcctatccaggcggcaggtgtatgtcctgatccggcgtgcccggcaaggtgctgggtttgtgacggacctggttcccggccagtccggcggcggaaaaggcaagggacgcttgccggaatcagttgagcgcatcatccgcgagttgctgcaaaagcgcttcctgaccaagcagaagcgtagcctggcggcgttccaccgcgaggtcgcgcaggcttgcaaagcgcaaaagctacgggtgccggcgcgcaacactttggccctgcggatcgccggcctcgacccgctcaaggccactcgccgccgggaaggtcaggatgcgtcccgcagcctgcaaggtgtcggtggtgagcctcccgccgtgaccgcgccactggaacaagtgcagattgatcacacggtcatcgacctgatcgtggtggacgagcgcgaccggcaaccgattggccgtccgtatctgaccatcgccatcgacgtgtttacccgctgcgtgctcggcatggtcgtcacgctggaagcgccgtcatctgtttcggtcggcctgtgccttgtgcatgtcgcctgcgacaagcgtccctggctggagggtctgaatatagaaatggattggccgatgagcggcaagcccaggctgctctacttggacaacgcggccgagttcaagagcgaggcgctgcgccgtggctgcgagcagcacggcatccggttggactatcgtccgccagggcagccgcactacggcggcatcgtggaacggatcatcggtacggcgatgcagatgatccacgatgaattgccagggacgaccttctccaaccctgaccagcgcggggactacgattccgaaaacaaggccgccctgacattgcgtgagctggagcgctggctcacgttggcggtgggcacctatcacggctctgtgcacaacggcctgcttcagccgccggcggcgcgctggtcagaagccgtggcgcgtgtcggtgtaccggctgtcgtcacccgcgccttggcttttttggtcgatttcctgcccatcattcgccgtactctgactcgcaccggctttgtcatcgaccacattcactactacgccgatgcgctcaagccgtggatagctcggcgcgaccgcttgcctgcgttcctgatccggcgcgacccgcgcgacatcagccgcatttgggtgctggagccggaggggcagcactatctggaaattccataccgcaccttgtcgcacccggctgtcaccctctgggaacaacgacaggcgctggcgaaattgcggcagcaagggcgcgaacaggtggatgagtcggcgctgtttcgcatgatcggccagatgcgcgaaatcgtgtccaccgcgcagaaagctacgcgcaaggcgcggcgcgacgcggatcgacgccagcatctcaaggcaacggcagttcttttcaaaaccacgccaccaccggacgcggacatggctgacccgcaggcagacaaccagccacctgccaaaccgttcgaccagattgaggagtggtag

SEQ ID NO: 278568 - DNA, 747 bp, Morganella morganii
atgacttctgatattgcgtggtcaggagccgactgcacacctggcgttacgccccgtcaattggtgcagtcgtcttctgaaaatgacaaatcagaatgtcacataatcgaacgtatatgtgacaggtgcaaaatgttaattgggtatatgcgggtgtcaaaagcagatggttcgcaggcaaatgatttacagcgtgacgcgctggttgccgctggcgttgatgtagcccatctttatgaggactgtgcatcgggaaaacgagaagatcggccaggactcatcgcctgtctgaaggcgctacgacccggtgatgcgttggtcgtatggaaactggatcgactgggccgtgacctgcgccatctaataaacacagtgcatgatctgaccgggagagggataggcctgaaggtattgaccggtcatggcgcgactatcgataccacgactcctgctggcaaacttgtatttggcatttttgctgcactggccgagtttgagcgcgaactgattgctgagcgaacgactgctggtctggtgtcagcaagagcccgcggacggaaaggtggtcgtccgttcaagatgacccctgctaaactacgtctggcgatggctgcaatgggacaatcagagaccagggttaacgacttgtgccgggaactgaacatcactcgacagacgctatataggcacgtttcacctaaaggggaattgcgcccagatggagtgaaactcctgtcacatacttaa

SEQ ID NO: 278569 - DNA, 414 bp, Morganella morganii
atggcagacccaagagcgttcatcagtttcgattttgatcacaacgaaactgaaaaaaatctattcgttggtcaatccaagaattcaaaaacccccttctcaattcaggattggtctgccaaatcagcaatggctcagtcagagtgggaggccatagttaaagataagatcaacaagtgcaatatgttgatcgtattggtcggcaaaaccatggctagtgctaccggcgttgctaaagaaataaaaatggccaaagaccaaaatgtcccagtgttcggtgtatatgtcggtggcgcggacagttccagcaacttgcctgatgggctccagcgcaacaggactatccgttgggactgggcgaacattgcctctgcggtcgatcaaatgatgggagaagggaagaacaaagaatga

SEQ ID NO: 278570 - DNA, 987 bp, Morganella morganii
atgagaaaggcacttgtcgttggcatcgactattacactaacgtttcaccacttcatggttgcgtgaatgactcgtttgcagttaaagctatgctggacagacacgctgatggatcggttaatttcggcatgaaacatctaaccgcgactgggccaaatgaccttgttggtcgagacgaacttagacaagcaatcgaaagtctttttgcggatgacggtgatatttcactcttttacttcgctggacacggtcatattgaggcaacaggtggctatctttgttcttcggacgttaaaaccgggaatgatggtgtttcgttgtctgagataatgattatggccaatcaatcgaaagttaagaaccgcataatcattcttgatagttgccacagtggtgttgcaggtggaagcgcactacagcaacaggtggctgagataagcgatggggtgactattcttaccgcgtcaactgcggaacaatatgctaccgaggaaaatggtgcgggtgtcttcaccagtttattcgtcgatgcacttggtggtgcggccgcaaaccttgtcggagatataactcctggtggtgtttacgcacacgtcgatcaatctcttgggccatgggcacagcggccagtattcaaaactaacgttaagcgttttgtttctttgcgtaaagtccgccccccactggaacttgctgaacttcgtcgaatttcagaacttttccctgaacctggttttcagttccgacttgacccaacttatgagcctgagagacacgaatcctgggctacagacccacaaggtgtcccggctccagaccctgagcacaccgcaattttcaaaatcctacagaaatacaccagtgtagggcttaccaggcctgaaggagccccacatatgtggcatgcagccatggagagtaaatctgttagtcttacagctcttggtgagcattacaggcaattagcagcaaaagacctcatataa

SEQ ID NO: 278571 - DNA, 498 bp, Morganella morganii
atgactatgaatcagctcacccaggctacagctcctaacactgcagcggcgaccagcgtatccccgctggagcagtcaggctcctcaaaaacgaaatttctgcagagccaaccagagttagccaaaagtaatgtcagaacggaagtctgtaacccggacaattacctgtcacaacgtatcagcgagcagcagggctatctgaatgagctgtatcactttaacgaccagtggcagcctgaacgtccgcagcggctgatggaattattgatggtcatagccggttatataccggaaacagccacaaactggcaggatgttgccgattttggcgataaaccacagattccttacgcaataatgcattgctggctggctgctatggaactggcgccacagctgtgcggtgaaaccggcaccgccgctgtcgcctatgtccgtgatgacctgaaaaaaaatatggcgtgtcagtgtgcactggcagctatggattgcgcctga

SEQ ID NO: 278572 - DNA, 618 bp, Morganella morganii
atgaaagtcatatcgtttttaaatcctaaaggtggtagtggtaaaactaccgtagcaattaatgtaagcacaagcatagctaaaaattacagagtagccgtagttgacacagatccacagcaaagcctggctaattggaataaggccgataaagctaactttgatgtgtatacagcagcatccgaaaaagacgtatatacaataagaaaagaattaagtgattatgattttgtggttattgacggagcaggtgctttgtctgttatcaccgcagctgcggttatggttagtgatttagttattgttccggtcactccctcacctttagatttttcagctgcaggtgcagttatcaatgtcttggaagcacaatcatataaccggccagtagagtgtcgtttccttattacccgaaagattgaacaggcttctatgttatcagtgttacgtgaaagcattgcccttactggaattggattgcttaaaacatcggttaaccaaagacagagttatgttaaatcaatcctcgacggagaaactgtttttgagactaatgatagcgccgcaaaaggagaaattgacgttttagctaatgagattttaaagttagtttcatga

SEQ ID NO: 278573 - DNA, 240 bp, Morganella morganii
atggcgcttgataaaaaaggtaatggtgcaagtgcatcaaataaaatcatgacatttggtgataatcgagatttgaaaaaaataatttcggcaaaatcaacggaaactcaaaaacgagttaatttcaatatgccagaaaataaacatcagaggttgaaagctacctgtgcccgaaaaggactatctatctcagatgtaatgaatgatctggttgataattggttattgaaaaacgaatga

SEQ ID NO: 278574 - DNA, 711 bp, Morganella morganii
atgacactcagttactcagttactcagttactcagttactcagttactcagttactcagttactcagttactcggttatataatagattaattatctataacatggttatctatatgatagataagaaatatattttttatctttgcatgatgtttatgagctttgattcatctgctaaatctatttttattggagatagcctgactcttagcctggcaaaaggtgcgaaagagctggacgttctggaatattattacctggacagatcaggactaataaatggggcattttatgactggctggcattcgtgcaacggatgcctgtcagttcccctgatattatcatcgtatcgctgggtgctaatgatggtatttctgcctctgccagttatcgttacaaccagaagatcaggcagtttatttccgttttgaaaacacgttacccggcggccaatattatctgggtcttacctccggccatgaaaaacacacagacagaaaacgcactggtgaatacccgcagaattatttcagaaacagcaataatagccggttacaccgtatttgatccgcgtccgctcaccggcaggacatggacatattcagtcaatgggattgttctgcgtactgctgacggtatccattacacgccggaagccggtaaactgatttcagaacagatttaccaaactgtccggcaaaacttatag

SEQ ID NO: 278575 - DNA, 582 bp, Morganella morganii
atgagtgatacatcccgtcccgttctcacgctgaaccgtaaaccgaaagcggaggcagaaaaaaataaagacaccccaatacagccggtgttccgcagaaaacagcggatagatgctgtcccacgcccgaaaaaaaataaagcggctccggccgtaaagccccctgcccccgtcaaaaaaacaaaattccctgaaccgcctgcggtgaagcctgaaaaaatcccggtcccgccgacaccgccgaaaaaacggatgaatatcattgaggctctggggattattactcggtactggccgaaactgtttccggacggtcagctgcggccgatgaaaatcggactaaaagaagatttgctcctggaccggaaagccagggagctgccggtttcagtgcggacactgacccgctgcctgtcttcggtatcgtatgccggaggctatcgtctgacggtgattgccggtgcggctcgttatgataaggacggacagccctgcggaacagtgaccccggaggaagaagcggattccgtgaagcggctggaaaagttaagaaaacgacaggcaaaaggaaaggcggagtaa

SEQ ID NO: 278576 - DNA, 315 bp, Morganella morganii
atgcagttcactgtatacaataataccgggaaaagtgctgtctatcctatgttgcttgatgtaacaagcgatattattgttcagttgaaccgcaggattgtgattcccctgctgcccgttgaaaattatccggcaggtactcgtcccaaacggttggttccgcttatcagactgaccgacgataaagaatatgcagtaatgacacatgagatggccagtattcccgcccgttctctgggtattgtgttttgtgatgcctccctttatcgtacagaaataaaagcggcgattgattttctttttgatggtatttaa

SEQ ID NO: 278577 - DNA, 237 bp, Morganella morganii
atggctataaaacaacgggcaaccaaaagcgttaccatgactgtagaacgagtcttgctcagccgtgcgcgggaggccggaattaatctcagtgctaccctgacagctgcgcttgatgcggaactacgccggtatgaagcgaaaaaatggcaggaggaaaatagtgaagcactggaagcactcaaccggtttcatgatgaacatggttgtttcagcgatgaatacaggacattttaa

SEQ ID NO: 278578 - DNA, 624 bp, Morganella morganii
atgtacatttatggttacctccgcgcatcaacaaaagagcaggatgctctccgggcaaaaaacaggatgaaagcctttgtggaagaaaaaggattccggatggcgagctggtacaccgaaaatgtttccggagcatcacttcagcggccggaacttttacggttacttgatgacgctgcgcccggtgacattattctcatcgagcaggttgatcgtctttcacgcatggatgaggacggctggcagaaattaaagcaccttatcagtgaaaaaaacctggtggttgtcagtcttgacctccccacgagccatatggcgctgacatcacctgccggtgatgattttacccggacaatgcttaaggcggttaacgggatgatgcttgatatgctggccgcaattgcccgcaaagactatgaggatcgccgccgccggcagaaagaagggattgcaaaagcgaaggcagccggaaaataccggggacgccgggctgatgagcagttgcatcaaaaaatcatcgaactcagggtaaaaaacagacaaagtatccgtgataccgcgaggttgtgcggtgtatcagaacggacagtgatacggattgttaaactcagcacaggctcctga

SEQ ID NO: 278579 - DNA, 330 bp, Morganella morganii
atgaaattgctccaatttatagagaccagtatttttcagaaaaaaattgataccttattaagtcatgatgaatacctgtcttttcaggaatatctgagacaaaaccctgaagcaggagcaaccatttcagctactggtggttgccgtaaaatacgatgggctattcagggtaaaggcaagagtggcggtatacgggtaatttactattacataaacaccaaaggcgagatttacttgttattggcttatcctaaaaatgagcgtgaaaacctgagtgatgaacaaaaagctcagctccgcaaagttatttctgcgcttggagggacatga

SEQ ID NO: 278580 - DNA, 291 bp, Morganella morganii
atgaaggacgaacttttcaacgaattactggcaagtgctactgaagcagtagagataagtaaaggccactgtaaggccgcacgattgactacttatgatattcctgacgtaaaagcgatacgggacacaacgggattaacacagcaacagtttgctcttgccgttggagtatctccatcattagttgaagcatgggaacaacatcgtaggatccccaaaggcagcagcctgaaactattgtgtgttctcaaaaaaaatccttctatgctcagtatgctacaggctgtttga

SEQ ID NO: 278581 - DNA, 717 bp, Morganella morganii
atggaagcattttgcgccagctattatcctgtgtgccttcgatggtatggctcgacgccgctgagttatgctcacgtcagcgatatgttagctgaaagaggaatttccgttcaccgttcaaccatttatcgttggtttatccaatatgcccctgtactgcgtaaaaaactcaaaaagtatcagtttattcgtaccgttacctcctggcagctcgatgaaacttatgtcaaggttaacggaaaatggttttatctttaccgagcaattgataaacacggcgatacgttggatatctatttttccccgaaacgtaaccggcatgccgcctatgaatttctcaaacaggtattaaaaccttactctgctgagcgacagcctgaaatactcaatactgacaaacacgcttcttacggttatgccattgcccgtttaattaaagaagggaaactccgtgctgacgcaaaacaacggcaaataaaacatctcaataatcgtattgaatctgatcacgcaccgattaaaaaattgattgtcgcgacaggcggtttcaaatccgcgaagcgggcctggtcaaccatccagggatttgaaaccttgcgaaaactgaataaaggccagtttgatgaatggctgcgtcgtgacgaacctgaatttcgggtgtgggagcgatctgcctttatcaatcacttattcaatgtggagactgtttttgcgtga

SEQ ID NO: 278582 - DNA, 1089 bp, Morganella morganii
atggcctattataccatagacaaacgcaccaaagcagacggcactgtcaggtaccggtgctctgtgtccgtaaaagaaaatggtaaacgtattcacagtgaaagcaaaacgttcacaaagcaggctcatgcaaaaacatggggtacacgccgggttattgaattagagcagaacggtattcccaaccctgatgatgtaacaaaactcacagtacgggatctacttttcaaatatatcaacgaccccaaaatgggcggcaaagctggtcgcactaaaaagtatgtgctgaatatgctttttgattcagaactcgctgtgctgcctctctctgagttatcggttaatcacgtagtagagcactgccgggcgcgttcggctgccggagcatcaccatcaacaataaaccacgatgtaagttacctcacttctgtactgcgatcagctaagcctgtttatggtattgagtacactgattgcccttctcacgaagcgagaccacaactcctgcagatggggctgatcggaaaatcacaacgccgcagtcgtcggccacagaatgatgaactggctctgctaagaaaagggctgcaagcccgtagtgagcaccgggaagggaaaataccctttgtcgatattctcgacttttccatactgagctgcatgcggatcggggaggtgtgcaaaattttgtggtctgatgtggataagaaaaaccgcagcgtactggtaagagacagaaaagatccgcgcaaaaaatccggtaaccatatgtccgttccgctgcttggcgatgcctggacgatactacaacggcaaccactgaccgatgaaagagtgtttccgtataaccctaaatcggtatctgcaggtttccagcgggttcgtaatgcattggggattgaggatttgcgctatcacgatttgcgccgcgagggtgctagcaggctgtttgaggcgggattcagtattgaagaagtggcccaagtgacagggcatcgatcgctgaatgtgttgtggcaggtttatactgagctttatccgcagtcactgcatgataaatttgataaacttaataaaattatattataa

SEQ ID NO: 278583 - DNA, 756 bp, Morganella morganii
atgaataacaatgaaatcataaatgcggtaaaatgtggaatgaagatagccgcaagagagatttattatatggattttagttcaggaggtaaagtaagcactgaatactttgcgacagtatcaataggcaagcgtttatttagtgacaagaaattcaacattggtgataataaaattatatttgaatatgatactcggaggtttataacggcaaccgtcccattaataaaaaaaattcaaccaaacaatatgtttacgcgaagtttaatacggtcacacgcgaatacaaatcgtggtgggcgaatagatatcgctatcattggtaataaaaatggggttgactatcctatttgtgccattgaagttaaaggagacaaccccacaaaaaaaagattaatagatgatataagaagaaacttagaatatttcaagcacactgacactactggaaaatctgatttaaggatagcatttaactgtgcattcgaatcattttccagtgatagtaaaataaaaaaaagattttgcataacaacaacagatagaaataacaaaataaaaatagtaaaacaaaaatatagaaaatatattaatgaaatagcgaatgaaatacctaaaaatattgatgtatcaattgatgttttctcttccagtgaaatattggtagacccatactcaagtcaggatgaatacgaagcgctagaagacagcatacatctgacactgggagtcatgattatttttcaacaaatttga

SEQ ID NO: 278584 - DNA, 1476 bp, Morganella morganii
atgatttacacagacggcaccatagccattaatgccggttcaccgattgtgaccggcagcggtacacagtggaaaaagaacattcacggcgtggcacccggccagcttatcagcatcgagaacggcacagcaccggtcagcatgatgatccgcgcggtaaacagtgataccgaactggtgttgtcattcaatgccccggtgacgctcagcggcgcgaaatactctatcgccaccacggtaccggataccatttcggatgcggcccgcaccatgtcagccaatcagggctatatcgtttactttctccaggcaatgcagcagtggatgacagacaccggacaggtggagattgagctgccgaacggccagaaggtgacgctggatagcatcaaggcactgaatgatgctttaagcaatctgtctcaaagagttgatgatataaagatacccgaagtgaaagacgcatcgataaatcagaaagggattgtgcaactgactgagaaaattggtgactctgagaccttggtaccacatcagaaggctgtgagagatggtatcaatgcattaaattcaagtatcggtaagggattatccatcaatgataatggatatactgagatttacccatcagacaaaaataaagcagggctttggcaaagaataaatacatctgtgtttgaggtgctcagtggtagtaccggaaaattttccgttgcgaatgactccgtaaagataggcggaacaatcgatgttaaaaccaatacccccggcaatgatcagtcaagggttgaaataacatcaccagatggcagatttagcatcggtatgtggggatataacgatggacgtacattagtttcgtgccgaaatacatcagggtggtctaacgtcagttttgcaaatgtcggaagtggcagcgccgcagtaatcggcgggaatatttatgttgatggcagtggttacataaaaaaatcatccccgattatccagatctatcctgacggtaattacgacaccaatgacgaatccgaaggcgcggaagtccgccgtaccggcaacggccaatatcacattaccggcattcttggttataactcagatggtgcctggggcgtaaacggtggtatctcagtaccgaaagataataacggccttgagttggtttacgtcgcggaccgcgttctggaggatggtagtatcatcatcgaaacctgtcaccgtcagcatgcgcatttaccggaacgtttccagaactggcggctgaaagaggtcaccccggaaggcgagcgcattttctatcaggacggcgaaccgtgtgacctgccggaatccacccgcctcgatgtgcgtgtggaaatgccgcagggctcagtgtggaatgtgaagcaacgtgaactggctgaacagatggagcgggagcaggcagaacgtgaagcgcaggaagcagcagagcagggcgcagatacagaggaataa

SEQ ID NO: 278585 - DNA, 258 bp, Morganella morganii
atgaatactgtattcctgttaatggcggagtttgaaacatctcagatcccgctggctgtagtcgcaaagaaattcctgaatatgaccgagtcatacgcggataaaaaagcgaatttaggtgagctaccatttccggtttaccgggacacctccagccagaaatcgatccggatggtacacattagcgacctggcagaatggattgaatcagagagagccaaggccagaaaagaattcacacacctgaatacgcagtaa

SEQ ID NO: 278586 - DNA, 570 bp, Morganella morganii
atggataaattcaaacacctgatgattgaccttgaaactatgggtaacaagccggattccgctatcgttgctattgctgctgtaccgttcgacatggtttccggtgtaactgatgatgcgcttttttatgaagtaatcgaccttcgcagcagcgaaaaatacagcggtagtatcgacgctgataccgtgctgtggtggctgggtcagagtgagaatgccaggggtgaaattactaacagcacaataatgattaatctgcctgttgccctagctcgacttcattcgtttgcttctgagttctgtggagaacaggttcaggtgtggggtaacggaagtagtttcgataacgttattctgcgatcagcttatgaaaactgcgggataactccgttctggaagtactggaatgaccgggatgtgcgcaccattgtcgagcttggccgcaatgccggcatcgacccgaaaaaagatttcccgtttgttggtgaagcacacaatgcactggatgatgcattgcaccaggtgaattacgtggtcgcaatccaccagcatttatttaaaaacctctaa

SEQ ID NO: 278587 - DNA, 300 bp, Morganella morganii
atgaacagtaaaaatataccgtttttacaaccagatgatttaaataatctgaaacggttcgatgaaacctgcgaagatagccagccttatgatgtgccaaaagaaaaaatgcaacgcctggctgaattgggagttgttcgccgtcacagtaaaagctattacagcattaccagtttcggcatgtatgttttaaatcaaaatgacgaattaattaaattgccgctcaaaactgaatctgatcataacgaagattttacgtttagcctggctaataaaattagaggatcccaaaatggataa

SEQ ID NO: 278588 - DNA, 471 bp, Morganella morganii
atgaaacccatcctcgatatgtgctgcggcagccggatgtttatgcacgataagcaagatccgcgtgtgttgttcagtgatatcagaaatgaagaacataccctgtgtgatggccgtctgctggaaattacaccggatatcattgctgactttaaaaatctgccgttcccggatgaaacattttaccaggtactgtttgacccgccccacctcgttcgggtcggaaaaaatagctggatgtttaaaaaatacggttcacttgataagcactcatggcgttctgacttggccgctggtttcaaagaagcatttagggtgttgcggccacacggcagtttaatttttaagtggaatgaaacgcagatatgggcgagtcagattcttgagctgactgaatataaacctaccattgtgcagcgtgtcgggaagaacgataaaacacactggatggtattttataaggaaggatga

SEQ ID NO: 278589 - DNA, 696 bp, Morganella morganii
atgagctttcaaaacgacacaaaattgcatgaaatgacgtgcataaaatcagatggcctgcaccggcattatcatttttccaatccgcgtaattcgtgctactggttcgatattgtgacagtacctggttttttattcatgaccggtgatatgggaacgtgggcctttagccgtatacgcgacatgatccagttcttcaatcacgacagcattgattatgggtactgggctgaaaaattacagatgggatcaaatcgtagtgaagcttcagctgcatataaagaggtcgatttatcttcaactcttgaattttatcgccggtcattagaagaatggctcgcagataccattgaaggtgaggacgacaaagatacattaagtgcaattaaaagatcatacagagaatttgcggaacgtatcggccggttaaagtcacttatatctgattattcaactggaagaatatcagagcatgttttttaccacgccgtagcagaggcagacatggaagacgactcatggcccggtcacccgtcaccatgggattgggaaaatttaagtccacatttcaaaccaacacatcactacgcatgggcgtgtgaagcaattcaatatgcctgtcagcgtattgcgaataaagaactggctgaggctgcggtcgataaactgattttatttaagcaggtgtccgcatga

SEQ ID NO: 278590 - DNA, 729 bp, Morganella morganii
atgaaagagcgcggaataattttcaacacggagatggtacgcgccattctcgacggccggaagacgcagacgcggcgggttatgaagccacagccagtgcctattaacagtggcgctaatcatgtgtggtattgcgaaaaaatagatgcgagccttgatgttaaagatgctttacaagatggaaatgttggctggtatggtttgatttcttctgtttgcccactcggtggagttggcgaccggctttgggtgcgtgaaacttttgcattacttggtaacgaagatggtgtttgtgtcgattggaatgaccgaattatttatgacgaaaaagaagccgccagaatttatagatcctcttgtgagcaaaaagacggtgattacggcctatggtcaatccctgatgatgctgactggaagcctcatactgacaatcataaatatgatggaacatggcgaccatctatccacatgccgcgctgggcttctcgcatactactggaaataaccggcgttcgtgttgagcgattgcaggatatcagccaagcagatgctattgcagaaggcgcaccgcccagccacccatctattgatgctgtatctcgtgaatatggcttccctgattttccacgctcgtggttcgggcaaacatggtggcatatctacggaaaggaaaattggcaggctaacccgtgggtgtgggttatcgaatttaagcagattcaggggtga

SEQ ID NO: 278591 - DNA, 528 bp, Morganella morganii
atgtcatatatagcaaccagtaccggaaaacatattgatttcgtcaatatcactccggatcagatttgtatcgaagatatcgcgcgtggcctgtcgaatgaatgccggtttgccgggcaactggagagtttctattccgtggcccagcattctgtatatgtcagccagattgtgccgccggaatacgcactggaagcgctgctgcacgatgccgctgaggcgtatatcaaagatatcccctcaccgctgaaagccatgctgccggactacaagtccgtggaaaaacgcattgaagcggttatccgtgagaagttcggcctgccgccgataatgaccgttgatgttcactacgccgatctggtcatgctggcgaccgaaaaacgggactttgaaatagaccccggcggccactggccgatgctgggttcagccccaccacatgatgacatcattatccagccactgacaccaccgcaggcatatcaccagtttatggcgcggtttgaaatgctgacaactgaggaatag

SEQ ID NO: 278592 - DNA, 228 bp, Morganella morganii
atgtctgaacaaaaaaatccgagcattaaaatgattattaccgtgacactggaaggtgcgccatgcattagtgttgatgtgaaaacagatactactgtcggtaaataccaaccgtatacagagtattttctggaaaaaattaaggaatatatttccggtgaggaagtaactgcggctgcaataaaaaaagcaggacaagataccatgataaaactcagaacccactaa

SEQ ID NO: 278593 - DNA, 828 bp, Morganella morganii
atgtctaatttagacggaaccgctatttctcagattcagaatatggccgttgcttcattaagtctggatgctgtaaataaatccctctgccctgctgtggttttaccgggggatttcaatgttaaaagcctggagcaattacaggaaggccgctaccgtttccgtggtgcgatggatacaaccagcatcactgattttgtgaaatattccctgcaacacggtgttgaggaaggtgtcagctgctttattgatgctgatgagatggctgcaaaaaccatcttcaatatcggtactatcggcgagccggggcatgctgataataccgcccaggtatcactgaaaaaaacatcaccatttgagtcacttctgcatatgaacggacgtcgctgtggtcagaaagaactggcagaatggctggaagactggcgcgataacctgatggcatttgatgcagaaggtaatgttatcgatattaagcaggcaatcaatgccgtccgcaaaattaccattgaagcaaaccgctccgcagatcatgaagaccgtgattttggtgccagccgctcagtaatggaaaatgtggaagcaaaaagccgtgacatcatgcctgctgtatttcagtttacctgcacaccatacgatgaactgtctgaacgtactatcaaactgcgttacagcgttctgaccggtggtgaagtgcctgtgctggtactgcgtattgttcagctggaaaaactggaagaacaaatcgctcaggaattccgtgatctgctggctgataaattcgaagaaaccgaaattcaaacctatatcggtaaattcagagcttaa

SEQ ID NO: 278594 - DNA, 363 bp, Morganella morganii
atgagcgagaataaccgcatgaccagtgtaccggactttctctctgagttagacgccggtgtgtttgaaaacaaactttctgctgcactgaatgaagtcgctttcggtaccaataagaacggcggtacaggtgaagtacatgtgatttttaaattcactcagtcagatgaagaccgtgtgaaaatatctcacaaactgaaaatggttaccccgactaagcgcggtaaaaaatcggaagaggatacaaccgaaacaccgatgtgggtcggtaaaggcgggaaactcactattctgccggaagaccaggggcagctatttggtatcgacggcagtattgacgggaaattaaaagccattaattaa

SEQ ID NO: 278595 - DNA, 213 bp, Morganella morganii
atgcaaaccgaaccaatcatcaccactaacaacatgtcagtagacgatgttgccgcgtggatcaccgaaaaagcccaggcatttcacaaactgcaatcactccgtacagaacgcgaaagagcaatccgcgatcacgaacgtgctctggaccgctttgatgaagacattgccaagtgggaagaccgctgtgctttaacagtacaaccgcagtaa

SEQ ID NO: 278596 - DNA, 192 bp, Morganella morganii
atgagcagattaactcatttggcaggctttgcgcaactccgcgttgctcctgttaagggtggtaaagaccctgccgcatttgtttatacggtaagagtaccggaaggtttctcggaaacaaactaccagtttgtgaagtgggcggtaggtgattttaaccgcttgggtaagacagcaggagccgcggcatga

SEQ ID NO: 278597 - DNA, 189 bp, Morganella morganii
atgaaagaaacagctgacaatcttgatcggtattacatcgacagccgcgggcggaaagttcacgttgtccggtttgaccggcaaaacagccgggtgattttcatgcgtgagggctatgaacatacgtgttttgaacctctgaaaacctttcaggagcggtatacacgcgtggatgaggtgaaaccatga

SEQ ID NO: 278598 - DNA, 885 bp, Morganella morganii
atgagcatgattttaactgcgcgcgctttgcagataaaaaccggcaacgcgctgcgcaaacttgttctggtaaagctggcggataacgccaacgaccagggcgagtcgtggccgtccgtgccgtacattgctgagcagtgcgaaatgtcagagcgctcagtacagaaccatattaacgccctggtggaaatggggctggttcgtatcgagtcccggaaatctgccaacggtcttaaccagtcaaatatctatcatctgcgcctgaatgctgccgttgtgagtggtgaatctcctgcaccatatggtgcaaatcctgcgggggtgagtggtgcaaatggttccgtgactggtgcagcaaattcaccaggtggtgcaactggttccgatagtggtgcaggagctgcacccagaatcagtaatgatccagtcatagatccagataataaaaatattaatcctgttcgcggaaaagccaaaagcaaaaccgtgatgccggaaaacttcgcgccgtcaccggaacacactgaacgggcaaaaactgccggattggatgttcaggatgagtttggcaaattcagggactaccacgccagcaagggtacccaatacaccgactggaacgcagggtttaattactggctgagacaggcagccggatttaaacgcgctgcggactcaaagcacatcgacaccaccgagtgcgatgaagtcttcagaaaaatgttctcatcctccaactggaagccagaaaaccgcgtgcaggagctggtcgcaaaacacaaatcctacattgggcggatgaatgaaattgctggacgcgcagcattccgcgggtactggaaacaggccacagaacaggccgcaaaagaacgggaggcagcatga

SEQ ID NO: 278599 - DNA, 540 bp, Morganella morganii
atggccggatatgcaagtaacacagcccctgaacacaaagacagctggcagactccggagtggcttttcacggctctggatttggagttcggattttatctggatgccgcagcgagtgatatcaatgcactttgttcccggtatctgactgagcaggatgatgctctgaaatcggagtgggtcagccatggtgctatctggtgtaacccgccattcagcaatatccgtccatgggtggaaaaggctgccgaacaggcacgcatgcaaaatcaacctgtcgtaatgctggtaccggaagatatgtctgttggctggtttttggaagcactgaaaacggttgatgaaatccgggtaattaccggcggccgtatcaatttcgttaatcccgtcaccggcgaggagaaaaagggtaacagcaagggctcaatgtttcttatctggcgtccgtttatcaccccgcgccggttgccttctttcgcgctgaaacaggatctggaatctatcggtaatcagtatctggcagaagtaagggcggcatag

SEQ ID NO: 278600 - DNA, 411 bp, Morganella morganii
gtgacagataaaaagaaaataccactctacataaccattgccgaaaccgaagagcagggggctgaaattaccacccggtacatcatggataaatatggcgtgacgtgcagcaaaagtcagtcagcaatcaggattctggataacgcaggggttatcaatgcgggcgagcggcggaacggtatcaaaatagtctatacggtgctgcccggagctgcggaaaaaatcgcggcatacggcgagcaggtaaggacaaagcgccagctcgcagggttggctggccgtaccgcaacgtcagcaggaactcatcaggatatgacagaacggaggtttgtctccatgcacaaccggttatttacggcactggcggcaaagcgccgggagatgaaacagagtagcggggtggtggcgtga

SEQ ID NO: 278601 - DNA, 408 bp, Morganella morganii
atgcacagcgcaataactctgacccttccgttcccgccgagtatgaacacttactggcgctccccatcgcggggagccttaaaaggccgagtgctgatcagcgaaaacggccgccggttccgtctgaatgttattgctgacatcctggatcattttaacggccggacaccgaaaccggtcaccggtgatatcagcctgaagctggtgctgttcccgccatcgaatcaccgcagggatctggataacttcatcaaggcgatacaggacgcactgacacatgccggtatctggaatgacgacagccaggtaaagcatcttgatattgaatggggtgaaaaagtcgctggtggtaaatccgtggtgacgatcagcccctatgtaaaacgcgcagtatacggctgcgcttaa

SEQ ID NO: 278602 - DNA, 789 bp, Morganella morganii
atgagcaatctgattattgtcgatggtattaatgtgcgccgggatatggccggtcgctattgcctgaatgatttgcaccgggccgctggtggagaggaaaggcataaaccgccttactggctgagaaacgcacagacagagcaacttattgccgagttgcaaatctgcgactcgggtacacagccggtaaatgtgctgcgtggtggcaccgaacagggcacctacgtgtgcaaagaattggtttatgcctatgcgatgtggatcagcccttcattcaatctgaaagtgatccgcacgtttgatgtgctggccggaacacagcaggcgatacagctggctgataaggttcaggccggagctatcctgctggagtctatggcaaaaacactgaatctgtcgaattcctcaaagcttggcggatatcagaagctgcaaaagatggctggtcttccggatctggctccgtcctatgcgattgatgcaccggcgggcgcggtggatggttccagcagaccgacaacctccctgacaacactactgagaaatcacaatgcagcgttgtctgctatccgggcatataagcgcctggctgagctggggattgtggaacagaaagcccggccaggatcacgcggcacacagcgcctgttctggtcgataacggcgaggggactggcatacggtaaaaatatgacatccccggcaaacccacgggaaacgcagccgcacttctttgaaagcaaatcagctgagctgctggcactgatgatgactccggcggtggcctga

SEQ ID NO: 278603 - DNA, 1017 bp, Morganella morganii
atgaattacctgttaaccggctttgtccaaaaagatgcccggatcctgatgtttaatccgggtgcggagatctgcaattttctgaacggtgcccgctacctggtgagcgcggcgccgcactcgatgaatggcattccgtccggtcgcgttccggcagatgcacagccgctgctgacagatgagcgggtactgcgtttcctggaccatcctgccgtggtaaaagctgccggtggtctggctggtttccgtcattacgttaaatcggtagaccattgccagattgaaaacgcagcggatccgtatcatcaccacgaactgactatgacacgctacaaagacggttttatccggacgtgctggcaccatgacaacatcttccgggtggggaatatccaccagcagcaggcggatgaaatactgttgcgtaaccaacgggcgtttgtggcacgcagtatctttaccgatctgcggctgccggctggtcatcttcttaatccttccgatttgttcacctggtcggtgatgcgccgcgtcagtgatcatcttccggcctttatcagctcatacatcctgatgcagccaccggaagaagagataaccggcaccatgacagagcattccattgtccatcaaccgcgctcacacagccggattgttcaggaaatcgtagagaagataaagcctgtcgttgttcttaaggtggatcctgagccgccacaaagctttatgaaaatcccgaaatatcagcgctgggtgtgcccgacgtatctgcaatgggtgaaaaaacagccgtgttgtgtgtgcgggcagcaggcagacgacccgcatcatatcatcggtcatggcgctggtggtatggggacaaaggcacacgactacgaagttatcccgctgtgccgtattcaccatgacgagttacactgcgacccgacagcatgggaagcaaagtacgacagccagaatgagtttatggcgaaatgtttacgccgggcattcggcctcggtgtttttggttaa

SEQ ID NO: 278604 - DNA, 1056 bp, Morganella morganii
atgaaaaacactgttaatttaaacagtattaatttagtcaacgacgactcactcagctatatcaaaacccttccggacaattgcattgatttaatcgccacggacccgccgtattttcaggtaaaaacatgtgcctgggataaccagtggccggatgtttctgcttacctttcctggttggacgaaatgctggctgaattctggcgggtactgaaaccaaacggcagcctgtacctgttttgtggttcacgtctggcttcagatacagaaatgctgttgcgggaaaggttcagtgttctcagccatatcatatgggcgaaaccttccggcccgtggcggcggcaaaacaaagaaagcctgcgttgttttttcccgtctactgagcggctgctgtttgcagagcattatcagggaccggtaaaaggaaaaggcagtgagtaccaccagcggcgggatgaactgaagaaaaatgtgtttaccccgctgattgagtatttccggcaggcgcgtgatgcattgggtatcacggcaaaagaaattgaccaggcaaccggcaagcagatgtcttcacactggttcgggtacagtcagtggcagttaccgaatgaagcggattaccggaaattacaggtgctttttcagaggacagctgcagagtgtcagcgaaataaccctttatgccgtgaacatgatgatctggtcagtgagcaacacacactcaggcgcgaatatcacgaactggcagatcagtatcagttgttacgccgttacttcacggtatcagttgatgtgccttataccgatgtgtggacattcccgccggttcagtattaccccggaaagcacccctgtgaaaaaccgaccgcaatgatggagcacatcataaacgccagcagccgtgaaggtgatttggtcgctgatttctttatggggtccggagcgacactgaaagccgcactgaagcacaatcgccgcgttctgggtgtggagatggaagcggaacggtttgaacagactaaggcagaaataactcaactctccggaatttccggatag

SEQ ID NO: 278605 - DNA, 192 bp, Morganella morganii
atgcgcatgtctgacaaatattccagccctacagcatacgcctggggacttataacctctgcttttggcgttttatctctggaccagtgggctattgttgccgggatcatctgtactgtcgggacgttcctggtgaactggtattacaaacggaaagaattccaactgaaagccggagaacatcatgaataa

SEQ ID NO: 278606 - DNA, 477 bp, Morganella morganii
atgaataaccgattatttaaaaaagtcatggccgcttgtgccgccggggcgattgccggtgcgctggtgctgatccccgcgtatgagggtgttgagtacaaaccttaccgtgatgtggtcggggtgctcaccgtatgttacggccataccggcagtgatatccagcccggcaagctgtatacggatgctgaatgtaagtcgctgcttcatgacgacctgacaaaagtccggcgtgcggttgacccgatgatcaaagtgtcgattgacgacaatacccgggcggccatctattcctttgtctacaacgtcggccctggcgcattctcgcgctccacgatgctgcgtaaactcaatgccggtgatatcgccggcgcgtgtgacgaaatgaagcgctggacatatgccggtggtaagcagtggcaggggctgattaaccgacgcgaaacggagaaagcgatatgccacggaaccctttaa

SEQ ID NO: 278607 - DNA, 528 bp, Morganella morganii
atgaaaagagtaatcactgtattactcaacggctgggtgtgggcggtagtattcttcggtctatggatgttcagcctgttatcagctgaaaaatcagaagggcagcacaaagacgatgtaatcaccgatcagcaaaaggtgattgataacgcttacaccagcatcgatatctttgaccgcgtgtccgcagcgaacgccaaccgcagcatgcgcatcgaggccaaatcacaggagaagcagattgaataccgcaccatcatccggaaagagcctacctgtaatctgtatattcctcagtctgtttctgacgggctgctcagccacgtctacgccatccgtgaatcagcaatgcgttccgctcccgacatcgctgacacaaccggtgctggcaccgctaccacccgccgactgacatattgccaggcggttgaatggatagaaccgctgctgacggcgttggataaggcgaacgggcagttgatggatatccggaaagtagatgcagagcgaagaggtaagtctcgataa

SEQ ID NO: 278608 - DNA, 156 bp, Morganella morganii
ttgctccgcttaatgacacctatggaggaactgcagatgtttcatattatcgaggtactactgaaatgtattttggcttttattgtgtacaaattactgattaagacccaccctgaacatgctataaccctcgcaattttaattcttgaactttaa

SEQ ID NO: 278609 - DNA, 2298 bp, Morganella morganii
atggctactatccctactcaaaatgcagtaccgagtgaagcaccgcgcgacctgaagtttaactcaggcaagattgacgaattcgtgacatcactggaacacgaatataaagaccgttttggccgctgccatatgactatcgaaggtatgaaatggatgttcgaccagcttgttttgcgattcaaagtcgatatgaatcaggcaataatttcagctggttacatcaccgttgatagtttccagcagggagcgcaactgccaaacaatgagatcacccagcgcaatcagattctgcgtgacgaaaccaccggtgaatattatcgctgggatggtgatttgcctaaggttgttccggctggctccactcctgaatcaacaggtggtatcggtaaaggggcgtgggtgagcgttggtgatgcgtcactgaggggcgaactatcaaagccaacaggtgccgacttgataggtactgaatcagggaaaaccgttcaggagtttcttatcgctaacgatagtgcggaatacagagcaaaaaatatagcaaaactagcctgggttgattatcaggtgcacaaccaaggtaagtttggagtgtgttttttgggtgactcaatgactgctggatgcgacagaacatccagtgatgtaattccacctcaggatggtgattgggaaaccagggcatctatgaattatccatatcgttttgcagaatatcttaaagaacagtcaggaagtgaagttaatccatttgtcatgagggctgttactggatatacagcaatgcaggctttcagtaatcaggcgtggcaagtcaatccttattgtgatgtagcaattattatgtttggaattaatgattcaggcagtggggaggaggggcatatcgatgtttatatggattatatggaaaaattaatccgaagatatatcgattggggatgtgctattgtcgttcaaatcccaacgcacggagggcaaggggctggcgatccagcatggctgtactgggctaaacgtatgagaatgatggcctctatttatggttgtgctgttttcaatggtcatgaggttaatctttatcgccacgccgcgtcagtccagtcagatggcgttcactttaattctatggggtatgcgattcacggagaaaaactagcgtcaatgttcatggctggtggattgaatgatacctatagaccagtaaccaatgagacattagtatggcccggcatgatgtctgataacattggctggtgcgatgccatgaaaaatatcagtacgtcacgcagcgactccgcttataccagaagtaaaattattggtggcatgcccgcaggttctaaatctcttatgtcgtttagtttttacttagatgccgaagcagcacatatttacggcaagcttgaaggtaagataattaccaattattccagtggaaaaaactggaacaacaacgctaaaccttattatcagcaggccacagatcaagtaacttcattcgggggagggttaaatcggaatgtcaaaagtccagacacttatggcacagggtatgtaaaaggcgctagccgttttgttggtaggctgatcgggcgggggtggcacactatcacatttcatcgtgacaccgatgatgcgcaatatgaagcgtatgttaatagcattacagttcagcctattccgataggtttgtcagttgagcaaatgtgggggcaagatgaagaacgtcgctataaagtcgtgcattcgcgcaagtttccgtccccgtcaggcatgggagaagttttggctcagccggttactctgacacaattccacatgagagcgccacagtgtgtgttgggtacgggtcctggggtagcagcggcatcatcgccatttttctacaatacagtgccggcgaaattaattattacaaacgagaaggggtggtatatagaatgccttgtaagcaaaacttcaggaacagatgggtcatttaaagtatcaatcttaaaatcaacgatagatcaggataaaaccccgtcgatttcatgcagtatagctacagcggaaaggaatactatcgttgcagctggtgcatatggaaataaccagccaatcgaaaatatctatgactataacgcacgtattcacaagcagaactttacatccggtgacattgcatatgctggaggaatatacctgatattcgatattacatggcccggtcaatcaccaagtggttattggaatgtcgaagttgagggcggggactggtttggaaactcagaatcatctttcgggtcttattaa

SEQ ID NO: 278610 - DNA, 837 bp, Morganella morganii
atggatgaaagggaaatttggttacgtctggcgtgtatcaggcggttaagtgcacatcatgctgtcagtgctgccactatactgacagagacctgcacacagaaaaacggtgagattcgtcagcagctgcatcagtgcggactcacactggtgcagtgtcagcaatttatgaatgtgaatacatccaggctgaaaacggcacttatatgggctgatttaccgggtaacatgatattacccctgtcatcaccacactatccgtttttattaaagcagatctattcccccccgcttgtgctttttgtggcagggcagtgtgaggcgttatctgccccgcaggtcagtatggtgggcagccgtgcagttacccattacggcgaaaagtgggcggactgttttacccagcatcttgtgcagcacaatctggtgataaccagcggtctggctgcgggagtggacggatgctgccataaggcggcgctggcatcaggcggaaagacggttgcggtatccggcagcgggttatctcatatttatcccgcaaagcaccggtctctggcagtggagattacagaaaatggcgcacttatctccgaatattttcctgatgtgccgccgctgatcccggaaacaccggaagtgatcatcacaccggtacaggaggaactgccgtttgcacatgtgctgattaatgtggatgatgaaccgacaccggcggatattattgccgcgcggtgtgagctgccggtcacggaggtgacaacacaactgctgcagctggagttatcaggtaaaatagccgtggtcagcgggggatacatccgcctgcatcactga

SEQ ID NO: 278611 - DNA, 159 bp, Morganella morganii
atgccacggaaccctttagtgctgatcatcattgctatcatcctgctgacggcctgcctgttggcgggttgttatctgtattcactcgatactcactgtaagccactgctgggtaacccgctggacggtgtgatctgttatgagtgtgaagcgccatga

SEQ ID NO: 278612 - DNA, 477 bp, Morganella morganii; identical to SEQ ID NO: 277451

SEQ ID NO: 278613 - DNA, 192 bp, Morganella morganii
atgcgcatgtctgacaaatattccagccctacagcatacgcctggggacttataacctctgcctttggcgttttatctctggaccagtgggctattgttgccgggatcatctgtactgtcgggacgttcctggttaactggtattacaaacggaaggaattccagctgaaagccggagaacatcatgaataa

SEQ ID NO: 278614 - DNA, 459 bp, Morganella morganii; identical to SEQ ID NO: 277448

SEQ ID NO: 278615 - DNA, 441 bp, Morganella morganii; identical to SEQ ID NO: 277447

SEQ ID NO: 278616 - DNA, 705 bp, Morganella morganii; identical to SEQ ID NO: 277446

SEQ ID NO: 278617 - DNA, 423 bp, Morganella morganii
atgaacagcgaaaaatacaaattgtacgtagagataatcaagcgatgccgtgactgcaccgaattcaacaacaaaacagtgtcagcggtcattggcattgataccaggacaacatccatctacatgcgtgagatggaaagtatcggatgcgtgaaaacagtaggacgccgggttatccgtggttatctgagcccggtgtaccagtttgacgataacgctgttaccaggctgagaaatcatttcctgacggaggccatgcctgaagcggcgatgaatattatctcagccgaaaaaataccggtaccaaaaatcagaaaacatccgttcgaagatggttttggccggtcgctgataaccgaaattgacgcaatgctgcgggaggtgtgctgtggaatgccaactgtgcagcaaagaactggctga

SEQ ID NO: 278618 - DNA, 444 bp, Morganella morganii
gtggaaaacttctgcctgcatgaatccaacaaaaaactgttttacgagcaactgaaatcactactgagcacccacccgaagttaagtatcaccgcaaaaccctaccgcccgaaacgaagcctttcacaaaatgcactcagccatgtctggtacaaagaaatcagcgattatctgattcgtgccggccggccgttttgcactgaagcatgggtgaaagaaagcctgaaggcgacatacctcggatttgaaaccactgagtacaccgatgttatcaccggcgaaaaaacgcagcgtgagacgctcaggcgcacttcaaaactggataaaggggatatgcattactttcttcagcaagtcgaatcatgggctgcacagttcggtttaatactgactacaccggaggattcggagtacatgaaactcaaaagggagcaggacgcatga

SEQ ID NO: 278619 - DNA, 195 bp, Morganella morganii
atggaaccaacggattttgaaaagtggtgtgcggaagaaacgggaatgccgctgaaccgcatcatgcgatggaagttcggtgatggttataccgaaggtgccatcaatgccatgtaccgcgcatggaatgccggagtacgcagcaggctgccgtaccagacaccgccaaaaggagatgaagatgaaatggattaa

SEQ ID NO: 278620 - DNA, 696 bp, Morganella morganii
atgaaatcactcaccacagccattcagcagcgtgacgctggcgcactgcggtcaatggcaggagctgcaccaaaaccacaacagaaagttccgcaggaagccattcaggtattcaacgagctgttccggcagctgaaagcaacattcccagccgcaatggcaaacttccagacacaggatgacctgaacgaatttcgtcgtcagtgggttctggcctttgccgaaaacggaatccggacggtggatcagatcaacgccggtatgcggattgccaggcagcaggagaagccgtttctcccgtcacccggtcagttcgttcagtggtgtaagcaggcagactgcgtagccgttggacttccggatgcggacgggctttacgacatgatcatgaagttcagtgctaaccgcagcatgtaccgaacggcagaggattatccgtggcaaaacaacgcctgttactggatggtcacgaagttacatgcactgagtcgtgcatctggactgaccgagtcagagctgaaaaaacgctgttctcaggaactggcggtgatggcatccagaatccgatccggtgaagaaattccggcgccgcgtgtgcaaatccctaagctgcatattccggtaccgaaggaaaaagcactggcgcatattgcagaattaaaggccaagttcggcttccggacgcggacggcataa

SEQ ID NO: 278621 - DNA, 951 bp, Morganella morganii
atgaataccgcattaaacaacgtgtaccggttccccggcagagcgccggaggagcggcctgtaaagccggagcaatccggcaaggggtttgcattgatacacagacaattcatggacagcaggctatacagggattctcaggcagtccatctgtggctgcatctgatactgaaagcaaatcacactgacgaggaggttaacactgatatcggtatgatgattgtccggcgcggccagatgatcaccggcagaccgacgctggtatccgagacgttcatccctgacaacaaagtgaagagtttactccggacttttgagtcgaaagggatgattaatattgagtcgaaaggccgtaaattcagcctgatttcgatagtgaaatatgacgattttcagtctcaaaattgtccaacggacgtccaacggatgtccaacgcaaacaccagtgaaaatgcgcctctcagcgatgtttgtccaacggatgtccaacgattgtccataaacaataataatatattaaatactaacgtatttaatgatcgtccgagaatttcaaaatcttctccccgcaaagcaaaaccagaagcagcagtcagttcacccaaaggtgacaagtggggaactgctgacgacctgaaagccgctcagtggatattccagctcatcaccagaatcagcccgtctgccaaaacacctaactggtcaggatgggctaacgatatccgcctgatgcgtgagcaggacagcaggacgcattcggatatctgccagatgttccagttcgccaaccgggatagtttctggaaaagtaatattctcagccctgcaaagcttcgcgagaaatggactcaactggaggccaagcggaacacgcaggggcagggtaagccatccggcaggccgcatcttgatttcgataacaccgattgggcggaggggctgaaagtatga

SEQ ID NO: 278622 - DNA, 795 bp, Morganella morganii
atgagttctttatcgctgcattacaagtcaaaagataagaacggtacggagacaactgtcaaaaaaacgtatctggttccggtttcagagctgtacgtcgagccaggatataacgtccgcgaaatcgaccaggaacatgttgctgagtttcgtgacgcatttgtggcgggggaatatatcccgcctcttgccgttcaggtgacagagcagggtatcaaaatcatcgacggtcaccaccgctattacggcgcgctgatggctatcgaatccggtaccgaaattccgcgcattgaatgtaaggattttgttggttcggatgctgaccgtatcgcattcatgatcaccagctcacaggggaaagcattatctccactggaaagagccgcggcatatcagcggctgattaatcagggatgggaaccggcagaggtggcgaagaaagtaaaacgctcactggccgatgttgatcaccaccttcagttactggcgtgtggcgatggcctgattgagatggttcgtaccggcgaagtatcagcgacaacagctgttgcattatcccgcgaacacggcactcaggcatctgctgttgccaccgagcagatgagcaaagccaaagctgccggtaagaagaaactgacccgcaatgcggcgttgccgcagttcagcgcagtgaaggccagaaagtttatccaggctgttgctgatgccggattggagctggacggcgaggcgggattacttatggaagagtacaaggcatttttatctgaaaccggacaggaggtcggatcatga

SEQ ID NO: 278623 - DNA, 327 bp, Morganella morganii
atggaaaatgcaaatccacgcaaatcgtttaaccggtttgtgtcaaatcatctgatggcaactgctcatcaggcactgagaagcaccacacagacagtggttgcaaaactgctcggtgtacacgattcaacagtcttacgcagaacagaaaagttaccggagatatgcgagacattggccgcagccggtatcacagattttgttttgccaggcgagaagaaaatcagcgaggaggagtaccggtttctgtggaagcagatcggcgaactctctctgatgagaacaaaagaaaacgccccagctgttggagcagcagaggcgcattaa

SEQ ID NO: 278624 - DNA, 285 bp, Morganella morganii
atggcaacaattactgttattccaaagaaagacaacgcgaagaaccgccggttagcaaagcaaaatgctttctgggacagaaaacgcgcggagtatgcagcgaagcctaaaagccgctcagtggaggaaattatcgattcaattgtcggccggccggcagacgaaacagatgtgtttgcagagctgattatcggcctgaaagatgcgccggaagcaccacgcaagcagctgagaataaatcgcaagccgattatgccgaacggtggtatcacggccagagcatga

SEQ ID NO: 278625 - DNA, 2433 bp, Morganella morganii
atggctggtgtaaacaaaacgaatatgagtgaaacggatattatcagcaaatttatccttcccgcagttaaggatgccggctgggatgatttgactcagattcgtcaggaagtgaaactgcgtgatggtaagatagtggtccgcggaaagctggcatcacgtatcaaagtgaaatctgccgatatcgtactgtatcacaagcctaacctgccattggcggttatcgaagccaaagccaataagcacgccatcagtaaagggatgcagcagggactggattatgccggactgcttgatgtaccctttgtgtttgcttctaacggtgatgggtttatcttccatgataaaaccaatccgcagcagctcgaatcagaaattacgcttgatgctttcccggcaccagagctgctctggcaaaaatattgcgactggaaagggtttactcagcaacagttgcccgttatcagtcaggattattacgatgacggcagcgggaaatcgccccgttactatcagatgcgggcaattaaccggacgatagatgccgtatcagcgggaaagaatcgtattttgctggttatggcaaccggcacgggcaaaacctataccgcgttccagataatctggcggctgtggaaagccagaaacaagaaacgtattctgtttcttgcagaccgcaacattctggtcgatcagactaaaaataatgattttcaacctttcggcactgcgatgaccaaagtcaccggccgtactatcgatcctgcttatgaagtacatcttgcattgtatcaggccattaccggaccggaagagaatcagaaagcctataaacaggttgctccggatttctttgacctgattgtgattgacgaatgtcaccgtggcagtgcgtccgaagattccgcctggcgggagattctggagtatttcggcagcgccactcagattggcctgacagcaacaccaaaagaaacagaagacgtctccaatatcgattattttggtgaaccggtttacacctattcactgaaagagggaattgaagacggtttcctcgccccttacaaagtcgtgcgtgttgatatcgatgtcgatgttcagggctggcggccggttaaaggtcagttggataaatacggcaaagagattgaagaccgtatatacaatctgaaggattttgaccgcacgctggttattgatgagcgtactatgctggtggcgaagactatcaccgattacctgaaacgtaccaacccgatggataaaaccattgttttctgtaacgatattgatcatgcagagcggatgcgtcatgcgctggtggtgcttaatcctgatcaggtattgaagaacgaaaaatacgtgatgaaaattaccggtgacgatgatatcggcaaagcacagctggataactttattaatccgaaaaagccttatccggtgatagcaaccacctcagaattgatgagtacgggcgtcgatgcgcagacctgcaagctggtcgtgctggatcaaaatattcagtccataaccaaatttaagcaaatcatcgggcgcggtacgcgtatcaacgaaaagtacggtaagttgtggttcaccattctcgactttaaaaaagcaaccgaactgtttgcggatgagcgctttgacggcgtgccggaaaaagtgctggtggtcagacccagtgacatttccgatcaggattcggattttaacgagcaacttgatgcggaaaatgatgataataccgccggtgaagcgcgggaagataccgctgactatcaggttaaccgcgacaggtctgaaggctgtggtgaattccatagtgacgatgatgacgacaaagtccgtaagttctatgtgaatggcgtgcatgtaaaagtgctggctaaacgtgttcagtattatgattctgacggtaaactggtgactgaatccttccgtgattacacccgcaaaacaatgctgaaagacagtgagtacgcttcactggatggctttatgcgtaaatggaagaatgctccgcgcaaacaggtcatcattgaagaactggagcaactggggattttatggggtgtactggccgaagaggtgggtaaagatctcgacccgtttgatttgctctgccatgtggtgtacggtcagccgccgttaacgcgtcaggagcgtgcagcaaatgtgcgcaaacgtaactattttacgaagtatgccgaaccggctcagcaggtacttaatactctgctggacaaatatgctgatgaaggtgtgcaggaaattgaggacgttctggtgctcaaactgaaaccgtttgatgcgctgggccgtccgggagagatcatcagagccggctttggtaacaaagcagcgtatgagcaggccgtcaacgaactggaaaacgaaatctaccggttaccgccacgattagcctga

SEQ ID NO: 278626 - DNA, 1749 bp, Morganella morganii
atgaccgttgagaagctgattaccgaccatatcgatatctggtcttctgccctgcaaacccgctccgcagccagccgtggcagcaatggaaaaatcgatctctatggtattaagaaactgcgtgagctgattctggaactggcggtacgtggaaaactggtgccgcaggacccgaatgatgaaccggcgtcggagttgcttaaacaaattgcgaaagaaaggaatgatttagttaagaataaagtgattaggaaacctaaagcacttgaacaaatcgcactagctaacacacccttcgatttacctgatggttgggaatggtgttatttaaatgatattggtaattggggggctggagccacaccaagccgctctaattcaaaatattataatggtgaaattccgtggtttaagtcaggtgaactctcctcagattttatttctgattcagaggagaaaatcactgaacttgccttgcaggagtgttcacttcgcgataataaagccggggatgtgttgattgcgatgtatggggcaacaattggtaagacatcgatcttaaatgttcgtggtacaactaatcaggcagtatgtgcctgtaccccatacagtgggatttctaatatatatttgttaaccgttttaaaagcttataagcgaatttttattggtatgggggctggtggagctcagccgaatatatcaagagaaaagcttattgctactgtatttgctcttccgcctaaagccgaacaaaaccgaatcatctgcaaggtcgatgaactaatgtccctttgcgatcaactggaacagcaatcgctgagcagtctggatgcacatcagcaactggtagaaactctgctggcaacgctgaccgacagccaagataccaaagagctttctgacaactgggcgcgaatcagccagtattttggcacgctgtttaccaccgaagccagtatcgatgcgcttaagcaaaccatcctgcaattagcggtaatgggtaaacttgtgccgcaggatcctaacgacgaacctgcttttgaactgcttaaacgtattgagcaggagaaagctgagctggtaaaacaagggaaaattaaaaaacaaaaaccgttgccgccagtgagtgatgaggaaaaaccatttgaattaccgcaggggtgggagtggtgtcgtataattgaaatagctcaggttggtacaggggcaaccccatccagggataatcctgattattgggagacccctgagtttaactgggttacaagtggtgaaacttctttaccatttatatttaatacagctgaaaaaatttcagggaaagctgtaaaagaaacaaatgtatctatttactctcctggtacacttattattgcgatgtatggccaaggaaaaactcgcggtcagataactgagttatgtatttctgcaggaacaaaccaggcttgtgcagcaattcagctttttaatacaaatgaataccatcgttgttatataaaattatttttcgaaaaatcctataaggatttaagagagttagcagcaggtggagcacagccaaatttaaatttggcaaaagtatcaaatacattagttcctataccaccgctaagtgaacaaataaaaataacctgcaaggtagaagaactaattaaggtttgcgacactctcaaatcccgactgcaatccgcccaacaaacccagctccatctggcggacgcactcactgacgcagcattaaactaa

SEQ ID NO: 278627 - DNA, 969 bp, Morganella morganii
atgccaattaacgatcaggtattgaagctggcttttgagggtaaatgggatgttcttttacctgttttccggaattatccgcttctgattaacctggctggtgagtccaaaggttataccccattacatcaggcagcatggcacggggctgatttatctgttattgcagagttactgtctatcggtgctgatcgcggtgcacgtacgtatctgaagcatcagactgcgtatgacattgtggccgaaaagcacaatagacccgacctggaatatcttcttttcccgcaaaaaatgactatcgcgcaaactatcaggaaagcaatcatctcagagcaatgcttgtttgatcaatatgacggtaatcagatattggcagataaaatggttactgctgtgggagcggagccgtgcccggataaaacagatgtactggaaaacagattgcaccaactattttttgcgttaaccggacaagatatatactctgaagagttgattccttttgatatcacaaaggaattttcgtttaaaattaacccggaatttttcagacagatatttttcccgcttatttgccgtactgcttataccggaaatagttttacaggaagggagtggtccgtggtatctgatttatttgaaccggctccggcacagtggggaatgcggggcgatctttttttatggctggagatgcagcaggcattgtgtcaggtgagtataccgaaagatacagatgatttagcagatattatctcggcttcatttcaggcattaaccgggcgatcattaattaatcgtaccggagatagttatttttttattgaacgttttagccgtggtggtatgtcgtcgggatgtgtctcggtatcgtactggcttaatgaattcattccccggctacaagacagaatgacctggctgcaggctgtctggtcagggaagacttccattcaggaggaaagatga

SEQ ID NO: 278628 - DNA, 837 bp, Morganella morganii
atgacccgtttagcctcccgcttcggcagggcgaatatcattcgtcgtgaccgcccgttaaccaccgaagaattatactgcactgtacccagtgtcttttcagcagaaaaacatgaatcccgcagtgaccgctatacctatatccccaccattagcctgcttgaaagcctgcagaaagaaggcttttatccgttctttgcctgtcagacccgtgtccgcgaggacagccgccgggagcacaccaaacatatgctgcgccttcgccgccataatcagattaccggtgtccaggtaccggaaattattctgttaaacagccacgacggcaccagcagttatcagatgctgccgggattatttcgtgcggtttgtcataacggactggtctgtggtgatacctttggtgaggtcagagtgccgcacaaaggtaatgtcgtcgataaagtgattgaaggggcttatgaagtgctggaaacgtttgatgcggtggctgaaaaacgcgaacagatgcagtcgctgttgttaccaccaccggcacagcaggcgctggcgcatgccgctattagttaccggttcggggatgaccaccagccggtcaccgaagagcaggtgctgcaaccccgccggtgggaagataagaaggatgatctgtggactgtgtaccagcgtttgcaggagaacctgattaaaggcggactgtccggacgtacagccaaagggaaacgatcacacacccgtgccgtgaccggtattgatggtgatatccgtctgaataaagcactgtgggtgatgacggagaaaatgtatgaacatttcagaagtcgtcaacccgtgtga

SEQ ID NO: 278629 - DNA, 342 bp, Morganella morganii
atgagttcagttgctaattgggcgtatacctcatgggctacgttgtggcggcttgccggaaaggacagatacggtaagcccgaattttcggaaccggtccattttctgtgtggctatggtagcgagcttaagggcggaaagattgatatcggctctgaaatcactatcaaactggtgttctggactgagtacgctgatgcgaagaaaggtgattttatcgctatcggaaggcactcaggtgagccggtatctgctggtgctgacgaaatcaaattcattaaacgcgatgaggatgtattcgagcatatagcggatgattacaccctgataacggcggtgtga

SEQ ID NO: 278630 - DNA, 693 bp, Morganella morganii
atgacaccgcgtttagaatacggcgagatggtgatatccactgccgaaaatgattacctgtttcgcccgtcactggatgccatgacgcgaatcggtgagcctaaagagattgtgagtgcgtttacgcgattaaatggctcagaggtacaacaaattatagcgtctgccgtagacgcttacggagtggttcctgaatggctgattgcactgttaaataaaccggtttatgggcgcagcattttatcgacagcaatggacgtgatgcaggcatgttgtaacgatgactgttctgaggttatcggtgaatggcgggttggcaaatccggcatggtgtaccggcagggagccatgcattaccgcgatatcatcctgctggcgcgcgagctgatgacccacggtattatcggtaaagccaaggtgcgaaaactccagcgcaacgaaggtaaagacgaatactccgacgagttccacgccgtcgattacatcagtgccgcccgtgtgcatttcaacatcacccgcagcgaagcggaacaactcacaatgactgagttcgttatgatgctgaaagcgaaatatccggatgagaaaggcttcaccgctgatgagtatgaagctatcaccaaagccgacgatgcccgtaatgatgatctgattaagggtaagcgccggttggtgagcaggaagaaggcgtga

SEQ ID NO: 278631 - DNA, 822 bp, Morganella morganii
atgaaaattgatgataattttaaaacccgtattacccttgctaggcaatcaatggggttaacacagggtgagcttgctgaaaaaataggcgttgtacgcaggcaagtcgccgcatatgaggctggtgattcaaagcccagggagaaagtcctatccaacctagctgcggcccttggggcatcacctgaatggctatctcatggacacggcccatcaccagacctgtcaaatgtaagaaaaactgtcactctgatagaaatcccagtgatatcactggttaattcatacgattatttttttggaaaatctacgggcgatgtagggaatgctatcgttgacttcattcccgctcctcttggatccaagacagattcatttgcggtggagattgctggtgacgcaatgacttcatctagagggttaagctttccgtcaggaacggttgttgtttttaatccaaccgatcaggccaaaatcggcgactttgttctttgtgctcttcacccagataaagcgttaacgtttaagcagtttatctccagcaggagtgaggcgcttttaagaccactgaacgcactgtatcgctctatgccgcttaacgatgatacagatattattggcgtggccatccactcccagtatgacctgaccgcaaaaagaccattttgggatagttatccagataatgattttaacccggaattgttcccaaatgacctctggatggattatgaaaaagaaacacctcggcgggggagttccgtactttcccgtctagacaaaatcgagtctatgcttgaaaatctgctgaaaaataaataa

SEQ ID NO: 278632 - DNA, 171 bp, Morganella morganii
atggaaaagaaaaatagaattgccccgtacccattccgcatgcagccagatatgcgcaaatggattgatgaagttgccagtgaaaagcggcgctctactcaggtgcagcttgagtatattttagagatagtgagggagatggctaaaaatggtgaattcaggatgccgtaa

SEQ ID NO: 278633 - DNA, 567 bp, Morganella morganii
atgaacagtgtagcgaaaacagacttaactttccaggacattacatttgagccggtttatcaggacggtcaaatgtggctcacatcaacggagttagcaaaagcgttgggttatagccggactgataacgttagtcgcgtgtattcccgtaattctgatgaatttacggagtcgatgacaaccaccgtcaaaatgacgttggttagaaaaacgggtgaagttgaggttgttgtccgccttttctcactgcgcggcgctcacctgatcgctatgtttgcatcaacgccggtcgctaaacaattccgtaagtgggcgctggatattctggatcgtgaagtggcagttaacgggctggatgagcatcttctgttacgaaatctcaccacagcctataagcacatcaagcgcattaacgaaatatggggcggcatgttatcgccatcgttgcgcagactgaatatggaggttgattctgaaatgacagggcgcttaaaggacgtgcaaggcccgttgtttagttctttgaaacacatggagtggcattcaaaagcgaggttaacacattga

SEQ ID NO: 278634 - DNA, 783 bp, Morganella morganii
atgagtcaaattacattagcaaacaataatgcagttgtcacgcaaagtcgctttacggttcctgaagtctactaccgtgatcagaaggtaatcactactgaatcactggcggtggggtacggagctgacgcgagaaatatccaggataatttctcaaataacaaagaccggtttgttgaaggaaagcattacttcaagttagaaggcgtggaattacatgcgtttaagaactgccccgataacttcgggtcagttaacaagcacgcaagaaaccttatcctctggactgagagaggtgcatcacgccacgccaaaatgctggaaacagatcaggcatgggactacttcgagttgctggaagatacatattttaattcccgcaagaatgcagtggtacccggtaactatatcgaagcgctggaaaacctgctgaagtctgagaaagaaaaggcaatgattgccgctgagcgtgattatgcggtggaaactaaggcgtggattggtcgcaagcgtgaagccacagcaatggctactgcatccgtagctgtccgtgaaaagaatgctctcgctgcgaaacttggcgcctgtaaaaaacatgcgacggttctggcggttgagaatatgaccgaaacaaaattcaaatggcatccgctcaagaaatggtgtgccgacaatggagcagaggttctatctgttcctgatgaacgctacggaaaagcgaactcctatccggctgcggcatggaaagcggttcacaatgtgaatattgcaaaattgttctga

SEQ ID NO: 278635 - DNA, 339 bp, Morganella morganii
gtgacagaagaagaatggttagatgggctgaaaaatctgcctgatgatgtaattttagatatccactttgggctgcaagaaaaaatcaaaaaacactataagctgcgcgataaaggcgacaatttaaataaagctatacatttttgcgaacagcagatagcgctctcctcaagggctatgcaggcgatgaaaaacaatccagcgatgtataacgggcctgagtttttcgctccatctcattatggtttcaagcaatactcagtcatacttaagaagagaaaagaacttgaaaaactgagtgaaattacagagaaaatgaaaagagagggatggagatga

SEQ ID NO: 278636 - DNA, 528 bp, Morganella morganii
atgagaaagtcattaatgtgtttttctgttctatcttctctcgcgctccttgctgggtgtggagaaaaaaccgcgtcagatactgtgctggaattcataaataccgagaacactgacttgttatctcattcaaaaatagaacaatgcacacctgatggtataaaaaatataatatttgttgataaaaatcgccttccggaaacaaataattactatgaattgagtggttatttatatggcaagtcaaagtatagcgttatttctgaaaagaaagatggaaatgcatacgttgtcagcgtcaagtgggtgtatccgaaagttatcgatgatgctcagtcatttatcgaggcagacaacccaaggattggcgacgatgataaaaaagagctggataacctaaaattactatacgaaaacggtgagttggaaaaccttgaatatgccgaagatataactgaatgggtggtattgcctgatgggatagaccccaagctttcagcaggtaacatcgaagcttgctctaagtaa

SEQ ID NO: 278637 - DNA, 396 bp, Morganella morganii
atgccggaaaacttcgcaccgtcaccagaacacactgaacgggcaaaaactgctggactggatgttcaggatgagtttggcaaattcagggactaccacgccagcaagggcacccaatacgctgactggaacgctgggtttaattactggctgagacaggctgaaggatttaaacgcgctgcgaactcaaagcacatcgacaccaccgagtgcgatgaagtcttcagaaaaatgttctcatcctccaactggaagccagaaaaccgcgtgcaggaactggtttccaagcataaatcacatattggccggatgaatgaaattgctggacgcgcagcattccgtgggtactggaaacaggccacagaacaggccgcaaaagaacgggaggcagcatga

SEQ ID NO: 278638 - DNA, 249 bp, Morganella morganii
atgatcatgcgttcagaaagcaaagaaatttacggcgtgagtgtggtgccggtgctggcggttctgcatcggtacatccggtggtgggtactgcgcgacctgaaccgcgcatggtcagatgatcgcttttttgaaaagcgtattcaacgccggggctggctgcacattgcggatgcgttcacattccacagccggtatcagcgactgcgtgaagcggtgaaagcatatcaggggaagggcgttatctga

SEQ ID NO: 278639 - DNA, 1017 bp, Morganella morganii
atgaattacctgttaaccggctttgtccagaaagatgcacggatgctgatgtttaatgcgggcgcggagatcggcaatttccggaatggcgcccgttatgttgtgagcgtggcaccgcactcaatgaatggtattccgtccggactggtaccggcagatgcacagccgctgttggcagatgagcggatattacgtttcctggacaatcccgccgtggtgaaagctgccggcggtttacagggattccggcattacgttaaatcggtgggtcactgccagattaacgatccgaaaaacccttatcaccaccacgaactgaccatgacccggcgcaaggacggattcatccggacatgctggcaccatgacaacatcttgcgggcgggtaatgtccaccagcagcaggcggacgaaattctgttatgcaaccaacgggtatttgtggcgagaagtatttttaccgatctgcggttgccggccggtcatcttcttaatccatctgatttgttcacctggtctgtaatgcgccgtatcagtgatcatcttccgccctttatcagttcatacatcctgatgcagccaccggaagaagagataaccggcaccatgacggagcattccattgttcaccgggcgcgctcacacagccagattgttcagggcattgttgagcagataaagccggtggttattccggagatagagccggagccaccagcaagttttatgcggatcccgaagttaaagcgctgggagtgtcagaaatatctgcagtgggtcaaaagccagccgtgttgtgtgtgcggccagcaggcggacgacccacatcacatcatcggtcacggcaccggcggtaccggcacaaagacacacgacatttttaccatcccattgtgccgtattcaccacgacgaattacaccgggatccggcagcatgggaagcaaagcacggcagccagctggagttgttatttaagtttatgaaccggtcatacgggatcggcgtttttggttaa

SEQ ID NO: 278640 - DNA, 678 bp, Morganella morganii
atgattgagcacgatttgcagtatctgcggaatatggcgactatagcaatgaccgaccacagcagcagaaccaaaggccagcttgaagcatttgagggatttgtattgggaaacacaacgcgctacccacgtaaaaagccccgagatattactgtgaacggcagaaaggtaagccgggaaaccgaggcggtatcctgctggtcaacacactattccgtgttaccgatgccacctattgaccaggtggactatcagaactgttcctggcggcgggcaattatggaactggatgaggctgagcagtcctggctgctgtattgctatggtaaagaattgaagttctcacaccagacggctatcaccgcctatgtatggagcgaaatgcaggaacggattaaaggacgccgggtatcgaagaaagtaaaagaacgactcagggcgttggtatggctggcagtgcaggactatacccagaataaagacgggtattactatcagtctgaactggccgagctggtgggtgtcgagcggaataactggaatatgcactatgaaaagcactggcaggaactgcgattgatttgtaaaaccttggactgtagggcattacgaaaaatgagaaacaacagggcggaaatatggcgtaaaaatacagctaaaacttgcaaaagtgaataa

SEQ ID NO: 278641 - DNA, 177 bp, Morganella morganii
atgtctgatatgaaaacagaagtggttgtgattcgtctgaccaaaaaggagcgggcgatgctggattccgtaaaaacaagagcattacttgctgactggatgaaagaactggcgtttactgagttgaataagcgggaaaacaatggtgttttaataaatagtaagcagtattcttaa

SEQ ID NO: 278642 - DNA, 399 bp, Morganella morganii
atgtttgaatattacaaaataaactataattggggatacaaacaatggaaacttagtgacgatgtacttttggaagctatagtcacctcagacataacaatagcagaaaaaaaacttattcagtggctaaatcacctggaaaaaggaaccacctctgtcgataaacaaaatatcacatgttggtactacggaggtgtatggctttattatgctaaaaatgaaaacgctattttcatatacatgcactcaagtggtgaagatgcttttgactcgctggcttactgtgccaataaaattgcaaaaattctttatcaaaatcacacggctactgagattaaatggattgagcacccacaccgtcgtaaataccttaaagaaacaacaaaattttacaaatga

SEQ ID NO: 278643 - DNA, 228 bp, Morganella morganii
atgtcttacctaccaattgatttagtaaataccagtagaaaaattgatgcattacagtctgcgatatcaattgctctgaccagcttagcaatgctgactccgatagttaagagtgaagtaattaacaacctggaaaattttgctaaaaacagcaaagatcctaccgttaaaaaagcattctcagagttagcagataagattaagtcatcaaatatgacaataaaataa

SEQ ID NO: 278644 - DNA, 222 bp, Morganella morganii
atgcgtatggacaaaataactaccggcatttcatacggcacgtccggtgccggggccttgtactggatgaagcagctgctggacggtttctctccggaacagtgggcggcaatcggcgtgctgggcagcttactgttcgcattcctgaccttcctgaccaacctgtatttcaggcaccgcgagtacaagcgccgttgcaaagaggagccacaggatgaataa

SEQ ID NO: 278645 - DNA, 306 bp, Morganella morganii
atgtcaaagttaagactgttatcaaaactgttttcaaagacagtgaatgcgctgctgctcctgttcccgctgatgctgtcagtgagttgcgcagatacgcggccggaattaatgcccgcgccggtggtgccgcttccgccgcaactgaccactgattgtgagcaggtagtgataccggatgatctgacgttcggcggtgcagttgagctgctggctgatgccatgaaatacattgccaactgcaatcacgataagagggcaatacgggagattgaagcggagaggcaaaaaaaagccccagaataa

SEQ ID NO: 278646 - DNA, 693 bp, Morganella morganii
atgacaccgcgtttagaatacggcgagatagtgatatccactgccgaaaatgattacctgttccgcccgtcgctggatgccatgacgcgaatcggtgagcctaaagagattgtgagtgcgtttacgcgattaaatggctcagaggtacaacaaattatagcgtctgccgtagacgcttacggagtggttcctgaatggctgattgcactgttaaataaaccggtttatgggcgcagcattttatcgacagcaatggacgtgatgcaggcatgttgtaacgatgactgttctgaggttatcggtgaatggcggattggcaaatccggcatggtgtaccggcgcggcgctatgcattatcgcgatatcatcctgctggcgcgcgagctaatgacccacggcattatcggtaaagccaaggtgcgcaaactccagcgcaacgaaggtaaagacgaatactccgacgagttccgcgccgtcgattacatcagtgccgcccgtgtgcatttcaacatcacccgtagcgaagcggaacaactcacaatgaccgagttcgtgatgatgctgaaagtgaaatatccggatgagaaaggcttcacgaaagatgagtatgaggctatcaccaaggccgatgatgcccgtaacgatgacttgattaagggcaagcgccggttggtgagcaggaagacagtctaa

SEQ ID NO: 278647 - DNA, 336 bp, Morganella morganii
atgatcgaaacattcacctggtgtccccgtgttaatcccacggaggacatcacctataaaacccgcagggctaaattcggtgatggttatgagcaggtgtccggtgacggtatcaacgcccgcagccagaagtggtcactggaatttaccggtcgcggggagtatatcacggctatccgtcagtttatcgaccgtcacggcggcataaaggcttttcagtggaaacccccgcttgagccggtcggtctgtaccggtgcgacgagcataaactcaccccgctcggcggcgacaactattcactctctctcacttttacccaggcatttaaaccatga

SEQ ID NO: 278648 - DNA, 3258 bp, Morganella morganii
atggcgaagcttcgtgagcttattattaaaatatcggctaattcatcctcgtttcagtctgaaatagcccgcgcctcacggatgggggagaattattaccggacgctggagcagggcggccgcaaagccgcatcggcatcacgcgaaacgaaacgggcaatcagtgagctgaataatgaactgtcatcaataaaatcgacagtaaccggcgtaatgggggctatggccggtgcttttgccacgcagcagcttatcagttatgccgatacctggagccagttaagcggtcgcctgaaactggcctctgtgtctgcggaggatttcagccgggcgcagcaggagctgatgtcgttaagtcagcgtaccggcacatcactggcggcaaataccaacctgtacgcgcgtattgcgcagtcaatgcgtgatgcgggttatgcctcgggggatgtggcaaaagtcactgaaacgattgccacctcactgattttatccggtgccagtgcggcggaagccagttccgttaccactcagctgagtcaggcactggcctccggtgtgttgcgcggagaagaattcaactccgtcatggaaaacggcggacgactagccagactgctggcagccggaatgggtaccactatcggcggtctgcgtgatatggcgcagagcgggcagttgaccacggataaaatcgtcccgatcctgacaaatacggagcaactcagaaaagaatttgagcagttaccgcagaccgtcagtatggcttcgcaaaaggtagaaaacgcctttatggcgtgggtgggcggggctaatgcggcatcgggcgcaaccagcacgctgaccggcgcgctgaatggtattgcgggaaatatagacaccatcgccactgttgccggggcattggtcggggttggccttgctcggtatttcggtgggcttaccgccagtgtgaccaaagcaaccatcggggtggccggtgccgcaaaaggcgaggtcgctcttgcacaggctcagctgcgcgggacacaaattgcggttgccagagcgcgtgcggcagagtaccgggcacaaaaatcactggcagctgcgcgcggaaccgatgcacaggcaggcgcagaaaagcggctggccgctgtacaggcctccgttgcacgcaatataaatgcccgaaatatcgcgcaaaataacctgaataacgtcacatctgtcggttcacgtcttcttggtggtgcgctggggctggtcggtggtattccggggctggtgatgctgggggccggtgcctggtacaccatgtaccagaagcaggagcaggcaagacagtccgcacttgaatacgccgccaccattgaccaggttcgtgccaatcttaataaaatgacgctgccggaaaccgctgataactccggtaaaaccaaagaatcgctggcggcgcaaaataaactggttgatgagcagcgtcagaaagtcgagggattaaaatcagcgatagcaggatatcagcagatgctggcctcacccggccccagcatcaacggctatctgattaaccaccttatcagtcaggaagatgcggttaaatccctggcggctgcgcaggatgagctttcggttgaacagagcaggctcaatgagctgagcaaaaaatcggaagagattcagtcagcactgaaggcggtcgaaagtcagcgtgattttcttattcgtcagcagtctgctgcccagaataatatgcgtcattcattactgatggtgaatgcggagcatagcgaatttaaccggataatgtctgccggaaatcagatcctgaccaaccgcctggctctggttaacagcccgatgcgtatcccggcagcgcctctcagcgaaaaacagcaggatttcattcagaaatcagagcgggacaaagaactgtccgcactgaccggggaagcccgtgttatccggcaggctgagtttgccgcagatgatatcggtctgctgaataaacccgaatttgccgataaccggcagaaatacattgataatcaggtggcagcctaccggaatcaggaaaagctgagtaaggaactgaaagcgggtaaaagcgcccagagtgctttcaataaagagcagaaagaagcggaacgtcaggcggagcagtatgcccgtaaaatggcggatctgagtgtggccacggaggttcagaaagtcagggccacgcagggagagaaggccgcagagctgtatgcggctgcgcatgaggccggtaccaaatggacggatgagcagcgaaaagcgatccgcgcatcctctgttgccctggcggagtggacacaaaaggccgatgaggcggtcagaaagcagcgtgaaatggatgatgcgctgaaagcgatgcgtgacggtgcccggaaattcagtgacgaagcggggcaaattgataaaacccggggaatgggcggaaaccggcgcagtctttacgatgagcgtcagcagattgatcgtgtttatgccaaatcggatcagggaaaaagtgcgaccgaagcctataaccgcgagattgatgcgctcaacctgaaatatcagaaaataaaggaggttcagtctgactggaccagcggggttacccgggggatggaagactgggttgctgaggccggagactatgcggagcaaaccgcatcagcagtgcagagcgccatgggcggtatggtgaataacatcactgacatgctgaacggaaataaagccagctggcgcgactggtcaatagatgtccttaaatccatccagaaaatactggtcaacgctgccatcgtgaacagcctgaaatccatgtcagatgccggtggctggattggtgctgtcggtaacttcctgggaggtgccgcggcaaatgccaaaggcggggtatatgattctcccggcctgagtgcgtacagcaatcagatagtcagcaccccgacttattttgcgtttgccaaaggtgccgggctgatgggggaggccggaccggaagcgattatgccgttaacacgggcggcggatggctctctcggtgtccgggcgctcggcggaaatcagaacagcggttcagcggcaccacaggtgtttattaccatcaacagtaacggcagcagccagacgcagtcgtcggctggttatgagcagtttggtaatgaaattgcagcattcgtcgatcagcgtttccgcgtactaatggacaaagacacccgccccggtggtgcagtctggaatatgactaaggggaaaagatga

SEQ ID NO: 278649 - DNA, 141 bp, Morganella morganii
atggaaccgcaaaatatccggcgcaccgaacacggtaccgtcaacctcaaaaagccggacagcattacccggttccagcttctggtaatcgtttgtgatcatggtttaaatgcctgggtaaaagtgagagagagtgaatag

SEQ ID NO: 278650 - DNA, 336 bp, Morganella morganii
atgatagaaatattcacctggagtccgcgcctgaatccgcagggcgacatatccttcagagcccgtaaggcgaaatttggtgatggttatgaacaggtttgcggggatggcatcaatccccgcagccaaaaatggtcactgaatttcaccggcacggaaagttatatcctgccaatccgtgattttattgaccggcacggcggtatccgtgcttttcagtggaaacccccgcttgagccggtcggtctgtaccggtgcgacgagcataaacttaccccgctcggcggtgacaactattcactctctctcacttttacccaggcatttaaaccatga

SEQ ID NO: 278651 - DNA, 2967 bp, Morganella morganii
atggctgacgttgcaagtttagcggttgcgttacacctcaacgcagccagttttaagtctgatgtggaggatgcctataacagtgcatccgccagctcaaaaaaattcacacaaaatatcggcagggagtcggctaaaacggccgaacagatttctcaggtttcaactgaggctcagcgggcaggtaacagtattgcgcgaatgagtaacaccggagctaaaggcgggttcgcacacttacggacatcgctgaccaatatttcatccggcgcgaatgtcgccggctcatctattctcagtgcctttattccggcactggaacgggccgccaatgacgttgatcgccttaaaatgtctatgggcgagaagcggcagatggatattgctgctgcaaatgacgcagtaaaagtcgctgaaagtcacattaaacaggctaacagcgccaaagaagcagcaatgcagcagatgaaaatgggccataaaatgcgcgagtctgccaggtatcagcgtgaactggcaatggtgcagaatgcccatatggaaaaaatgcgggaagttaacctcgcaaacggtatgtccgccgatgcaatagacaagcaatacagcaaagagcgggcgatcaatgacagaaagatagcgaatgcaaacgccctggcagaaaaagccagggatcgtctcagatccggctcggcagcgctggccgctgcggaagctgacgaggcactgggtaagcaaaagctgacagcggcgaccacgcagttggccggtgcaagtaaagagctgacatttgcacagcgggcatcagcacaggcaggcggcctgctgaaaaacacctgggctatgctgggcggaacactcggcattggtttgatggccgccgccagtgctgccacttatctgtattcacaatacaaagaagcggaagaacggcaaaaggcgtttaatgccgctattcagaaaggcggggcggggctgaataattcggtataccagctgcgcacactggccaatcagctcggcggaacagcagaagcatacaaaacagtgacggcggcagcgactgccggtttttcaggctctatgctgcgtgaagtgtctgaattcggcgtgcagctggaaaaatccggcggcagcgccgatctcctgatcactaagttatcatctattaacgagcagccgttgcagagcctgcgccagcttatcaatgaaggtctggtttttgacgaggccactataaaccggattgcgctgcttgaacgtcagggggatgttgaaggggcaaaagagctggccagaaaaagcgccctgaatgccacaaagacactgaatgaagaacagaccagggtcaatgccattcatgagaaaggcgttaaggatattgaagatcgctatcgttcactgaccagtttcatgtctgaatcctcttacgccgcagcacaggtgcagacctctgctatgaatgccatgatccaggaaaaactggtatggcagattggtgcaacaataaaagggatgcagcaggagcagcagcaaaaggagcagataaaaaacacgcgtgagcagttagatgcgcagttgcagttaaactcggcgtataaagcgggtgctgataagcatgcggaaaaactgaaactgcagaatgccgcccgtgagcagctgaaatccggtcagatggatgcaaagcagtttgagcagacaatgaaggggatcgacagcctttacagttcgctggataagaagggacgcggcggcagcggtattccggaggggcagcgccgtgcgcagcagctgatggaacaaaccgccacactcagggcacagcttgctgaaaatgaaaagctgaccgcatctgaaagtaagctgattgcatttgagcaggagctggtcagcctggcaggtaaaaaactgaatgccgctcagaagagtgtgatggaaaatgccgggtccatccgtacccagttacagctcaacgccgggcttgaacgggaaatcgcactgaaagggctgcgtaaaaagtttgatgatcagaactttgaaataactcagcgtacccggtccatgcagcaggaggcggataatcagcgtctgcaagtcattatgccgacagcggattataacctgatgcttgaagagcagcggattgcggatgacttccgtcagcgccggtatcagctggataaagaaatcaccgataaaacctctcagttatacaaagatcagactgccgttctgaatgccgagcaacaaaagcagacagacattgtccggcaggcggctaaagacaaagctgcgtcagatgcagactggcagggaggcttaaaacagggctggaaagatttcagtgacagcagcggcaatgcgtttgcaatgatgcgtaatgcgtcagctaatgcgcttaacagcacatcgtctatgttcactgactttttgaccaccggacgggctaattttactgactttacaaaatccattctcaccgatatcacaaaaatgatcgtccagatgaccatttttaatggcctgaaaagcggcctgagcggaacatggctgggtgatgcgatggggatagcacccaatgcaaccggcggcgtgtatacctccccgggactgagtgcatacagtaacagcattgtcagctctccgaccgtgtttccgttcgccaagggcggcgcacccaatataggactgatgggcgaagccggatctgaggcgattatgccgctcaggcgcgggccggacggtaaccttggtgtgcgtgcctatggtggcagtagtgccggtagtacggcacctgtggttaatatccaaatcgacagtgacggaaatcagcaggttcaggcatccggtggtcttgagcggttcggcagagagatagggcagtatgtcgaccagcggtaccgtgcactgatggacagggacacccgtcccggcggggctgtctggaatctggctaagggggggagatga

SEQ ID NO: 278652 - DNA, 345 bp, Morganella morganii
atgaatcttaaatcagccctgttaaaaccggattcacacacggaaaaacacacactcttcggtacagaagtttatctgcggcgtctcactgtcggggagcttgaccgctacgaaaaagagcgcaaggccgcatttgatgccggtgattattccggggtcacccttgcgggggccggtctgattttgtcagctatctgtgatgagaacggaaccccgatcagtgcggaaaatttgccgacggcagaagagcttattgatgcacacagtaatcctgtttttgtggatgcgatgaataccctgcaaaaatattgctacggtaccattgaggacgcgaaaaaaaactga

SEQ ID NO: 278653 - DNA, 477 bp, Morganella morganii
atggccggagaaaaatcctccccggaatacgccatgttgcccgccggtaccatcgtaaaattcggtgaggccggtgataccgtcgacaaaatgaaagcgctgattaactgtaaagcgctgggggctaccgggcttaccggtggttttattgactgcaccaccctgaaagataccaacaaacagtcgatttccgatctgccggaagggcctgaaaaatcactcgggtttattgatgatcccggcaatgctgatttcgccgcgtttcttaatgctgccgagcagcgtaagaccgtgcagttttattttgcactgccgaacgggcgtacagcgacaatgatcctcgcgttgtcaggctgggaaatgaacgacatcagcgccccagccagtgaggtgatccagattaccgtgaaaggtaagcagaacaacatcacctggggaaccaccactgtcacaccaccaacaggagacggagaataa

SEQ ID NO: 278654 - DNA, 414 bp, Morganella morganii
atgagaacaacggttaaggtttccggccttgacgggctggaagcggagctgatgaatctcggggaaaagctgacatccaaaatactgcgcgatgcaggccgtgaggcgatgagcgttgttgctgaggatatgaaacagcacgccggttatgacagcagtcacgacgatgaccacatgcgggacagcatcaaagtcagaaccactgaccggatgaaggataaaaaatacatcacccttatgaccgtccgcgtcggcccgtcaaaagcgcaccacatgaaagcgcaggctcaggaattcgggacatcaaaacaaatcccgcgtccgtttatacgcccggcgctggattatcaccgtaaagatattttaaacacccttgccgccgccatacgcgccggtattaatgaaaaccgttaa

SEQ ID NO: 278655 - DNA, 390 bp, Morganella morganii
atgatcgaaagtgaccttaagtcgtctctttccgctatcaccgcaatgcccgttttccccctgttattaccgaaagatgcacaggaaggtatcacctttcagcgcatcagcgacccgcgttattccgccggtatggtcaccactcatcttatcgtggcgcgttttcagataggcattcacgtactgaatgactacgaaaaagccctgctgctggataaagcaatccgtgatgcctgggaaccgatcgtgcatggttacatcggaaatcacccggtgcagacggtacagcgcggcggattgcagcaggggaaagaagagctgacaaataacactgtccgttggtcggtaatgcgggattttattatcacttatccggaggatgcatcatga

SEQ ID NO: 278656 - DNA, 327 bp, Morganella morganii
atgaaaaccggtgaactcaacaaacgcatcaccctgtaccggccggaggtagtgaccggtgatcttggtgattcccgtaccgaactgacgaaagtcatcacggtgtgggccaaagccgaggcgatatccaaccgtaaaatccggacagcagagcaggatcaggtcatcgaaaccatgcagtttactgcgcggccacgcgcggatgtgcaaatcgactgggtgattgaataccaaagccggttttttaccgtccgtgcctgtgaccgtaacgatccggcgaaactgattattaccacggaggcagacatacgacatgatcgaaagtga

SEQ ID NO: 278657 - DNA, 900 bp, Morganella morganii
atgcttaaggctgactcacaaaggaaaagagagttttatactgattatgtttaccgtaatttaaatgaagcgctgtcgccaacgttcaggtcaggaagaatattgggtgaggatgaattaaatgatttaatcagaaagaacatggctgatgaaaaagaaagaagagatttcatcaggcgagccaatatagcctataaagaatccataacagaggatcggcattttgactggatcaataacgaacgtattgcattatattttatccagttcatacataactatatatacggtaactaccttcagagtctggcagtaaaatccggcatgggatacagaagtcattatccgcattttggtgaaacaccccacatccggaatatggggctgccggaaacaccgtgcggattaagacagctgaaagatacaataaaatcatactttgatagcctggacataccacaggatattaaagaattacttattgatcatgtcaaaactgattggttccatcaaaatgcagactggctgtcctggattgaaaacaaaaataaagcacaaattgactgggctgtggagtatatgcgtggtcatttcaaatcagaggataacgacatgttgcattactacaattcgtcatctgctttaaacagaatatacggtttctttgatatcattctgacatcaaatgaatcacgggaactgtttattattaaaatgaagaaagcatggtcgcaggttcgttacagagaaagcgttaaagataagaaagttataaatacgtatgtcagtaatgacgtaaaggaaaaactgaaagaaattgtcagatccagcaataaaaaaacaactgaagtcatctctgatttaatcaggagagaatatgaccggttgaaaaaaagataa

SEQ ID NO: 278658 - DNA, 729 bp, Morganella morganii
atggcaacctaccgtatcgaccctgacctcgcgtttatcggtcagtgcagtaatgagggcctcggtctgctggtctccgttctgactcacgatagtaaagacggcaaaaaacggctggcggagtctctgaccacctcaccggaatatcagctcttttatcccgaccatcagaagtactggcctgccatctgtgccgaactgcaggctttcggggccaacagtctggtcacgctgctgcgcggtaacaaaggcgtgctttaccgtgaaatcctgcacgatgtctgcgacaagctgaaagtgaactacaacaaagaaagtccggtggaaaccaccgaactgaacctgctgatgaaagtactggagaaaagcctgcgggaaatgtcacaggacgaactggtccgttttgcggacggactgaaactgaatctgtccgcaccgactccccagcttattctgctcgcggtgcaggccgccgtgaccagctccggtgtcgcagccctgcagtttgccacgattgccgctgtcggggtaattgaagccatgggcggtattgccacctgggggacgctctttgccgccaaccgggcgctgggggtactggccggtcctgtcgggattgcgctgagctccgcctggctgatagccgatatcgcgggccccgcttaccgggtcaccgttccggcctgcatcattgtggcgtacctgcgccagaaggccctggcggtctga

SEQ ID NO: 278659 - DNA, 690 bp, Morganella morganii
atgcatacgtcagattcacgccatgaccggcttgcgtcacggctggccatcattatcagccgcctgttcagcggtgaaacgctgtatccggcacagctcgcccgtgagtttaatgtctcggttcgcacactgcagcgggatttcagtgaacgcctggtctttctggacacggagccgtatcagggcggataccggctggccgccggtcagcgctcttaccggacagacagcgatattctgtactttgctgatatcacccatattaccccgctgttcccctcgcttgaccgcaggctgctgtccgttctgctcagtccggaaaacggtgccccctgtctggtctaccatgagccaccgcaatccgccccgacgctgttcggcggcttttatgtggtgacgcaggcgattgtccggagacggctgctcagcttccgctgtgacggtcaggactatgaggggatggctccctacaagctgatttattttcagcgggactggtatctgtgcggggaatggcagtctgccctgcgggtgttccggttcagtcagctgcagaacattgccgtgtccggacgccgtttccggcaggatgcggttatcgcacggacagtcacccggcccgaattcatcaccgcattaccccattatcagtttatccgttcattaatcacccagaggaacatcgtatga

SEQ ID NO: 278660 - DNA, 1041 bp, Morganella morganii
atgataaaagcccgcctcaccgccgtcctgctgtcggccctgctgctgggagcctgtgacaacagtgacatccggtcagtaaaacaactgatttacccgtatgaccctaccgtcaccctcggcggtattctggataaccgccctgactgcatcgatccggaatgggataccctgaccgatgacaaaggacgggagctggtcagataccgctgtgactacaccacagcggctgccgtaaatcagataaatcagcaggttgaagcccgttatcagagagtactgagagactatactgggatcctcactaaggtcaccaaatggaagcctgccgatatgcgtacccgtaccggcgcgaagatcggacagacagaaaaagagctggggatgattaaagcactttccggttacgactggtctgcgctgcgcagtgaaatcagtacaaacaatgatcgcagttttaacctctctctttccggcggaaaactgtggtcccgtcagcctgataaactgaccggggaacagaaagcgctggttgaacaatggaatgccgttactgaaccactgtcatatggacagggctctgatatagatcgctggtttgaggattcttccggtgtcatcagcgcactggagagggaactggctgacctgaaagcagtacaggcggaggaatacctgaaaggggataaccgccgccgggaagatgagtccgccctgacccggctgctggcagagctggaggccgcccatgctgaagcaaaaaactggcggattacccaggaattatactggagcgtgaccggaccggaacccgtatttacgggcggaaaatttctggtgaatgaccgtcacggtcaggatgagctgctgccttacagcaggatatcaaagagaccggttgaccgcggaccggaaatgctgactgatatttacagggatgaaaccgggtctgagacttacatggatgcgctcgcatttggtttatttatgtatcaggtaaaagacatcaaagtgccgtccgtaaataccttaagctactga

SEQ ID NO: 278661 - DNA, 213 bp, Morganella morganii
atgtctgtttttaaattaatggctaccacgctgggtgtggcaacggtagctttagctacttactgcgcctggcaggccgctgctgaggctgtggataatgaggataccacttcagcggaaaaactggcggcagggctcagtgcggcgctggcctgctcagccgtgctgggcggtacccttgaccgtctgctgggccggctctttccccgctga

SEQ ID NO: 278662 - DNA, 213 bp, Morganella morganii
atgtctgtttttaaattaatggccaccacgctcggcgtggtaacggtggcgttagccacgtactgcgcctggcaggccgcggctgaggcggcagacaatgaggatgcctccgcagcggaaaagctggcggccgggctcagtgcggcgctggcctgctcagccgtgctgggcggtacccttgaccgcctgctgggtcggctctttccccgctga

SEQ ID NO: 278663 - DNA, 1995 bp, Morganella morganii
atggcattatcaccagaaaaaacaagaaaatgggggaaagtaaacccccctgttttttttacttcagcatttattattttgtgtgttgttgcgatagctgcaatttttccacaacgttctgaaatattacttaaaacactacaagctcaactgtttgagaatgccagctggttttatattcttgctgttgcattgattttattgacggttgcttatttaggcctatcccggtttggggaaatcaaactcggccctgatcattctcagccacaatttagttatctgtcctggtttgcaatgttattttctgcaggaatggggataggactgatgttctttggtgtagccgaacccgtaatgcattatcttgcaccgccggtcggagatgcgcagacagttcaggccgcgagagaagcaatggaaattacatttttccactggggattacatgcatgggctatttatgcgattgtagccttaattttggcattttttagttaccgtcatggtttaccacttacactacgttcagcactgtatccactcattggtgaacgaatttatggaccaatgggccatgctgtcgatatttttgccgttgtcggtaccgtttttggtgtttccacatccctgggattcggggttctgcaggtcaatgcaggtctggctcatttatttggacttccggtcagtccagctatgcaggtcattttgattgttatcataactgggttagccacgttatccgtggtaagtggtttagataaaggaatccgtattctttctgagttaaacctgagcttagcggggatcctgcttttattaatcggtattttaggaccaacagtacttttactaaagtcatttgtacaaaatacaggagcctatctttcagatattatcaataagacctttaacctttatgcctatgaaccccaatctacagaatggttaggaggatggacattattatattggggttggtggctgtcatggtcaccttttgtgggaatgtttatcgcacgtatctcccgcgggcgaacaatccgtgagtttgttaccggcgtgttgtttgtccctgctggttttacgctgctatggatgacttttttcggtaatagcgccatttttcttatccgggataaaggtgctgagatgctggctcagatagttcaggaagacgtggcgctggcgttgtttcagtttttaaattattttccgttttcatcagtgctttcttttgttgcaatgctgatggttatcgtcttttttgtcacctctgcggattctggtgcaatggtcgttgatacattagcttcagcaggtgaaatacataccccagtttggcaacgtattttttgggcctttctgatgggtgctgttgcaattacattattattggccggtggattaactgcattacaaactatgactattgctaccgcactgccttttgccatcattctgttaattgctattgtcggtttacttaaagccttacgtattgatgtctacaaaaaagatagccaacaactcgcaaccttagctcctaatgcgggaagaggcggattatcatggcaacgcagattacgaaaaatagcgtattttcctaaacgtaatcaggttaaacgttttatggcagaagtgatcgagccagccatgcaatcggtggtagcagagctgtcaaagcaaggtacagaagcagctattcatagtgaccgggatgatagagtcacattagaagttcagtttagtgataatctcaattttctctatgaaatcagattacgagactacctgaccccttcttttgcattagcaggaatggaggatgaaaataatgaatctcaaaaatactatcgtgctgaagtctatttaaaagaaggcgggcaagattacgatattatgggatggagtgagtcacaaattattcatgacatcctggatcaatatgaaaaacatattcattttattcatattgtcgataaatcataa

SEQ ID NO: 278664 - DNA, 579 bp, Morganella morganii
atggtgaaaatagaactgggtggtgtgttaggtaaaacttttggcaaaacgcatcagcgtttaataagcactacatcagaagctgtccgtgcattgtgctgcactattccgggctttgaacagttcctgaatagcagtaaatcgcgcgggctgacttatgctttgttccgaggtaaaaaaaatatcggtgaagatgatctgggatttccggctactgatgatgtgatcaaaattatgccagtggttatcggaagcaagcggggcggattattccagactattttcggtgcagtgctggtggccgttgggtttggattaagctttaccccactggcttttgcgtccccatttctttacagcatggggtcagctatggctctgggtggcattatccagatgctgtccccgcagccaaacgggatcgcaatgaaagaccagggcgaaaataaaccgtcctatgcgttcggcgcgccgacgaacactgtttcccagggctacccggtaccgatcggttacggtaagcgccgtatcggcggggccgttatctcagccggaatttacgtcgaagatcagcagtaa

SEQ ID NO: 278665 - DNA, 594 bp, Morganella morganii; identical to SEQ ID NO: 277633

SEQ ID NO: 278666 - DNA, 300 bp, Morganella morganii
atggaagatctgaccaaaacccgtcacctggtagaatatcacatggatcggcacggtattacgccgatgcaggacatagaccctgacaacattgatcaggttgagctgtttgatatccgcatgacccttgcggcggcacaggcagagctggaattacatattaagaaaagcctggaagacgggaagttaacccgtgatgaggtcagggggatttataaaaaatcagggaaagtattttcttactttttgggatttgtcgggagtcttgacgctgtattcggggttccggatgaaaagtga

SEQ ID NO: 278667 - DNA, 192 bp, Morganella morganii
atgagcagattaactcatttggcaggctttgcgcaactccgcgttgctcctgttaagggtggtaaagaccctgccgcatttgtttatacggtaagagtaccggaaggtttctcagaaacaaactaccagtttgtgaagtgggcggtaggtgattttaaccgtctgggtaagacagcaggagcctcggcatga

SEQ ID NO: 278668 - DNA, 189 bp, Morganella morganii
atgaaaggaacagctgacaatctggatcggtattacaccgacagccgtgggcggaaagtccacgttgtccggtttgaccggcagaacagccgggtgattttcatgcgtgacggctatgagcatccgtgctttgaacctctgaaaacctttcaggagcggtatacacgcgtggatgaggtgaaaccatga

SEQ ID NO: 278669 - DNA, 276 bp, Morganella morganii
atggctactgtttctgtgaaatgtcggttctgcggattaactgaccctgttaaaaagcatggtaccggtaatggtggttatccccgttatcgctgtcaggcctgttgccgtacctttcagctcgattatatctacagagcctgtcagtctggcatcaaagaacaggtgattgatttaacaatgaataatgccggtattcgtgataccaccagagcattgcacatcagtattaatgccgttatccgcactttaaaaaactcaacccacgtcaggtaa

SEQ ID NO: 278670 - DNA, 213 bp, Morganella morganii
atgaataccaccgcaaccccttctctgctcgacgaaccactcgtggatatgaaattcatcacccaatttaccggatcaacggacaagtggttttacaagctgatacaggagggccagtttccgaaaccgattaaactggggcgcagttcccgctggcagaaaagtcaggttgaagcctggttacaggcccgtatggatgaatcctgtgaatga

SEQ ID NO: 278671 - DNA, 162 bp, Morganella morganii
atgaaaaatatacttcttgatctcactgccctgacaggtttcggtgcggtgctggcaggctgttacctgaaatacggcctgccggattccctggtgattggcgggtcagcaatggttatctattcactggctgtggccatgagggggaaacgtgcttcttga

SEQ ID NO: 278672 - DNA, 504 bp, Morganella morganii
gtgtttaatatcgatacggccaatgatttcgggttgtcggtatggtcccgtatcctcgatgttccgctggggattgatatcccgccgagtgaaaaagaaaaaatcggtatcggattcggcaggaagaaagccaacttccgggcaaatttccggcgcaatgccgattacaccctgtggctgacacaggaacaaaaacgtctgattatccggatgcggtactttaacctgacccaaagcccgaccgtcaccaatatcaatgaatttcttaagcgttttttctggaatgctgacagtaaagtctttgtgctggatccgctcgatatgacgtacatgtactatgtcttcaattttaatccggacgagcgtctgcgcgttctgctggaaaactttgatctgatgccgcgcccgtccggggtgggtgtcagataccgtattgtgacgaaaaaagccttcggtcacggcgaaaaccgtaaaaacttcctggaaagtaacttcggagagtaa

SEQ ID NO: 278673 - DNA, 1224 bp, Morganella morganii
atgacaaaactatttaaaatcccctttgcaacacagggggatcgcactgctgtgcctgatgaggtacaggcagacggctctgtttcttatactcagggttatggttacgattatgaacgtgatcaggcgacggatccggccgccaaagatatcgaacgtgagaagatgaacagtattttccatgatattaccggtgcggtcggggaaatgcaggcgttcggtatgccggtatgggcggaagaaggtaagccctacgctgtccgcagtatcgtgtatcacaataaaaaaacctggcagtcaaagattgaaaataacaataccgaaccggctgccggtattgcatggacggaactgaaagcggatatgaccgccggggatgtcggagcctacaccaaaggtgaggctgatcagaaatttcagccgctgggtaattatctgcctgccggttacagctactcaaaagctgaatctgacaccaatttccagccaaaaggaaactatgctccggcgggtaattacgccatgaaaggtgacagttacaccaaagctgagggggatggacgttatcaggcaaaggggaactatgcgcctgccggggattacgccgtaaaaggcgaaagttataccaaatcagaatctgataataaatatcaaccgaaaggaagttatcaggcggcgggttacagttattcgaaagttgaatctgacaccaattttcagccgaaaggcaactacgccccggcgggaaactacgcggtaaaaggcgagagttacaccaaagctgagggggatcagcggtatcaaccaaagggaagctatcaggcggcgggttacagctattcaaaagctgaatctgataataaatatcaaccgaaaggaagttatcaggcgtcgggttacagttattcaaaagccgaaagtgatgggcgttatgagaaaaaaggagcagcgaaaggctggcgaaaagttggtggttacggaaatgccagcagttcaatatctatgtcagaagatgtcagagggaagcaaatctatttccaattgacaggatccggcgggatttattggacaacagtatgtatgccaccggttgacggtattggaacccagtttcaccagggcaataccggatatggcattgtatgcacacaaaacgcaggaagaactttgaagtcagtcggggggcagcacatggagtggtcatcggtttatgtagctgattaa

SEQ ID NO: 278674 - DNA, 798 bp, Morganella morganii
atgcacgttataccgaaaaaaattcattatgtttgggttggtaataaacctaaacctcagtttgttatggattacattgcaacctggaaaaaacaccttcctgattatgaaataatcgaatgggataacaaaaaatttgaaatcataaataataaatatgcaaaggaagcctttgataatgagcaatgggcttttgtctctgactatatcaggttatatgccttatatcatgaaggtggtatttatcttgatactgatgttgagataacaaacagctttgatagattcctgaaccttgatttttttagctgtcatgaattctataacaataactgttggcctatcacatcagcagtaatgggagcaagaaaaaacaaccaaattgttggagaccttattgagatttacgataatctccctttcaaaactaaacaagggcttgatttgacagccaacactcagagaataacaaaatatctggaaactcggttcaatatacgacctgtatatgataaagattcaacattaaagttaagtgataaagaaataatttttccttcacattacttttgtgcctgtgaagaaaataaaatgaatttttcaattcatcatttttcaggctcatggctgccatcgcattcaagaaaggataaaataaatatttttgataaaattatactttcacgatttataaaaatacatgactcaggtgatatgccattacagaatactgagaaagtgatatttaaaataaaattatctaaaaacaaacagtatgttatcttattcaggcaataa

SEQ ID NO: 278675 - DNA, 1629 bp, Morganella morganii
atgggaaaaacaatccgtcaggtgacatttgaattactccggcaactgaatatcacgactgtttttggtaatcccggctcgacagaagaaactttcctgaaaaactttccggcagatttccgttatatccagacactgcatgaatcgtctgcggtcgccgctgcggatggttatgcgcaatccacccgtaatgttgcactggtcaatgtgcatacctccgccgggctgagtaacgcgatgagtaatattcttaccgcgtatatgaaccgcacgccgctgattattaccgccggtaaccagacccgcgacatgctgctgatagagccgtggctgaccaatattaagccggaaacactgccggagccgtgggtgaaatggagttatcagccggtgagggcggaagatgttccggcggcctttatgcgggcgtatgcgatggcactgcaaccgccggcaggcccggtatttttatcgatcccgctggatgactgggataaaccggctgaagcggatgcggcggttgtccgcagcgtgtctcaccgtatcagtgccgacccggtgcggatgcgggagtttgcgcagagtgtgtcaggggcgaaaaatccggtactgatttacggctcatcccttgcgcggggggagggctgggaggcagggatccggctggcggaaaaactgaatatcccggtgtattcggcaccagcttccgagcgcccgccgttcccggaatctcatccgctgtatgcaggcggcctgccgtttgccatgaaaccactctcggacaaacttgtcgggcatgatgtggcgctgatcatcggtgcgccggtcttccgctattacccgtatgtggccggtgactatatcccgccgggactccggttgctgcatatcacggatgatccgcaggaagccggtcgggcgccggtcggagacagcctgttatgtgatgcggtactggcggttgagcagttaactgagctggtgagtgcacgaccggcactggcaactgccgtcagtaaacaaccgcacggtatggcgccgcatcccgccgcgccggaagctgcgtcagacgggctactgagtgcttcacagctgttccgcgcggtcagaagtgcgatgccggaagaaacgattctgaccgaggaatccccctctaacctcggcgaactgcatgctgcctggccggtggataaaccggactcattttacacctttgccagcggttcactcggctggacattaccggccagcgccgggattgccctcggtgaacgggacagcgggcgtaaccggccggtggcggcgattatcggtgacggctccatgcagtactctgtgcagggattatggactgccgcacagcatcagttaccgatcctgtttgtcattccggaaaacaggcagtacggcattctgaaatctttcgcagtgctggaagatacgccgggggtgccgggtctggatattccggggctggatattgcggctcttgccaccggttacggctgcaccgcagtccgggcagaaacagaggctgaggtaattgcggcctgcaaagcggcattacagcgcaaggggccgacagtgctcgttgtgccgatccggccgtcagtaccgccactgatgtga

SEQ ID NO: 278676 - DNA, 567 bp, Morganella morganii
atgagtaatcactttgatggtaaatacgaagcggaaataaaatatcgcctggctgatcatagcgcttttttgtcgcaattaagcacaatgcatgcagagccttttgtggtaaataacgaagaaacagactggtttttcgatacgcagcaaacgcatctggcagacggtaatgtcagtatgtcagtcagaacaatgacgccctcgggtattaagctgtggatagtgaaaggccccgccgccagcgaatgcaaagctatcaatattgatgaccatgagcatgtcagaaatatgctgctgacgctgggttaccgctgcacaatgaccttaacaaaaacccgcagtgtctggtttctcggtgatattcatatcacactggatcatattaacggcgcaggatggtttgccgagtttgccattatgacgcacgatgaaaccaaattagcagaatacagggaacggctgcgggagaaagccgcagaatttggtctgacagacgatatgattgaaaaacagagttataaacaactggttagttcaatgcagaaaaacaactgtaacgcagaataa

SEQ ID NO: 278677 - DNA, 651 bp, Morganella morganii
atgagtgacactcaggcactgagttacagcgaattacacacaatatctgatgcagatatcgcacaaattaatgaattaattatcaccacctgggattaccgtagttggatcccgaaagagaaagttctgccgatggcggaatttttgctggatgatgtcattctgacctcatcacgaatttttgtggtgcgggatggcgataccatcgccggtattatggcggtcacggcatctgccgatttgcgggagaaagtccacgccaaaacccgtcagtattctgccctgaaaaatattatcgcccgtgacccgcaggaagaaaccctgtttgatatgtatctgaatacgctgattatcaacggaaatctgctggcttcctgtgacgggaatttcgatgcctctctgaatttgtttatgatagatgcccgcttccgcggacacggtatcggtaaccggctctggcagctggcgatggattatctgcgggaaaaacaatccgcccgttatttcctctggacagacagtgattccgatttcggtttttatgaacacaaaggattacagcgtatcgccgcgcaagcctatgactggggcggccatgacgtgactgaaacctattatgtttatgccggggaactccctgctctgtcctga

SEQ ID NO: 278678 - DNA, 363 bp, Morganella morganii
atgccgttacttaatggtgatgcggcagtgatatttgacgccgttccgcagaccgatctgaaacgggcattttccgcgacacttgcacaatggaacacaccggaggattgggaaaatgatgagtgcaatatcattctggctttgtcgcgcattgcttatactctgacaacctggcacattgcatccaaagcagacgctgcggcgtggctggctgaatcaatttccgatccgcaactgcagcaactgttgcaggcagcaaagcatagctatctgaccggtgaatcatttccggtttctgataaacaggcaatcagctgctgcattctttctctgcgggctttatgtgacgaaaaattatcatga

SEQ ID NO: 278679 - DNA, 516 bp, Morganella morganii
atgaaaacaacaaaatacctcccgctgattttgtctctgctattgccgttatcagcggttgctgcacaattatcaccggaaaatgtggtattggatttctaccgtctcaatttgcaggatccgccttctgatggttatgcaaaaagccaggatttgtatgtcagtccggcgttgcaggaaagcatcagtgaatccctcagttgtaatttcgatggtccgggcactgatcaggcgttctgcgaccagccgcgtccctgcaaagaaaccgaatatagttatatctgtctgtggggagagcattgggtggaaaatgatgtcaattattacaccaagtcacaggattacccggattcgtggatgacagagcgcgcggcacatactgaatcacaaaccccggatactgccacagtgcgcatcacactgggtaaagcaccggagccgctgcggtcattccgggtaaaactgattcagcaaaacggacagtggaaaattgatagtattgtgatgcttgagtga

SEQ ID NO: 278680 - DNA, 1371 bp, Morganella morganii
atgaaaacaaaatcactctttcttctgataccgttattactctcaggttgtgaccagacggtggtaaaagagatcggcattgaagaattgtcggagaacctgaacaatccggaatacattattatcgatacccggccggacagtttatatttcggttttaaagataaaggcgcggcccgcggcggccatattaaaggtgcgatgcagtttactaccggctggctggattttatcgatgagaataaatttgatacgtttgtcgaagaaaaggggatttccaaagaaaaaaccctggtattttacgacagtgacccggattcactggaacgtattactgctgaatttgctgccaaaggttttcaggtcagggcatttaaatcctttatccagtacagcaattctgatctgccgatggataaatacccgaattactttctgagtgtttctcccgcctgggttcaggccgcactgaacggtgaaaaaccggaaagttataccagtgatcaaaaaccggtgatatttgaagtgtcgtggggggatgcggagcaatcaaaatcctatgcaacgcatattaaaggtgctttccattttaataccgactggatagaaaatgcgccggtctggaatttatccgaacctgacgttatcaaaaataatctgctgaaaaacgggatccgcaaagataccccggttgtcgtctattctgaaaatcagatggcagcattgcgggtattatgggcactgaaatgggctggtgttgaagatgttcgtttcctgaacggcggtttaaatgtctggactgatgcggaattaccaacggaaaccaccctgaatatcccggtaccggttgcggatttcggcgcggaaattccggttaatccgcaggtcactattgcgatgccggcagaagccatacagggtcagaaatccggccttaaacttatcagcaaccggacatgggatgaacataccggcaaaatctccggttatgactatattccgcgcaaaggtgaaccggccggggcaatatggggattcggcggtaaaaattcgaatgatatgtccgattactatgacccggacggcacattacgtaatccggaagagatttttgctttatggaaaacgcagggtattgaaccgacagaccaagtcgcgttttactgcggcaccggctggcgggcaagtgtttcctggtttatgacccaactggcgggctgggaaaacagccggatttatgacggcggctggaatgcctggcagatggatccgacattaccggtattaaataatattcagagccaaaaaccggcagcactgaatgattatggtgaaataatcaaaaaaccgggacaatcctgtaaaagctga

SEQ ID NO: 278681 - DNA, 198 bp, Morganella morganii
atgaaagatgaatccttgcatgaatgggatgttgttgattttattaagacaaaagaagaaattttgttttatctgacgacggcgtttgaaacggatgacttggcttatgaactcagagccctggaacatgcaaaacgtgtattgaaagagctttacgatgaagccggaacaacggttgttattgcaccggatagttaa

SEQ ID NO: 278682 - DNA, 261 bp, Morganella morganii
atgattaataatgaaaaatattccgatattttagctatggctgtgaaaaatccaaccgaagaagaagaattataccttgaactgaccgaccacggttggctggatgaaaaggcattacgtttgctgatcacccgacgcatgaaaaaaaagctcagtaacgaaagctatgttgaccggctgccaaacggtgaaacatggacattttaccctgatggcacaaaaaaaatgatacgtgacgctaagggaaatcctgttaagtga

SEQ ID NO: 278683 - DNA, 249 bp, Morganella morganii
atgtctgtaaaaaataaaatgcgcgaccgcctgccaaacggccgcttaaagtcataccgtcgtgtaggccgacattttgccagttgtgctgactgggtaaataaagctccgcgttggcatcgtaatcggatgatgacccgtcctgaacggcgtgaggtaaattatttactttatcgtgtcatatgtggttatgatgctgatggtattgcgttcccggtaagccgcagaccttttgtctactttttctga

SEQ ID NO: 278684 - DNA, 1302 bp, Morganella morganii
atgcggtggttacttgttagtgtcatgatgttattttcattacattcatttgctgaacgcattgaaatgaataatgtgcctgtatctgagtttacggactggtattcaaagaaaacaggtaaaggcgtaattgttccggataattttattgaaaaaattactgtgtttaattctgacattcagccggatgaaatacacggtttctttgtctcggtgatggcatcccggggttacgatgtgaaccccggtaatccgatagtgatcagcaaaagtaaaaagggcgctcatgtggtgacaaatgaagaggataatactgatgaggttaaccagtattgggatgagcagggttcgagtctgcaatatcttcctgattatccgtcaccggagcggggtaaattttttgaccagaaaaccgaaacataccggctgaataatgtactggcgaaagatatttttccggtagttgatatatttctgaaatcgtcgccatattccggcggtcaggcaacggttgacgagggcagcaacagtattattgtgaccactgcacaggaaaatcagcagcagttacaatcttttattccatctgttgatgtgcagcgtacacaggtactgattgaaagtatcatgtttgaaaccacagacggcagcagctttgatttttcgtttggtgcgggtaaaaaagacggttcacggattgtcggcggggttaataccgcatcactcggagaggtgttatccagctcaggtggctctttcgggatattttccggtaatgtgctggggctggcactgaccgccgtcgagggtgataaacacagcaaattgttgtcagttccccgtgttttgaccatgtccggcaaacggggttatatttcctccggtcagaacgtgccgattgtaaccggtaaaattacaggtcagggtgttgatgtcaaaaatccgtttcagaccattgaacgacgtgatgtcgggatttcactggatgtgactccggtggtaatgaataacagtaccgtgatgctgaccgtcaaatcgaaagcagacagtatttcaccagtggcgaacgctacagatattgtgtttaaccagcgttcgattgatacaacagtccagcttaaggacggtgataccttactcattggcgggttaatccagcataatgtaatcaatgcggaaacgtccacgccatatgcctcggacatcccgctgataggctggttatttgattcaaaatcagacagtgacgataaagcagttatgtatattctcatcagggcgcgtattcttcgggccgcctga

SEQ ID NO: 278685 - DNA, 1053 bp, Morganella morganii
atggctgtttatttcgttacaggttcattagggtcagggaaatcgttaatttccgtgtcaaaaatacaggataaattagcaaaagggtgtccggtggcaaccaatcttgaactgcgtctgtttaatatgccgcgggtcggtaagatggccagaaaaacgcgtgtttaccgtctgccggacaagccgtctgttcaggatttggaaatcatcgggcggggtaatcagacttatgatgagtcccgcaacggattactggtgctggatgaatgcggaacctggcttaatacacgcacatggaattataaaagccgtcagcctgttctggactggtttttacatgcccgtaaattaggctgggatattatttttctggttcagaatatcagccttgttgataagcaggcacgtgaggcactggctgaacacgtggtgtattgtcgccggcttgatcgcctgaccattccgtttgtcggtacgttattcagtctgatcgtgggggggaaaatgccgatgccgaaaattcacctcggcattgtgaaatatggtgattcccagcattcaccggtggttgaacgctggctgtatcggggtacggatttgtattatgcctatgatacaaaacaacaattttcctctttctatgataaaggtgtttacagcgttctcccgccgtatctgacacacggacgttatcatcagtctttaacggtaagcaaaattatgcggttaagccgaatctatttaaaacgtttctcccgttttcgtctgctgattttaggagctttactgggggcggttatggcgtattcagtgccggatacacaaaaccatatcgtaccgccggatgttctgccggaaccggttttaatttctgatttaaaaataaagtctttcaggcaatttggctctgattcacaggttttattcagtcataaagatgggcaggtcattgattcaaataatctgacagtacagggttataacattgaagtgataaattcatgcaaaatgcggatatacagaggtgcagaaaatgcggtggttacttgttag

SEQ ID NO: 278686 - DNA, 333 bp, Morganella morganii
atgccagcatttttggggattcctgttctaatttcatttctttcaggtgttgtcggtgcggttatcactcagattatttcatcattaacacgacagacagcgaaaactattttcattgcatcactttttcttgctctggtggtgttgtttattcgtggctcaattttgttattcgatagtgtggttgtgtttttaccaccacaaataacagatgttatttcattgattatgcccgaaaatacactgttttgtatttccgctgtttcgggtcttaaagtggctgttttcacatttgatgtgaaagaccgcattattaagtatatggcatcctga

SEQ ID NO: 278687 - DNA, 423 bp, Morganella morganii
ttgacccaaaaatatgatgctgattcagtaacggattcgatggctgaaattttcggccagctgactgagtcagttaaaactcatgatgagaatacagaaaattcattaaaagggataattgacggaagtggcgatatttcatctgagtttaaattgattgatggatatttaaaaaatatagggagcaatacaactgattcaattttattcccgttttttaatgtcggatcttatttccctgatttcccaaagcctaaaaaatgtgattcattgaaatatggtgaaggtaagttttatgagtttaatattgattgcaaatacattgatacgtttaaaggtatttttgcttttgtcttatactgcctgaccgtgctgtatttcataaatacattatctggtttgcttaggaataaagaggtgtga

SEQ ID NO: 278688 - DNA, 561 bp, Morganella morganii
atgaaaaaacttttttcttttttattattatttttgtcatttaattcctttgcttccggtcgttggattgagataacgacagacagagcttttgccgggtcttgtgaaaaggctacagcaaaagctaatgatcttgatgtgcatcgtaagacctacaaggaacttgccgtacctgagcataaggaggatttttctcttgatgtagagtttatcggcagttgttcttttgagggcggaatcccgacagttcattataaattaatgggatatacctgtggtcttcagctgactaatttaacactggctggtacatgtcctgatgaaatacccagcaaggaaaattgtttggagcgtgatgattatactggccagttatctgtttcattagaaaaagacagggaaagatatacagatatcgaaggctgtgtttttaaggccacaggtattattgtctgtgattcggaggggaaatcctgtgctgcagactggaagtctacaggggatatttcaaaagatttctttggggaaagtggtagttctggcggcaatagtggtaactaa

SEQ ID NO: 278689 - DNA, 246 bp, Morganella morganii
atgaacggtttcaaaactgtaaaaacaaaaattgttattgcatcgtctatgttgctgtcaggcgcagtattagctgccgatggtaatgcaacaacaggtgggatttcgtcggctaaacaggcattttcaggtattacggatcttgcaaatgagtttatttcaatggcatggccgctggtaacattactggttggtgcatctattggcattaagttgtttaagaaatttgcgaataaagcatcctga

SEQ ID NO: 278690 - DNA, 267 bp, Morganella morganii
atgataaaaattgaaattaatgaaactgacggaaaaatgaataacaaacaggttgtatcaaaatcaacaggtgaagtgctaacatttcgggagcaagttgcctacatttataatggtgggatctatcctgaaaaatttatccttcagcttgataaagatgattcaccttatccggcagggttttatacacttgatagtacctcattttctgtaggtgactttggttcacttaaaattaaaaaagtgaaaatgattccatttaagtaa

SEQ ID NO: 278691 - DNA, 1128 bp, Morganella morganii
atggttgagaatagtgagcgagtagtttttgtcgattatctggcattttcagcgccgatatcagtgatgaaagaagttcatacgtttcaggaaaagggatttgaatggagaaaatttcaatacttacctgcttatagatattatcagaattcatctccttatattttttctgatggttatcaagaggtacctgctattgcagtatctccgctaacagaagatcaacaatcacgatattttgaagatctctatgcttgctatttttcccgactgaaaacctggattgcttctttatttggtttggttgtaggagcgccccggggcaaagggggatttgcttatcaggattctgctgttttatacagtgacgaaggaagctctgatcgtatgggaatgctgtattggggcggtaataaagagactttttatgtccagatttcaggaataggatgtgcacatgttttcagtggaactacaccacaaaaaatccacaaatggtttgaacatcttgatattacacgattaaaacgtcttgatttagcaacagatgattatgacggtatttatacatgccgtgctgctttatcggcatatcgtgatgatgcgttctatggtggtttgggaccgaaacccaaacttgaaaagtcagaagcgattgattctgatggttgtccaactaaggaaattgttaatgtaggttccagacaatcacgggtttactggcgtatctacaataaagcattagaacaaaaagtgtccggtatctggtatcgctcagaagtcgaattaaaagaaatttctgttgatgtactgctgaatattgcgagtatttataccggcttatgtgactatgcagctcaaataaatccatcaatgcctacatcaattcctcggctgttcggtagaaaagccattgattcaattgaggcaaaagttaggtggttacgtaatcaggcatctgcaagtattgcaaaagtattccatttttttaacggggatattgaaacagttctttcaatgattattcgagaagatcataatactaatatgaacttacggttagaaatcccaccaatatatcagacactattgaatgagaaattaaacacattacagtgtcctttttaa

SEQ ID NO: 278692 - DNA, 195 bp, Morganella morganii
atgaacattatctattttgattacatcgaaggattcggcatcaatgccaaggtggggattgagtgggatttttatcgttcttttgatgaactgattagagagtgctcttgtcattttggcgacaattttttgttagcatcaaccactacaaaatcaggcgattttgtcagctatggagatttttgtcatggttga

SEQ ID NO: 278693 - DNA, 780 bp, Morganella morganii
atggatgagaacaaatcaatagaactattaaaaaaacaacaagaactaatccctcaattaaaacaaaaaagtcgaaaagcacctgaatttgacgaatggaaacgtgataccagaatcattataaaaaaaatatttggtgataatcatgcaggtgagttttcatctatcgtttattcattaatggttttttcatcacgaactactgaccatgatatccataatgcatatctcaggggattagataaagctaattctcttatatcatccttaatttcagaaattgatacatttggattagaaaataaactacttataaaaaaagaagatccaatacgtattattgaaaatatttgctataaatttcatagtgtcgcaaggcaattacaatcaagacatagtgataggtctacccttgaaattgaagatgaatatgatgttcaggatttgttacatgctttattaaaattacattttgatgatgttagagaagaagaatatacaccaagttacgcaggttcatcatcaagagttgattttttattaaaggacgagaatattatcattgaagtcaaaaaaacaagaaaaagtttaaaggcaaaagaagttggtgaacaattaataatagataaagctcattacaccacccatccagactgtaagtcattgatttgttttgtctatgaccctgacgggagaatttccaatcctgtagggctagaaagagacctggaaaaaaacaataatggtttgaatgtaaaagtaattatttctccaaaatga

SEQ ID NO: 278694 - DNA, 462 bp, Morganella morganii
atggtatttagaacgatagagttaaataaatgcaccaatttaaatgatattaaatatcatcacttgttatttgatgaaaatatatatcgggatatttacatgcactcatatattaaatggctttctgatgatgagtttgaaagatttaaatttaaccttacaaaaataataggtagggaaataaaaacactacgaaaaacgcatggagtaagtggattagaactagggataacaataaacaaatcccagcaacaagtatcacgatatgaaaatggaagcacccccatcccattagatatactaataattttattatacatttttgagatacctcctgaatttttctttaataaaatcttgtcttctttgaagagcgacatcaacacaaaaaaaacattaggtaacatttcaaagtcatcaaagattcacaaacattcagagtactggaaaacattaaaataa

SEQ ID NO: 278695 - DNA, 2421 bp, Morganella morganii
atgcaaaaaaaaattttatacttatcaatgcttaacattttatattgtttatcatcactatcagcgtacgccaattactctccatcaaaaaacattgatgaagttgtaaataattataataaatatgatgatttatctaaaatactaaataacttatcaataaaaacccctggagatggaaattatcctaacgaagcaatttccataatctataatggagacgataccgcggatttttctggaaaattactcaaaataaaagatattgaaataacagcaaataaagcacctaactcaaagtatggaggcagagctggcatatcgtctcgttctaataacattttggcagacaatattaagataatatctcaggatgaggggtatagcggcataagtaatggaaacaatgaaaactttgataaccacagagaccagttgtcaacatcaaagtttgttttgaaaaatagtgaattcaacctatacgggaataaaagcaaaggaatatatacatataaaacatctataaatgaaaattcattcgcacacgttgaaatgaatgagtcgactatcaatatacttggtgataaatctattggcattcaggttattaacgcctctgcctccacaaataattcaaaaatcaatctttctggtaaaaatgacatcggcatttccgtttataataccagtagcgtattgattgataatagttcaagcatcaatagcgaatcaaccacagcaacaggtatattgctttcaaggtttactgttcccacttactgggcagatgatttagaagataaccagcagattactgtcaataattcgtctatcattaatgttaaaaatgggataggaattatagccaacgcagggaaagatactgttaatataatcaatgactctaaaatcattagtaagattttaattgatgcaagaaaagcaactgaagattataaaacccatccgacaaatatcacgcttaatgtatccggaacatcttcagttgaaggggcagtaaaaaccgaagaaggggccacctcaaccatcagtcttacatccacctctgtctggaacgtgatcggagattcagacctcaccaacctgcaaacaaacgactcatttgtcaatttccagaaagacggcgacaagttcattaccacccaggtcaataacctgtccggtaaaaaaggtacatacacctttgccgtggacgtggtgaaacaggatggttcaaaactcattattaataagtccagtgacggaatacatattgcacaggggttgaacgacggggcacagaacaccacagggaaagaaaaaatcacactgattgaagataaaagcggggcaaatgcaggagcggtctttaatcccggtaaagacgtggagcttggcggctacgcctatcaggtacagcgtgacccgaacaatccgggtagttggatactggctgcgaagaaaagacccggtccagaccctaaaccaacccctaatgatacagcaaaaactattacggggcttgcaagcacctcttatctgatgaatcaggcggaaatatccaccctacgtcagcgtatgggggatctggcacaggcagagaaggcaacactgggtgatatatctgggacatggggtcgtatgtacggcggtaactacaaaacccgtgacaatgataatcaggcgaaaaccgacatgaattattacggttttcaactgggtggggatgtaaacacctttcactacaacgacaacaccaactatctggggatatttgtgggtcacaccaccggtaagccggactatgtccgcggtaatgcaacggcgacgtcatggtacggtggtttctatgacaccttcatcacggataacggactctatgtggattcagtggtgaaaatggggcagtaccgcaacgagtacaacctgaaagacagccagaataatgcactggacggcagagcacagtccagcattatcacgctctcttctcaagcaggaaaacgcttcatcctaacagaaaacgacaattacaatgtgtatgccgaacctcaagtacaactgacatattcccgcatcggtacatttaacactatgacatcccatggtctgcaagtgaaacagggggcatataactccaccgtagcccgtctgggcgttctactggggacacagattaataaacagtctgatatttacttgaaaacgtcatacctacatgagtttagcaaaaatgtgaagtatacgctgaatgattcccctgaatcttacaacgtcaggggcgatgggctggaagccggcctgggtgtcaatgtgaagctgaatgataacggatacctgtatgcggaaggggattatatcaacagtaaaacccactacattgggtctaaatttaacattggttatcgctatagtttctaa

SEQ ID NO: 278696 - DNA, 1533 bp, Morganella morganii
atgatttacaccgacggcaccatagccattaaagccggttcaccgattgtgaccggcaccggtacacagtggaaaaagaatattcacggtgtggcccccggccagctcatcagtatcgagaacggcacagtaccgatcattatgatgatccgcgcggtaaacagtgataccgaactggtgttgtcattcaatgctccggtaacgctcagcggcgcgaaatactctatcgccactacggtaccggataccatttcagatgcagcccgcaccatgtccgccaatcagggctatatcgtttactttcttcaggcaatgcagcagtggatgactgatacaggccaggtggagattgagctgccgaacggccagaaagtcacgctggaggatgtaaaagggctggcttcacaggaatgggttaacaatatgctcctgacaagcggggagctgacacagattcagtcaccggccaaaacgagagggatttatgttaatgataacggggatatcggcggaaacctcggtcctcatcagaactggaaggtggacgggaatgcaaaagcccatttccgggaattagaagtaaaaagtccgggggattacaccggtattaatctggtaaaaggtgatggccgatatgtactgatagaaaccaatccgcatgccggtagtgtatcgatgctgacgtttgcatacagaaatgcatcaggagaaaaccagcacgttatcaccataccgtatgactcaggtgcgctggccactcagacatatgtgaaatacagtacagggtttggtatcggttctgaggcgggaggtaaaggaattacagattttaatagtttcgttacgccaaccggtcagtactggtacggaaattcctcctcaaatattccccggactgttgtgggatttggtaccgcactggttacacggtattccaataatatttcacatcatctgattattccgaactatggcggagggagttatctcgctatcagacgtaacaatggcggggcgatagaggatgtcgttgccctgacatccaatatgtatatcgtagacggcagcggatattataaaaaatcgtcgccaatcgttcagatttaccctgatggccattacgagaccaatgatgaatctgaaggggcagaagttttccgtaccggcaccggccagtatcacatcaccggtatactcggttataactcagatggcgcatggggcgtaaacggtggtatctcagtaccgaaagacaataacggccttgagttggtttatatagatgacagggtgaagagtgacggcagcctgattattgaaacctgtcaccggcagcatgcgcacttaccggagcgtttccagaactggcggctgaaagagatcaccccggaaggtgagcgaattttctatcaggacggagagccgtgtgacctgccggaatccacccgcctcgatgtacgtgttgaaatgccacagggctcagtgtggaatgtgaaacagcgggagttggctgaacaaataaaatgtgaataa

SEQ ID NO: 278697 - DNA, 267 bp, Morganella morganii
atgaatatattaaaattaatcacattagctgcaataaccacgctgacagcctgcagccataacgtatacaccaaaccagtggattgcaccgggcatatgtttgaggggctggataaccggcattactcagctaagctgacaaaatatgcaccggacagtaaacggtttttcagcacaggtgatcctgtcctagggttacatggttggatccgtatggatgcatttaacaaaattacatgtgttaaaggcaagggtacagaggactga

SEQ ID NO: 278698 - DNA, 687 bp, Morganella morganii
atgacacacggttttatatgttttggagacaccggccggatgcaaattgacggcactaatatagcgttagggctaatcagaaaacagtcgtttcattgtccgaaagtgcaggatgcaggacagggaaccattaaagaggtttatttcccgactaaagtccacccaaacacacaaatgattgcagccagatcatcattctgggtaagaataggtggtcaggcgtttgacaatacgaataacaatgcttttgtctctatgccttttcgcgacggctccggcggaaatatagaagtctgggagtttggtaacgcccctgttaaggtacgtaatcaaaaaatgggaatagttgtgataaacccggtaaccaatcaggtggtatataatactaactggggtgttgcaaatatactgcatgttcagcggctaaaactatggcctgatacaatgtggtctatgacaatgcctaataatggtaataactgtgcagttgtatttggtggcggcgctcagaaaagaacagattatgaagaatttatggaattcgagtcttatttctggcgaatgaacggctctaaactggaggtgcgtttgttggttgatacttattccagacctcacgcgccacaatcttttgaatcatgtgatataccgctatatataatgataatagatacaacagggatataa

SEQ ID NO: 278699 - DNA, 321 bp, Morganella morganii
atgtctcacgggattattgtatatgatgaacatggtaataaaatattagattccggcaaaagactcggcagattcgtcgggtggcatgatgttaaccccgcacctgtcggtcagtttaaatacaactgggatcaccggaatctgctcccgatgggggagatttttgtctgggttaatccgagcttttggttcaatcataacggctggtgcgattgccgggttgaaaatggcgttattatttttgagggtaatttaaggcgaaacgacgaacagagagccagggaaacttatatgcgtatattatatggtgtaaaatcatga

SEQ ID NO: 278700 - DNA, 3177 bp, Morganella morganii
atgacacaaatcacaggccgcaaaggtggcggcggcagcccgcgcacgcccgtcgaacaaccggacgacttacagtccgttgcaaaagccaaattgctgattgcccttggtgaaggtgaatttgccggagagctgaccgggaaaaatatctttctggacggtacaccgctgatgaatgctgacgggtcggaaaactttcccggtgtggtgtgggaataccgcccgggcacccaggcgcaaacctatattcaggggatgccggcggcggagaatgaaatcacggttggtaccacggtacaaagcagtacaccgtgggcacatgcattcaccaatccgcaattatctgctgtccgcgtccgcctgaaatggccgtccctgttccgccaggaggataacggggatatggtcggcaacgaggtgaaatacgccattgatttacaaacagacggcggaagctggaaaaacgttgttgatggccgtgtaaagggtaaaaccacctcaggttatgagcggactcatcgtattgatcttccacagtcggccacatcgtggacactgcgggtgcgaaaaatcactgaagatgccaacagtgccaaaatcggtgacaccctggtgctgcagagttacaccgaggtgattgatgccaaactgacctatcctcacaccgcactgctgtatatcgagtttgattcaaagcagtttaacggctctatcccgcaggtcacctgtgagccgaagatgcgtattatccgtgtaccgtcaaactatgacccggagcaccggacgtattccggtacctgggacggttcgtttaagtgggcatggaccaataaccccgcctggatattttacgatattgtggtttccgatcgctttggcctcggcgaccgcatcaaaatgcagaatatcgataaatgggaactgtaccgtgttgcgcagtattgtgaccagccggtaccggacggcaagggcggcagcggcaccgaaccacgctatatctgtgatgtgtatgtgcaggatcgcaatgaagcctataccgtgctacgggactttgcggccatcttccggggcatgacctactggggcggtaaccagattatcaccctggcggatatgccgcgtgatatcgattacagctataccaaagccaacgtactcgacgggaagttcacctattccggcagcagcagtaaggcccgttattcctccgcactggtgtcgtactcggatccgctgaacggttatgctgatgcgatggagccggtgtttgaaaacgaactggtttaccgattcggctttaatcagctggaaatgacggcgatcggctgtacccgccagtcagaggccaaccgcaaaggccgctggggcatcctcaccaataacaaagaccgcgtggtgacattcggtgtgggactagacggtaatatcccgcagccgggctacatcattgcggtggcggatgaaaacctgtccgggaaagtcaccggcggccgcgtcagggctgtgaatggccggagtatcacactcgaccgcaaaccggatgccgcgccgggtgaccggctgatgctgaacctgccgtccggtaaatcgcaggcccgtaccattcagatggtcacagataatgtgatcactattaccacggaatacagtgaaacgccggaaccggaatgtgtctgggtaacggaatcagatgagctgtacgcccggcagtaccgcgtggtgagcgtgactgagaatgatgacggtacgttcacgatatcggcggcgatgcatgatccggacaaatacgaccggatagataccggcgcgatactcgatgagcgtccgatcagtgttattccgcccggcaaccagttcccgccgaaagatatcactgtcagctcttattctgtcgtgaaccaggggatcagcattgaaaccatgcaggttacctggtcaccggcagagaatgccattgcctatgaggcgcagtggcggcgtgatgacggtaactggatcaatgtgccgcgtaatgccaccacttcatttgacgtgcccggggtctattcaggccgctatctggtgcgggtcagggcgataaatgcagcagaaatctccagcggctgggggtattcagaggaaacccggctgaccggcaaggtgggtgatccgccgatgccgctgaacttccgagcgtccacgctggtattcgggatcaaactgaactgggagttcgggaaattcacggaagataccctgaaaactgaaattcagtacagcaaaaccaatgacgggcagaatctgttactgctggctgatgtgccgtacccgtcccgctctcacgaactggccggtctggccgccggtaccgcgttttatttccgcgcccggctggtggataaaaccggtaaccagtccccctggactgagtttgtgcgcggtgtggccgagttcgatgcatcgaccattattgatgaagtggctgccgggctgggtgattcacaaattatcaaagacctgcagtcgcaggcggatgacaacttcgaagccgtcatcaacaacgccaacaacgcatacggccagtggggctactggcagcgtgaaaccggcgcgatgaaagcagaaattatcgaagtccgcaactacacagtcacggaaacgaaggcacttgcagagaaactggacgcggttaaggtgactgcagacgacggtttcgccatggcacaaaactccattcgcgcgcagtgggacatggccgccggtgaagcatccgttgttcacgatatgaaagtccggatccgttataacggtgaggattattccgccggtatggtgatcggggctgagctgaaaggcggtcaggtgaacacgcttatcgggtttaacgcgcagcagtttgcgttttataatccggtgaaaaaatcgatggacctgttcatgtacatgaaggacggacaggtctttatgcgtgaggcgttcattaatcaggcatggctcaacagtgtggttgtcactgacaaaatgcagtcggaaaactacgcgccgggtaaacagggttttattctggatgcaaaggctaataaatttgagttctttgacggaacaacaacaaacggtaccggtattacagcgggcggtattaaagtatatgacaataaccggctgacggtcattattggtgatatatcggggtattaa

SEQ ID NO: 278701 - DNA, 588 bp, Morganella morganii
atggtgaaaattgtactcggtggtgtgctgggtaagactttcggcaaaacacatcagcgcctggtcagcacaacctcggaagcggtacgtgcattgtgctgtactatccctggctttgaacgttacctgaataccagtaaatcccgcggcttaacgtatgcggtatttcgcgggaaaaagaatatcggggtggatgacctcggttttccggtgacggatgatgttatccggattgtgcctgttgtgatcggcagcaaacgcgggggattactgcaggttattttcggtgcggtaatggtagcagctgcattctggacaggcggtgcgtcagtagcggcatggggagcgatgcataccgggctggccatgaccggcgtatccatgatgctgggcggtattatccagatgttgtccccgcagccgggaggtcttgccatgaaagaccagggcgaaaataaaccgtcctatgcgttcggtgccccaacgaacactgtttctcagggctacccggtaccgatcggttacggtaagcgccgcatcggcggggccgttatctcagccggaatttacgttgaagatcagcagtaa

SEQ ID NO: 278702 - DNA, 549 bp, Morganella morganii
atgaagaaaattttagtattacttgctgctgtatttgttctttcaggatgtcagtctttacctccgcttaactttgctattcaggatgttgagccgtcaaagaataaaattgatggtgaacttaaatcggtatctgtctctttggcgtcaccagaagaaaaaaaaggagatatagaggcagggatggaagcagtacctatgctttggaaaagtgcgcttgatgacgctttagcaagaaacgtaatttttaaagatgactcaaccagaaaattgagtctgtctgtgaaagttctggctattaacagtccatcgtttggcgcagaaatgaaaactgtatcaatagcaagatatcaattaactgacagaactgacggtaaagttgtatacagcaaagaaataacagcagaaggtgtcgttccatttagttatgcatttgccggaatagttcgtgcaagagaatcgataaatcggtcagttcaaaataatatttcagaatttttgcaggaattagatcatatcgatataaataagccttattttggcatgtga

SEQ ID NO: 278703 - DNA, 693 bp, Morganella morganii
atgcgtaaaaacattcaggcggccattttttcacatgcagaacgtgaatatccccgtgagtgctgcggggtgatcgcgcaaaaatcccgtgtggtgaaatatttcccctgtcgcaatatcgcggtttctccggaggaacattttgtcttatcgccggaagattacgccgctgcggatgattggggaacggtgatcggtattgttcacagtcatccggatgccactacccagccgtcagaactggacaaagcacagtgcgatgctctcggtgtgccgtggtatatcgtcagctggccggagggggatctgcggactgttcagccgcgcggcgagctgccattacttggtcggccgtttgtgctcgggtttacggactgctgggggctggtgatgagctggttccggcaggaacacggcattgaactgccggattaccgggtggattatccctggtgggagcagggtgagaaccggtacgccgataactggcgggaagcggggtttattcaggtcgatgatccgcagcccggtgatgtcatcgtgatgcagatacaggcaccggtcgccaatcatgccggtattctgctggctgataatatgctgctgcatcatttatacggtcacctgagccagcgggtgccgtatggcggttattggcgcgaccgcacagtgatgatcctgcggaaaccataa

SEQ ID NO: 278704 - DNA, 759 bp, Morganella morganii
atgatcacaaacgattaccagaagctggaaccgggtaatgctgtccggctttttgaggttgacggtaccgcattcggtgcgccggatattttgcggttccatgcatacaacatcccacatacagaggcagaaattactgccgccggtggtgatccggaaaaattaccggcgaaatccatctggtggcagggagaggagtatcgggcctggcctgcgcagattgacgggatagaggcatccaccaccggatcaggcgcacagccgaagttatcggtggcaaatctggacggttcggtgactgcgctgtgtctggcatatgatgacatgctgaaggctaaagtcacgatacacgataccctggcgcattatctggatgcggcgaattttccggatggtaacccggcggcagatcctacccaggaaaaagtctcggttttttatatcgacagcaaatcctcggaaaccaatgaggttatcgagtttgaattagccagtccgatggatttgcagggggtgctgatcccgacgcggcaactgcatgcaatgtgtacctggtgcatacgcggcaaatacaaatccggtgacggctgtgattatgccgggcagaacgggtatttcgataagcacggcaaccgtgtggatgatccggcacaggatcagtgcagcggcatgctgaacacaggctgctttccccgcttcggtaaaaacaatccgatcccgtttggcggctttccgggaacctcattactgaggaaatag

SEQ ID NO: 278705 - DNA, 336 bp, Morganella morganii
atgatcgaaacattcacctggtgtccccgtgttaatcccacggaggacatcacctataaaatccgcagggcgaagttcggtgatggttatgagcaggtatccggtgacggtatcaacgcccgcagccagaagtggtcactggaatttaccggtcgcggggagtacatcacggctatccgtcagtttatcgaccttcacggcggcataaaggcttttcagtggaaacccccgcttgaatctgtggggttataccggtgcgccgagcataaacttaccccgctcggcggtgacaactattcactttctctcacttttacccaggcatttaaaccatga

SEQ ID NO: 278706 - DNA, 450 bp, Morganella morganii
atggctgatatggggctggatttgtccggttttgctgaactgtcccgtgatctggaattactcagccgggctgaaaatacccgtgtgctgcgggaagcgacgaaagccgcagcggatatgctgcgggatgaggtccggcagagtgcaccccgcagaaccggcaggttagtgcgtaatatcgttaccggcggtcagcggagccgttataaaggtgaggttgtctcgggggtgtacatccggggaaccaacgccgcaggaaccaacagtgataacacactgaaaacggacgatccgcgtaatgcgttttactggcgctttctggaaaacggcacatcaaaaatggcaccacaaccctttatacgcccggcatttgacggtaaggcggatgaggccgcggatctggcgctgagcaaactcagtcaggctatcgataaggtactgagcggatga

SEQ ID NO: 278707 - DNA, 324 bp, Morganella morganii
atgcaggccgggagattaaggcaccgggtcacatttcagcgctctgagcgggtaacgttgccgtccgggcaacgtgaaaatcagtggcttcctgttgctgtaacctgggcagaagtcaaacccgtcagcggacgcgagcttatcaccgccggagcagaaatgtcagaaatcactgtccgtgtgtggatgcggtaccggccggatattcatcctgcatgccggatggtatatcgcggtcaggtctacgatattcaggccgtgatcccggatgtgaaatttacccggctggaactgctgtgtaaacagggggtgaaagatggctga

SEQ ID NO: 278708 - DNA, 303 bp, Morganella morganii
atgtcgttaccgacactcgaaaaactgagaatgcagtgccgtatcgatgaggataatgatcaggaagatgaattactcctgacctatcttcaggcggcaaaaaagcgggctgaaaattacattaaccgcaatttgtatgacagtaacattccggagagcgaccccgatggcctgattgtttctgctgatattgagctggcattgatggtctgtatcggcagtctctatgagtcacgggaaagcggagcaataccggcgggtttctacctgttgcttgacccgtacaggtttataaatttgtaa

SEQ ID NO: 278709 - DNA, 609 bp, Morganella morganii
atgagcagtaatgaaagagaaacccgcagctatgtcggagaggtacgggccgcgccgggcgaagaggacaagccgacccacattatcggcctggcctcggtgtttaattccctgtcagagccgatgtggggattccgtgaaattatcaaacccggcgcatttgacgatgtgctgaatgatgatgtgcgcgggctgtttaaccatgaccgcaattatatcctcggccggtcctcttccgggacgttatccctgagtgtcacagagcaggggctggtttatgacattaccgcgccggatacacagactatccgcgatctggttattgcccctatgctgcgcggggatgtcaatcagagttcattcgcgttcagtgtggcggtgaatggtgatgactggtaccaggatgatgacggcatggttgtccgggaaattcacaaaatatcccgtctgtatgatgtcagtccggtgacttatccggcttatcaggccgcgaattcaaccgtgcggtcaatggaagcgtggaaagaagcacgcgacagcggcggtttagccaaagctatcaatgaaaaactggcgcgtgagcgtcttcttacattaatgaatgcataa

SEQ ID NO: 278710 - DNA, 1224 bp, Morganella morganii
gtgcttcttgatgcattattccgcgatacaccgaccagtattgagaatccggcggtacccatcagtgcagattctgttgatacagacggtctgttcaaagccgatgtgtatgtcagcccggaaacctcgatgaaactggctgctgtatatgcctgtatttatgttctttcttcctcaatagcacaaatgccgctgcatgtgatgcgcaaaaccggcgataaggttgagactgcccgcgatcatcccgtgttccaccttgttcacgatgagccgaacgaatggcagaccagctataaatggcgggaaaccaaagagcgccacattctcggctggggaaacggctacacacaggtgatccgtaacagtcgcggtgaggtgaccaacctggaagcctgtatgccgtgggaaaccgcactgcttaacaccggcggccggtatacctacggagtttataacgaacagggtaattttgcggtcagcccggatgacatgatccatatccgggcgctgggtaataaccagcggatggggatcagcccgatagtgcagcatgcggaaaccatcggcatggggatgtccgggcagaaatacaccagttcattcttcggcggtaatgcccgcccggccggtattgtttcagttaagggggagctgcaggaaaaagggtgggaacgccttaaatcaatgtggcagaaagcgtctgcagcgctgcgcagtcaggaaaacaaaaccatgctgttaccggcggagctggattacaaagccctgaccgtttccccggtggatgctcagttaatcgatatgctgaagcttaaccgttctatgattgccggaatttttaatgtgccggcacatatgatcaatgacctggaaaaagcgactttttccaatatttccgaacaatccattcagtttgtccggcatacggtcatgccgtgggtggtgaactgggaacaggagcttaacagacggttgttcacccggcaggagcgccgcgccggattttatgcccggtttaatctggccgggctgttacgcggaaccccgaaagagcgtgctgaattttatcattacgccattactgacggctggatgagccggaatgaggcgcgggcatttgaggatatgaacccagttgacgggctggatgaaatgctggtcagcgttaacgccgcacaacctgtcggcagtaaatcaaaaggtggtgaaaaagatgagcagtaa

SEQ ID NO: 278711 - DNA, 162 bp, Morganella morganii
atgaaaaatatacttcttgacctcactgccctgacaggtttcggcgcggtgctggcaggctgttacctgaaatacggcctgccggattccctggtgattggtgggtcagcaatggttatctattcactggctgtggccatgagggggaaacgtgcttcttga

SEQ ID NO: 278712 - DNA, 1731 bp, Morganella morganii
atggcaaccgtagcagatgggatccggtacgccgagcaggtggttgccggagaaatagttacgggcgagctgatacacctggcgtgtcagcggtttcttgatgatttagagcgcggccctgagcgcgatatctttttcattgaagaacgcgcccagcatattctggatttttaccagtttgtcccgcacgtcaaaggggcgctggcaggtaagccgattgagctgatgccgtggcatacctttattctgattaatatctttggctttgtgatcccgctggttgatgaactcagcggagagactcagtacgacgatgacggcgatccggtactggttcgtcgtttccggacagcctataacgaagtggcgcgtaaaaacgctaaatccacactttcatccggcatcggcctgtatatgaccggtgctgatggtgaaggtggtgccgaggtttactcggctgccacaacccgtgaccaggcccgcatcgtgtttgaagatgcaaaaaacatgattaaaaaggccaaaggctcactcggccgcctgtttgaatttaataaactggcgatttaccaggagcggtctgcatccaaatttgaaccgctttccagtgatgcaaacaacctcgacggcctgaatattcactgcggcattgtggacgaacttcacgcccacaaaacccgtgatgtgtgggatgtgctggaaaccgggaccggtgcccgcctgcaatccctgctgtttgcgatcaccacagcgggatttaaccgcgaaggcatctgctacgaactgcgggattacgccatcaaggtactgcggggcgtagtggaggatgacacttttttcgcggccatttacacgctggataaagatgatgaaccgttcgatgagtctgtctggataaaggctaatccgggtctgggtgtctgcaaacgctttgatgatatgcgccgtctggcgaaaaaagccaaagagcagatagccgcccggcctaactttctgaccaaacacctcaatatgtgggttaacgcggagtcgatctggatggactcaggaaaatgggacaactgccctgaaaacgcgccggatgatgaactgaagaactaccctgtctggatcggtgttgacctggcaaataaaatcgacgtggccgcagcaattaaggtttatgaagatcctcgtgggcaggtgcatgttaagtgcaaattctggctgccggaagaccggatagaaactgcgccgaaccatattgcggagctgtaccggaaatgggcggccgccgggcatctggagctggctgatggtgaggttattgatcatgacatcatcaaagccgacattctggcatggtgcgaaggtgatgacctgcgtgagctcgggtttgacccgtggagcgcggtgcagttctcacgccgcctggcggaagaggggattccgctggtggaagtggcgcagacggtaaaaaacatgtctgaatccatgaaaacagttcaggccgatgtatattccggcaaatttcaccatgaccacaacccaatgatgtcctggatgatgtcgaatgtgaccgtaaaaccggacaaaaacgacaacattttcccgaacaaatcgacaccggaaaacaaaatcgacggaccggttgcgctgtttactgccaaatcgcgccagatggtgaacggcggtggtggttccgacttcctttcctctctggatcctgacgaagaaattctattcttatga

SEQ ID NO: 278713 - DNA, 471 bp, Morganella morganii
atgtcgggaccaccgaaaaccccgtcacacctgcgtttggtcaggggtaacccatcaaaacgcccgatcaataaaaaagaaccgaaaccgccgtcaggggtacccccaactccgaagcattttaccaagcaggggaaatactggtttaagcggatcggggaagaactcgatgccatgggcgtgatgagttcgatggatgccaaagcgctggagctgctgatcgaggcatacaccgaataccggcagcactgcgacaccctggacgaacagggctatacctacaccacggaaagcgaaggcggcacactgataaaagcacaccctgtggcggcaatgaaagccgatgcctggaaacgtatccgggcaatgctgggtgaattcggcatgacgcccgcgtcccgctcgaaggtaacgattaacacaccagccgaagaagaccctttcgaggcatttatgaaaaagcgcaaatga

SEQ ID NO: 278714 - DNA, 312 bp, Morganella morganii
atgattctgcataatgtgcttaaaactatatacatagacaatggcgacaatgattttttgaaatatgaaatcatgggggagcacggtggcaatgtaacaatagcgatcgtatcagcggaaattaagtcagcagttggcggaatagagtgttatctgtgggctaaagtcggagagctaacatttgagtaccttgatccgccaaagagaggatcattccagcagactgtagcaatggaatctccgccggggagaagtatcagcaccgtaatgcgggaatgcaaaaaacacagagctacctggcaaagaccgtaa

SEQ ID NO: 278715 - DNA, 141 bp, Morganella morganii
atgctgatcatcaacgcgatcattcttcttacggcctgcctgctggcgggctgttatctgtattcactcccgaatcactgtaagcctctgccgggtaacccgctggacggtgtgatccacgatgagtgtgaagcgccatga

SEQ ID NO: 278716 - DNA, 477 bp, Morganella morganii
atgaataagcgattggttaaaaaggtcatggctgcttgtactgccggggcaattgccggtgcgctggtgctgatccccgtatatgaaggtgttgagtatacgccttatcgtgatgtggccggagtgctcaccgtatgttatggccataccggcagtgatattcagcccggcaagctgtacacggacgctgaatgcaaggccctgttgcacgacgacctgacgaaagtccggcgcgcggttgatcctatgattaaagtgccgattgatgacaatacccgggcggccatctattcatttgtctataacgtcggccccggcgcgttctcgcgctccactatgctgcggaaactcaacgccggtgatatcgccggtgcgtgtgacgaaatgaagcgctggacattttccggtggtaagcggtggcagggtctgattaaccggcgcgagacggagaaagcgatatgtcacggaaccccataa

SEQ ID NO: 278717 - DNA, 291 bp, Morganella morganii
atgccgcagccacctcactttaacctgtttaaaacatataacccggttgcggcattacccctatcactcaacatacggaacactccgcagggggtggatatgcgcatgtctgacaaatattccagccctacagcatacgcctggggacttataacctctgcttttggcgttttatctctggaccagtgggctattgttgccgggatcatctgtactgtcggtacgttcctggtgaactggtattacaaacggaaggaatttcagctgaaagccggagaacatcatgaataa

SEQ ID NO: 278718 - DNA, 213 bp, Morganella morganii
atgtctaatacaatgactggttcagtaaaatggtttaacgatgataaaggttttggcttcattactcctaaagatggtagtaaggatgtttttgttcatttttctgcaattcagagtgataacttcaaatccttaatcgaaggtcaggaggtatcatttaccatggaaaacggaatgaaaggtcctgccgctggtaatgtggtggcgctttaa

SEQ ID NO: 278719 - DNA, 438 bp, Morganella morganii
atgagcaatattcagatgatattagaacgctggggggcatgggttgcggataacccggaatctgtaacctggtcatcaattgccgccgggtttaaagggcttatccccgtaaaggttaagagtcgtcagcaatgtactgataatgatgcactggtgatatccggcattatggcaaaactaaacatccgcaacagcgatatgcatgatctgctttttgattactatgttttcggtaagacgtttattcagttggccaagaaatacgggtgctcagacactcacatagggaaaaaactccagaaggcagaagggctggtagaaggaatgctcataatgggagatataaaactggaaatggacggtacatcacatcgtggaggtatgcggacatttatgaacaaattacatgatttaaaaattaatactttacgatcgtaa

SEQ ID NO: 278720 - DNA, 792 bp, Morganella morganii
atgagcaatctgattattgttgacggtattaatgtgcgccgggacatggccggtcgctattgcctgaatgatttacaccgtgccgccgggggtgaagagcgccataagccatctaactttatgcggatggaatcagcacaggcattgtgttcggaaattgaccgatgctcagatatgagcatcgcctctgtaaacaccattcgcggcggtacggagcaggggacatatgttgcccgtgaggttgtttatgcctatgccatgtggataagcccgctgttcaacctgaaagtaatccgcacgtttgatgcggtggccggaacacagcaggcggtacagctggccgataaggtacaggcaggcgctatcctgctggagtctatggcgaaaacgctgaatctgtcgaattcctcaaaactgggcgggtatcagaagctgcaaaaaatggccggtcttccggatctggctccctcctatgcaattgatgcaccggcgggcgcggtggatggttccagcagaccgacaacatccctgactacgctgctgaaaaatcacaatgccgcattgtctgcgaccagagcatacaaacgccttgctgagctggggattgtcgaacagaaagcccgtccggggtcgaagggaacacaaaaactgttctggtctgttacatcaaaggggcttctgtacggtaaaaatatcacatctccggcgaacccgagggaaacgcagccgcatttctttgagagcaaatcagcggaactgctggcactgatgatgactccggcggtggcctga

SEQ ID NO: 278721 - DNA, 456 bp, Morganella morganii
atgaagaatgaatcactgaaagaagtcgtcagagagatgtgtagcgctactaatggtgggcgtgaagttatggccggtgcgcttggtatgtctgccacgtcgttcaataaccgattttatgagaagaacggctgccggttctttgatcaccacgacctgatgacgatgcaggaagtctccgggacgaaactgtatgccgaatatgttgcaacagaatctgaaatgctgctggtggaaagaatcaatccggatgatctggatgagcccgaattatttcgcctgcatagcaaggtagcggctaatcagggagcactggctgtgtttatggataaatcactggaggacggacaggtagacagtgaagaagaaaagcaactgaagaaactgttggatcggactgtagcgacaggaaggacatttatctatgcattcattaagtaccacaagaaagggtga

SEQ ID NO: 278722 - DNA, 327 bp, Morganella morganii
atgacaactgaaaatgaaaaaagcagccaggtggtagtcgttgacccagctgatatgacaggcattgagttatatgaccatttatcaaagcggttttacccgctagttcggttccaccagagtgcaggttttgttaatacttatgttagacaacttgagaaccaggtggcagaaacactttatgcggctattcctgctttagaagtggccagccagtacccagagtccagccttcaaaaggatctatctctaaattaccgaaagctgttggctctgcaagattttttaagtagctttgagccgtttccggaagtaaagcctcgctga

SEQ ID NO: 278723 - DNA, 363 bp, Morganella morganii
atgagcgaaaataaccgcatgaccagtgtaccggactttctctccgagttagacgccggtgtgtttgaaaacaaactttctgctgcactgaatgaagtcgctttcggtaccaataagaacggcggaaccggtgaagtgcatgtgatttttaaattcactcagtcagatgaagaccgggtgaagatatctcacaaactgaaaatggttaccccgaccaagcgcggtaaaaaatcggaagaggatacaaccgaaacaccgatgtgggtcggtaaaggcggaaaactgactattctgccggaagaccaggggcagttatttggtattgacggcagtatcgacgggaaattaaaagccattaattaa

SEQ ID NO: 278724 - DNA, 228 bp, Morganella morganii
atgtctgaacaagaaaaaacaaaaattaaaattagtgttaccgtgacattaggtaagccaccagccattaatatagatgtgcagagagaatttcatgtcaatgaagatcaaccgctcacaaaatatttcttagaaagagttagtgaatatatttccggcaaagaagtaacgacaaatgcaataacaaaagccgcacaagatactctggtaaaaagaaatatacactaa

SEQ ID NO: 278725 - DNA, 228 bp, Morganella morganii
atggcaaggacgattgaacgttcatctcagtttaaaaaagattataaacgggaagttaagggtatttaccgtatgatgttaaatgacagtctacagaacatcctgaatatattggtaaatgatctccctatacctgaaaaatacgctgatcatccgcttaaaggaaattggcgtacatttcgtgattgccacctctatcctgatttgattttgatttataaaaaataa

SEQ ID NO: 278726 - DNA, 273 bp, Morganella morganii
gtggaatatgtcagagcaaaaattgatccgaagctgaaagcagaagcgattgaaacgcttgaatcgatgggcttaacagtgagtgacgcgataagaatgttgatgattcagattgttgaacagaaagcgatgccattttgtgtgaaaagtacacaatatcgtcatgctgcacgtatccgggccgcaatagaagagttggagtgcgggaaaggcaaaaaatttgacagtatttcagatttaatggcggatctgcaggatggcaaggacgattga

SEQ ID NO: 278727 - DNA, 1689 bp, Morganella morganii
ttgaccaaactgctgacattattacgccgcatattattatcagggctgtttttttgcccgacattatatgccgcacctttccctgctgctgcggaaaatccgggcgctgatgcctcgcgccgggcgatgcaggatgccggacagcaggtcagtgatctgctggaacagcagacttaccggcaactgagcaagccgcagacaacgatcacccccacagagccgttactgcgtgcggcagagaatgaacactgtctgccggtcagcggcgtgtatctctccggtatcacactgttatctcaggacgacctacgctcactttcgccattgcccgcagactgtatccgcagccgtgacattaatgtgctggtggcggaactgatggagcggtatctggataaaggctatatcaccgcccggatccgctttctgccggtcaacgattatcacgagctggggatcggcgtgacggaaggaaccgtggagcggatcgacagcacggatcgcggtgttaataccgctctgctgtttcccgctctgaccggcaaaccgctgaaaatcaccgaactggagcaggggctggatcaggcaaaccgcctgaaatccaaccatgtcactatggatattctacccggcagcgcaccgggaggatcggtgatccggctggttaatcagcgcggcactccggccgggttttctatcagtgcagataattacgggcagaaaagtaccggacgcaatgttatccgcgccgcagtcaccgcagacagcccggcaggattatctgattttgtcagcctgagcggctccgccacaaccgataatccggcggcgcgttacagccgctctggcatgctgttttactccgtgccttacggcgcactgacgatcagcacttacggcagtctttcccgttaccgcatcactcaggcgctgcgctataaccacgtcattcttagcggggacagcgctcaggccgcactgcgggcggattatgtcatcttccgtaaccgctcacggattgattccctgatggcgcagatgacttacaaacgcagccgcaactacctcaatgacacactgattggcgtcagcagcccgtccctgagtatcgccgaagccggttacaccgggctgattctggtaccgggcggtgttatcagcacctctttatcagcggagaagggcaccacactgttcggggcagctacccggaacaccatgccgggctcggatccgcaatacaccaaaggcaaattctcactcagttatattcagcagttttcgctgtcggaagacgcgtatctgttcagcagtcatctggccggtcagtacacacaggatcacctccccgggggggagtggctgacactgtcggataacagtgcgatcagagggtttcacgacggctcgttatcggcggataagggatggtactggcaaaacaccctttcccgccgttttgtccggcaggggatcacggtaacaccccgcgccggtgcggactacggacgggttatggctcagaccgggcaggcgggatggcagtctgccgcgggtatcgccgcaggggttaatgtcagttacggcgacgcacagctggatgcgcaaatcagccgcgcccggacctctgtggcggcactgcccgcacaggacaccctgttttccctgcgcctgggatatcagttctga

SEQ ID NO: 278728 - DNA, 213 bp, Morganella morganii
atgaatactgtaaaaacactgattactgcttctgctctgacactgttttccttcgcggcttctgccgaaccggtctctgtcaccagtgacacactgacatccgctgaagcaaaaattgctgcaaaagcacaggaaagcggtgcttccggctataccattaccagtgcccgtacaacagataatgtgattatgacggcagaactgcacaaataa

SEQ ID NO: 278729 - DNA, 813 bp, Morganella morganii
atgggaccaatacagggacatcaggcgattcagaccctgaacaatgatatttacggttcagcgggcagtaacagctcatcatcgtatgtcagttcatccgggattaaatccgttttattaaatgcatggaatgccgttaaatccgctgtttccggtatgttgtcatcatttggtctgcatctcagcggacagcagggcagtgataaaccgggcagagaaattgtgatggatatgtcttcacggccggcgcagccgttaccggttgatattcagtttgataatgatatttatgagagcagtggcgggaatgtttatgattcggtttcatcaccgggacagggttcactgagttcgtcattatcggcatttgaatcagagaatctgtatgaggaaatcggtaccggtcagatacacactctgcctgagattccgccgccggtaaatctttcgacccatccgtcattatctgcatcggagtcagagcatctgtatgaggaaatcggtgctggtcagatacacactctgcctgagactccgccgccggtaaatctttcgacccatccgtcattatctgcatcggagtcagagcatctgtatgaggaaatcggtgctggtcagatacacactctgcctgagactccgccgccggtaaatctttcgacccatccgtcattatctgcatcggagtcagagcatctgtatgaggaaatcggtgctggtcagatacacactctgcctgagactccgccgccggtgaatctttcaacccatccgtcattatcgcggttacccggccctgatgacgatatttag

SEQ ID NO: 278730 - DNA, 123 bp, Morganella morganii
atgagagagaaacattggagcaacactactcttcagggcaactatacgggaagcgtcatttctgttttatcggaagatattaaacctcatagcctgcaaaataacgaggtaatgtatgcatga

SEQ ID NO: 278731 - DNA, 534 bp, Morganella morganii
atgaacaactcatggtggcaggagtttgttaagtttttcctgcgaggaattacgcttaataggttggtttatatggtttttatcttgatactgttggttatatttacaccagacaaagccaaggaagcagttaatgcccataatccagaggtgcttccggattactggatgtattacatattactattttgctgtagttatattatttcagcagcagcaggatcaacgattgagtttttaaagaaaagagtagtgtcattcgtagcttatcaaagagataaaaatgaaagagataacatattcgcttctctttcaagcgatgaatttgactttatctatctattctttgaacgaggcgaaccgttatctgatttcaatagaaactcacctgcaataaataaacttgtaagtaagaagatatttaatttttggatgccaaatgcatacaataaaaatcttgccacctatagcttaaatacaaaatataaagctatgttttatgactggtatttaaagaaaaaagctctagagtaa

SEQ ID NO: 278732 - DNA, 165 bp, Morganella morganii
atgaacgcatacacggtacaggatgctcaggaagagcggcaacggattgccgaacagcgcaggaagcgcgaacaggaagaaagggatgcttactggtttcgtgaaagtgtcggattgccaaacggacgggtaccgacagaatttttaagcggagaattcacatga

SEQ ID NO: 278733 - DNA, 363 bp, Morganella morganii
atgatggaatatccacgtcgcatagggaaatgcgcaggatccggcgggacgtatgaggaaaattatcaacgcgccctgaaatcagcaattgagcaaatggatttgcaacggcggggaaagccaaccggggaaccatcactgtcagagcaacggattgccgagacactttacaacatcagtcgtatcaccgccctccgctatcctcctctacctgaaaacatcaaagcagcacggaatgcagctgaagctaaggtgtggagagaatggaaaactaaacatggaaaagctaccggtgtcgatggtgtcgattattacggcggcgggcgtactgaatcacgcctcggccagagattgggagattaa

SEQ ID NO: 278734 - DNA, 615 bp, Morganella morganii
atgtctgaagtctataaggcaataagtgccgtagccaaggaattggctgagacaggcatcaaaaaagggagcaggaattcacaacaggggtttatgttcaggggtatcgacgctgtatataacgcccttgccccagcgctggttaagcatggcctgattatccttcctcgcattatggagcgttctgtcacggagcgacagacacaaaaaggcggcaccttattttatgtcgtggtgaaagctgagtttgattttattgccacggaagacggcagcaaacacacagtgaccacctttggtgaagctatggatagcggggacaaggcaaccaacaaagcaatgtcaatcgcctataaatacgcagccttccaagcgttctgtattcccaccgaagaaactgcaattgatgctgacgcagaggttcacgatgttgccccgcgcagccacacgcagattctgagtgactataccgaatttcttaatgtcacaagtgacacaaagacgattgaggctgaatacaggaaagtgtggcaaatgctgaacggcagcggcaagcaggatgagtgtaaacgactcaccggcatcaggatcaacgaacttaaacaggcggcataa

SEQ ID NO: 278735 - DNA, 402 bp, Morganella morganii
atggcaattaacgtgattactgtaagcggcaatatcggaaaggattgtgtgcaacgatggactccagcagggaaagccgttgcatcgttcagcctgccggttaaacagggatatggcgagcacgaaaagacatcgtgggttatctgcaaaatgttcggcgcaaaagccgaaaaattaccggaacacctgaaaaaaggaatgaaggtgacggttactggcgagttcatcacggaggaatggacaggtcaggatggcaataaacgatcagcaccggtgattatcgtgaaccagttggatttcagcggcaatcaggcgggaagccagaagcaacagcaacggacacagcaaccaccagcacagaatgatccgccaatggattttgacgacgacattccgttttaa

SEQ ID NO: 278736 - DNA, 267 bp, Morganella morganii
atgtcgcggccaatcgacttaatagcagatatcacggatgagtatatcgctaagcattctgaagtgacaaactacagccacatcaactatcgtgacatcgttgacaaagggtgcctgaatgccatggttggatatcacaacggatataccacgcagtgcatactgataaatatggggctgaccacagagaagctacggctgacgaaacgcggtcgtgaatttctgttctggcattttaactatcagccggttaatgggcggaaatag

SEQ ID NO: 278737 - DNA, 201 bp, Morganella morganii
atgaaaatcacagacgaagatattcaggcagcaattttaagctcaagcgaggactttctatttcaggtgtgcgattcaattgtgttttcccattacggacaaaatgaaatgccaacggaagaacaagaccgactttatgctgcgctgtattcatggcttaaaaaaacggccggtgaattcaagcagattcaggaggggtga

SEQ ID NO: 278738 - DNA, 210 bp, Morganella morganii
atgcgtatgctgcattttacacatagtttaaatcattatggaaatagcgacaggcgaaataacgatgacaatcataaccaccatcagaatgtgaaaaatagatttaatgcaagcaccaaatttaaaaaatgggactacagcttttgtttttttacaatcttcaagtgggttaatcatttcatgttcataattgtgataacaatcaaataa

SEQ ID NO: 278739 - DNA, 393 bp, Morganella morganii
gtgaaaatacaaggcagattaatcagtagccagcgctatcttgacgataatatcgttatggataaagcactgcgatttaaggtttttattgttgacatcattccggtcattctgcgtggcaagcaatacaccctgttatgtaatggtcatcataattatgctgctgcaaagttaatcgggactgaaccgcaatacagaacacccaagaaattagccaaagtatttaaccaatactcgcagagtgaaaaagaaacctttgtcattaataacctgaccgatagcgatttatatgatgtcgatacaggtgaggtcatacaagagttacttatgcctgacatgaataacggagtattccaaaacaaattaacaaaaggattgcggctttatcaatga

SEQ ID NO: 278740 - DNA, 600 bp, Morganella morganii
gtgaaaaaatataaattaatactcgcagacccagcctggcaatatagcaacaaaatatccaatggcgcagcagataatcactacaacaccaccgatttttattccctcacccgcttacccatcgaaaaaatagcctccgataactccgtactctgcatgtggtacacgggtaactttgtccgcgaggcttacgaactggctgaagcgtggggatttaaagtacggaccggcttcgggttcgtgtgggtgaagttgaacaaaaacgcaggggatcggatagataaacatccgccggaggatttctttgatttcatggagttattgaacgaagagacgcggatcaatggcggcaactatacccgcgctaatgcagaggcatgcctgattgctaccagaggacggggacttgagcgccggtcggccagcgtcaggcagatagtgtattcctgcctcggtgagcacagcgagaaaccgaaggaagtacatcaccgcctggaagagttatatggtgatgttccgcgcattgagctgtttgccagggagaaatacggtgaatgggatgtgtacggggatcaggtggacggaagcgttaagttatga

SEQ ID NO: 278741 - DNA, 1065 bp, Morganella morganii
atggcaaggaagcgaaacagggaaagacgagacctgccaccaaacctatatgtccgaaataacggatactacagttacagagacccaaggacgggtaaagaatacggccttggaagaatcaagcgagacgcagtaaatcaggcaatagacgccaacatgcaattaatggatatgaaatacgtgaaattagctgaaagaatagcgaattcggatgtcattttatttcatgactggttggggcattataataaaattattttgtctcgtggattaaaaccaaaatcaatcagagagtatgaaaataaaatcagaacgataaaatcaatcatagataatattcctattgataaaatcacaactaaagatatagcaactgtcatttcctcatatacagaaagaggtaaaaatacaactgcaaaattaataagaatatctttgctggatatattcagagaggccattgccgaaggccacatatcatttaaccctgtggagcccaccagaaacccacgaaccgaagttaaacgttcacgactatcatttaatgactatctgaaaatactggaatctgccaaaacatttcagccatggatgccgctgagtatggagctggcactactgacaggtcagagaatcagtgatatatgcaaaatgaaatggactgacatcaaagaagggatgctatgggttcagcaacaaaaatcagggaataaacttgctatagacatgacggtatcgcttgaatgccttggtgtatcactggaagatgtgattaagaaatgttattccgtatatggcggatgtgataacctaatagcttcatctttcaggaaagaaataacggccacaaccgtttccagagggttcgtgaaagccagggaagccacctcaattaactggggaaacaacccaccaagttttcacgaaatcaggagccttgcagccaggctgtataccgatgaaaaaggtggtgagttcgctcagcgcctgttgggtcataaatctgccatgatgacggctaaataccaggacaatcgtggcagtgaatgggttaaagtgctgtaa

SEQ ID NO: 278742 - DNA, 681 bp, Morganella morganii
atggctgtcaaaactccccgaatccgtacgaccgaaaaaaaacattcacacccggcggcacagcgccatctgaataagcctgtccgtcagcgcggtccgcgtaaaatggttttgtttaacaagccgtttgatgtactgccgcaatttaccggtgaacccgggcagaatacgctgaaggattatattccgatcaaagatatttatgccgccggtcgtctggatcgcgacagcgaaggtttattaatcctgacgaatgacggcgtgttgcaggctcggctgacacagcctgatcataaagcagagaaagtgtattacgctcaggtggaagggataccggacgaggatgcgctgaatcagttacgtaacggtatcactctgaatgatggcccgacccgccctgccggtgctgagctggtggatgagccggagtggctgtggccgcgtaatccgcctatccgcgagcggaaatcggtaccggtcagttggctgaaactgacactgcgggaaggccgtaaccgccaggtacgccggatgaccgcccataccggccacccgaccctgcgtctgatccgcgtgcggattggtgattttgcccttgatacccttgcccccggcgaatggagagaagtgaatgatattcagacctcatgtgacagtggcctgcctggtcagcgccggtga

SEQ ID NO: 278743 - DNA, 453 bp, Morganella morganii; identical to SEQ ID NO: 13881

SEQ ID NO: 278744 - DNA, 726 bp, Morganella morganii
atggcaaactatgtatcagggaatatcatttctcaatcgtatgttcatgttaatcctgagtggttaaaaaatgcgacccctcaagataagaaactaagaatcaatgagattgagaagcaaataactgcctttgcgaagagccgaatacctttttttattggaagtgaggtagagataacagttgagttctctgaaggctcaatcatcgcgaaaatcaccgcttacggtaagatcatcccactactgggggggctagttatcggatacccacactttagtgagggtgttagaaccatggtgaaagatgcacatgatctaggttcgtatattaactccgagctgttatttcaaacaggcgcaaaacataaatctgagcgcaagtcagttgaggctcgcttaggagtttttggtattattgatcgcgttaacgcccagattaatgatctaagcttgatctctcggaggaaggaaaattcgccatcaatcacatataaaaaattgttacagttgcatggggatatcctctcatcccttgataagatttctgaaaatgccctagatgactcagatgaaaaaatagccaaggatatgtggattgaaggcgtatccggcatatctgtgggacgatcgcatttcaaatttaatcttaaaggtgatgatgatgtgtacaaaatgttggttgccgaaaagcagagcattcttgatgacctgaaaaaaaggcaatag

SEQ ID NO: 278745 - DNA, 1224 bp, Morganella morganii
atgacaaaaatatttaaaatcccctttgcaacacagggggatcgcactgccgtgcctgatgaagtacaggcagacggctcattgtcttacactcagggctacggttacgattatgaacgtgaccaggcgaccgatccggcggccaaagatattgaacgcgagaagatgaacagtatcttccatgatattaccggtgcggtcggggaaatacaggcgttcggtatgccggtgtgggcggaagaaggtaagccctatgctatccgcagtatcgtgtatcacaataaaaaagcctggcagtcaaagattgaaaataataataccgaaccggctgccggtaccgcatggacggaactgaaagctgacctgaccgccggggaggtcggagcctacaccaaaggggagagtgaccagaaatttcagccgctgggtaattacctgcccgccggttacagttattcgaaagctgaatctgacaccaatttccagccgaaaggcaactatgccccggcgggtaactacgccctgaaaggtgacagctacaccaaagcagagggggatcaacggtatcagatgaagggcagttatgcacccgccggggattatgccgtaaaaggtgaaagctataccagaacagaatctgataataaatatcaaccgaaaggaagttatcaggcggcgggttacagttattcgaaagctgaatctgacaccaattttcagccgaaaggcaactacgccccggcgggaaactacgcggtaaaaggcgagagttacaccaaagctgagggggatcagcggtatcaaccaaagggaagctatcaggcggctggttacagctattcaaaagctgaatctgataataaatatcaaccgaaaggaagttatcaggcgtcgggttacagttattcaaaagccgaaagtgatggacgttatgagaaaaaaggagcagcgaaaggctggcgatgggttgggggcgccggaaatgccagcagctcgatatccatgtcagaagatgtcagaggtaagcaactctatttccagttgacaggatccggcgggattcactggaccacagtatgcatgccaccggttgacaatattggaactcagtttcaccagggcaataccggatatggtattgtatgcacacaaaatgcaggaaggacattgaagtcagtaggtggtcaattcatggagtggtcatctgtttatgtagcggactaa

SEQ ID NO: 278746 - DNA, 720 bp, Morganella morganii
atgcagttacttcgaaacttatccatccggttcgtcatgctgtcgatactcggtattttgtgtctgacactcggatgtgtcagtttttacagtgactggtcactgtcgagagtgtctgacggcaatgcgaccgatcgtcagctagtccggcagctgacggtactgaatcagggaaatgaccagtatttccggtttatttcccggctgaaccgcgaaatgcagaaaaaagcggaaggggaagaaccggatttaaaaccgtctgcggaagcgatggagaatatggggctgcacctggcggagatgaaacggatttccccgggaccgatggatgtgcagatgtcagaaaaggtgattgcccgctggcaggcactctatgatgagggggttaaaatccagatgcagctggcggagcagggggatcaggcgggttaccgtaagcagtcccatgatgtcacaccgcagctgagcaaagaatttggtgctgccagccttgaatttacacaggtggcggagacgcggatcgaacagacccgtaccctggtggacggcctgatgaccaccacacggattgtgattatcagcggcacactgtttggtctgctgatcctgatttttgctgaccgctatctggtgaagatgatgcagcgcccgctgaacaatgtccgtcagcatttccgccgtattgccggggggggacctcagccagccggtggaaagtga

SEQ ID NO: 278747 - DNA, 2175 bp, Morganella morganii
atgaacaagaaaaaatgtgcggtcagtgagctgctcagcggcatgccggatctcccgtttgaaacggtttctctcagtgagtgtgatttcacggcggtgtctgtgtgtctggtggcaccggcagataccggcaacggccagctggcgcggatccggcaacagggcttcggccagccggtttttatggtgctcagcggcggtgacgcagaggcgctgccggatggtatcagcggagttatcgatctctgccgcgatgacagccgtacggtcggtgacacacttctgcgtgcggcacaatcctgtgaagagagtctgctgccgccgtttttcgggcggatgaaacattataccgcgcagcagaatatctcctttgcctgtcccggccatcagggcggggagtttttccgccgtcatcccgccgggcagcagtttaccgactatttcggcgatgcattgttccgggctgatctctgcaatgcagataccgcgctgggggatctcctgatccacgaaggggcggcgctggccgcgcaacagcatgccgcgaaagtctttcatgctgataagacttggtttgtgctcaacggcacgtcgtcatccaacaaagtggtgctgaatgctctgctgacaccgggtgatctggtgttattcgatcgtaataaccacaaatccaaccatcacggtgcactgatccaggccggtgccacaccggtttatctggaggcggcgcgtaacccgttcggttttatcggcggcattgacgcacactgttttgatgaggattacctgcgggcactggcggcggaagccgcaccggaaaaagcgggcgacaaacgtccgttccggctggcggtgatccagctggggacgtatgacggcacggtgtataacgcccgtcaggtggtggacagcatcggcccgctgtgtgattacattttgtttgattccgcgtgggtcggctatgagcagtttatcccggtgatgcagatgtgttcaccgatgctgctggaactgaatgaaaacgaccccggcattctggtcacgcaatctgttcacaaacagatggccgggttctctcaggcgtctcagatccacaaaaaagataaacatatcaaaggtcaggcgcgttatgtctctttccggcagatgaataacgcttttatgatgcatgcctccaccagcccgttttatccgctgtttgccgcactggatgtgaacgcgaaaatgcatgagggcgaacccggacggcgtctgtgggcggaatgtgtcagaacggggattgaagcccgtaaactgctgctgcggacgtgtcagcatatccgtccctttatccccgctaccgtggacggccgtccgtgggaagaggcggaaaccggtgttatcgctgcagaccggcgttttttcaattttgtaccgggcgagcgctggcacggttttgagggttatgcggacgatcagtattttgtcgatccctgcaaattattgctgaccacccccggggtggatgtcagcagtggagagtatgaggattttggcgttccggcgacgattctggcgtattatctgcgtgaaaatcagattatcgcggaaaaatgtgacctgaattccatcctgtttttactgactccggcagaaacgccggaaaaaatgcagcggctgatccggcagattgcccggtttgagcagctgctggacagcgatgcggcactggaaatcgtcctgccgtcactgtgccgcacgtatccggcgcgttatgcgggatatacactgcggcagttgtgtcaggaaatgcacaatctgtttgtgaaacataatgttaaacagcgccagaaagagatgttccgccgccgctgttttcctgcagtacggatgtcgccgaaagcggcacatactgaatttgtccgcggcaatacagagcgggtggcggtgtcagagatagccggacgtatcgcggcggaaggggctctgccgtatccgccgggtgttttgtgtgtggtgccgggagaagtctgggaagccccggttcagcgctatttcctcgcgctggaagagactgccgaccgctttccgggcttcgcaccggaattgcagggggcgtatattgagcaggatgacagcggacaccagcgtgtgtatgcctgcgttatccgtcatcagcagggagaaggacaatga

SEQ ID NO: 278748 - DNA, 1143 bp, Morganella morganii
atggaaaatggactaattactttttttgatgttgacgagtgtggattctacagaagtcaaaaattaggtaattcaaatcaacgaacctctgtacatgtaaagggggatctaagggaggttttagataaagtcgttgaatgggccaagccaagagacctctataatactctccctttcgattcagattcacacccaaatcgtcctcacatttacttaaaagactgtgcaatctcagctgaaaatggcgatcacctaattatttattgtaaagcattctctaatgatgagggtaagctaagtggttttgtccatgatgcaaaggttggaagcgctagtggtgatgtaattcaaattgataaaaaagcggaagggaagaaacttatctatggagctccaatgtacttttggtatatcccagaaagaaatctaatcgcctcaattaaattccctcattcaattgtaaacactgatgacatgtgttggtatataaaaagatgcattgaaaattttatccctgatgataataaagttgtacataattcaactcaatttaaccattttgctcagaaaaatattgatcgtaaaaatgtaacgtacaagtcaccttgtggaaaatacgctaccaaattttcatttaaagcaaaaatgaaagagttaactattgatgatatttctcctgataatttagctcctttcattacccacttggtaatcagagagactatttcctcaggaaaaaaaatagaagaaaattcactactgtctctgtggaataaagtaaataaaaaacgagcatcaacaaagcaaaaaaaatatgtggagattattgaagcggctactattactgctgatgaattacggggtattctcagcatatatagtgaagaaaatgataataatagttcaactggagacataatttggaatgatattgggttccggacaaatgatgaagaaacgacaaaatggtttagcagttatgttgaccgaagaaatatctcattagatcctactcaaaaaatagataacagttatttttcagcaaaaacaatcatggacactatacaagatgtccgtagttcgttattaaacttctcaaagactggagcagctgaacgatacagtcaaaagtatgggagctaa

SEQ ID NO: 278749 - DNA, 516 bp, Morganella morganii
atgaggctacaagatatacttcttcagataatatgcctatcaataagtgtctttatagcttacttaggtagagagtttgtaactcttgcggatttaaaaaatttaacaagcaccttacaaaatatttccgcagcagtatttacactagctggaatttggattgcttatagctatccagaagcaattgcccgatttacgaatcctgataagtttagtttaataaaaggcactgaacaaacaaaaagaataagaagtctagtcttgacgatattttcatctgcattggttttagtaggaattattttatttaatttagccactccataccttcagtatatacttaaagattatgattcatatatatatgtcaaaatttcagggatttcttttattaattacttagtctgcattcagttgcatgcaatcattagaataatgaacaataatcttgaatttatatacagcttaatgaaagtaaaagctgaaaatgaagctaatgatgatctgagtaaataa

SEQ ID NO: 278750 - DNA, 468 bp, Morganella morganii
atgtattggtctatgtttttaggccaaagcgttgtgttatttaaatggttccctccgtggactatttccgtcatttttgctgctgtcatgggaataatcggcggaatttggagtatttggtatcgcccgataaaacaggcatttaaaagttttctctggagcggatcctttggcctgatattaattgtccctgtattcgatgtgatggcgtatttactgacaaacaaaaccattcactatcagactgaatatgaaattacatcaccgggtcctgccaccagcagatttggccggtgcaaacacggcatatggataaaagaagtctatacggaacggtggaaattactttgcatcaataatgcaaaactggcgactcagaaaggcacagatacggtttgggtgacaacaaaaactggtcttattgggtcatatatagttgattaccagttttctcctttcagcccttag

SEQ ID NO: 278751 - DNA, 807 bp, Morganella morganii
atgtccgtttattttgtgatttctgtactgattatttttctgattatcctgctgattatattaatgattaccaacaaaattgtgatcagccggaagaaaatagtttatctgtcactgattgcgctgttttttgcattttttattaaaagtgcggtggtggaaaaaaatgaacagataaaaactcaggttcttgagatggtaccgacactaaaagccatcaatcaggttgatcccgttatgtccggggccttttttgccgatttcagaaatgcgggtaagggttcgaaaaaacgggaagagtattatatgcgcctgcagcagtgggccaccgaaaatattaaaaaactgctttatctcgcgggggatgacgcggtgattaattacgggaaaatgcggctggaatttttgcagaaagcactggcgcaggatacctccggtgacttctgctttcgtgtactgcatccggaagtatcaggcccgccggatatgaaaaaggcttcagccgggtaccgtgactttattatcggtaacagagcgttgctggatctggtgaattcagccggtgaaggggctccggttgcacattattctgcggatgaaattcagtcattattttcggcacaaatacagggggcggtggataaatacggcgatagtttcctgacggatgatccgtatgtactggcggaagacaagctgcaaacctgtcagatggaaattgatttaatggcggatgtgctgagagcaccgccccgtgaatccgcagaactgatccgctatgtgtttgcggatgactggccggaataa

SEQ ID NO: 278752 - DNA, 738 bp, Morganella morganii
ttgggcattgatatttcagcagataaaagggttagctttaatcctgatcatgaacacagagtcatcaccgccacaggaaaaaacccgaaaataacagctataggtaatgctgaaaagataaccgtttacagtatttaccggcgaactaaatttggtgacactgaccgtgacggaaacccgttaatatattcattaaaaggtatttataactacaggatcacaaacgaagaactctgtaagttcaaaccttcttttaccactatcctgaataaaataaggcaaagaataccggaaaaaccgtgtgccttatttgcaatgccatcatcatcaaatgtttcctgcatcctcgccagaagaatttcccgcctgtttggtataacaatgcatactcatttcgttatcaaacggactgcccgtgatgtacttgcatactatgatacgacttccccggatattgcagactcccacaaaaaaatggttttcagaatattagctgaactgagaaaatcagcccctaatactgttttttcgatgaagcatgttcccaataaaataagacactattttccgccatggaaattaaatccggactttaattatacaattgacaacaatcgcgttgtcattttagttgatgacctgttatcaaccggcacaacactgatatcagcctccgcagaactccggaatgccggtctttcctgtactacagctatctgtttactgagtaatttatag

SEQ ID NO: 278753 - DNA, 228 bp, Morganella morganii
atgacaatcgattgccttctcaatttaataatcccggttatcacattgatagccgtgtatcaccgtatatttcaccggaaccggcagcccgggagcccggcccccctgctcctcattgcggacacgcgccagaaactcaccgacagccggttcatcatagtctcccggccactgatactgttcatacccgttgttattaaactgaaaccggggtttcaggagaactga

SEQ ID NO: 278754 - DNA, 921 bp, Morganella morganii
atgagcgatgatattttaagagtggctcaatcattcaaagagcaaaccagaggtctatctcaagaagagagtatggctcactttgaaaaacaaaaagagcaatatgagcgagagtataacgaatttcttgaatattacagaagagaaaagtgttatttatgtgggaagtcgataaagactattagtaaggagaatccctgtttacactggcttctcagaaagtgtaaattcaagaaaaaagactttccaaaaatcactgaacgctatgatttctatcatatttcttcttatttacgttgggttgcccatgcggaaagtggtgttaaaaatataaataacttaaaagaggaaagtagtgataggaaagtatttgaaaccaccattaagtggcaaaatattgagtggacactagattgttcaaaaaatgattttgcaggtcatgagggcagtaaaactgattttcctcattggcatttccagatgcgagtagatgggaatcaattcataaactttaatgatttccatatcaagttttcgaaagacgatcagctaaaaattgtactagaaaatgaccctgattcaggtttctatcatacttttggtccgggaggtgaggggatgcaggaacacatggacagaatggcagaggatccagacgagtttatagctaatgcaatgacagctgagaatcctgatgatggaacagtacatatgcagtcaattattactgccccagaaggtggtatttctggtgaaaaaataaatgaagcgcttgaaatggcaagaactactggtaaaacgcttgcacattgctttagagaagtcttagcgaaagacgaaggggtttctgtttcaacaatagcgagtcctgctgaaagtgttcctgaaattgctaaacgaactgagagaaaacgaagataa

SEQ ID NO: 278755 - DNA, 2697 bp, Morganella morganii
atgcattcaaaagacgaagccgaaaacaatgatttgatagtcaaagccatatctcgcggcataatcgaaattaaatctaatcggattacatataacgtaaaacaaaagaaaagctacgcgtggactgatccagaagaatgggttcgagctttttgcatcagtcaactaatacttgaaaagggatatccctctaacagaattaagatagaggtaaaagttccaaggcgaacccctaatgattgggcagatatcgttgtttttaaggatgacgcatgcaaagagccttaccttgtaattgaatgcaaatcagctaaccaaaacaaaactggaaaagcacaaggaattgagcagctatttggtaatgcaaattcgctgagagctgaatacggattatacgaagagtatgcagattcagttttttatgacgttgcaaattatccggctgaagaaagaacggagaatgtaaaaggcgatagatcctctgtaccttcacaatatggtaaggtttctgaattcaggttcattgctggccctggaaatcctgatattgctccagtctcggcaaagcagctagaggcaaaaatcaagcgcgcgcattcaattatttgggccgggggaaaacgcgatccactcaccgcgtttgaccaatggagtaagttgctgtttgcgaaagttgaagatgagagaaccacgcctaacaatactcctcgcagatttcaaattggttcaaaagatacaacagccacagtagcaactaaagttcatgagctatttgaacaagcgtgtgcgaacgatagaactatatttccggaaggaataaaaatagaactgtcggatggcaaaattcatgaggtagttaaggcgcttcaagacgtgagtataacagatgcatctgcggatagtattggagctgcatttgaaagattctttggatctgtttttcgcggagagttagggcagtattttacaatgcgccaactcgcgagatttacagtcgcaatgcttgatattaagcatacggattacgttattgatccaacagccggaagtggtggttttctgttggaggttctccttcaagtatggcactcactagatattcaatataaaggacggagggagcttgaccgatataaaaatgatttcgctctccacaaagtgttcggaattgagattcatgaaattttggcgcgcatctgcaagattaacttattgttacatcacgacggacacacaaatattgagggagatcgtagttgcttagactctactttcagtttagctagattgatgccttttgaaggccgatttactcgggtggtaggtaacccgccttttggtgatgaagttgcggacggtgatgatgacttgctaggtgataacagtttgtcagtttttaatatcgcttctggacgggagaaagtcccttcagagcatgcgatagtggaacgagcaattgagttgttagagcctaatggtaggtttgggctgatacttcccgatggtcttttcaataaccatggggagctatctaattgccctaaggttagacgtttcctagccaaaactggaaagatagatgcgatagtttctctcccagattatgcgtttcgtaaatctggcgctcaaaacaaaacctcaatcctcttttatacaaagtactcaaggcaagaaaaagccagatttgatagctcttacaatcagtctatcaatgctggcgataccgaaaatagcgccatcttaaatgctttgcgcgcggtaaactataaagtttttctggctgaagcaaattttgttggatatacaacgacgggcacgttaactgataaaaatgatttgtatcgagaactagatcaaggccgtctctcagaagatcaaaaacaaacaatatttggtgaatatctaaaattctttagcgaccctgcaaattataatggtagtgattcacctgactgtatggtgattgatgtaaccgatatgtgggctgctcatgaaagcaatcgaatggacccaaagtattttcttttcaaaaaggaagagcaaagtcacattcgcgatggatgggttcgcctccccatttcatctgtcatgagaaaaagagaaacagtaattaaaccagaagaaaacccggatcaagaagttgtggtaatgacgctgtcgcaaactggtgagattagaccaaggcaagccggtaagggcaacaaccctccggagtggttgggcatgtactttgaagatagttcttctacatggttttcagcttcttcaggcgatgttgttttctctggaattgacttgtggaaaggctgtatatcagttgtgccgccggagtttgacggtgccttagtaactaaagaatttccaatatatgaagtaacagatgagcgtattgatcccgattttttatcatgcttactaagaagcaggtattaccaaagagcttttagagctattaccaccggtcatagcaatcgaaggagaactcaggtctcagatttcgaggcattggagatatgtttccctgacagtaaggatgttcaacgagatttggtacagagtattgtttctgcaagaacagatgttagatctagcgctctagatttgaaaactgcgttaagagattttgatcatgtaattgacggtagggatattgaactacctgaaattgttgaagacgattttgacgaacaggaataa

SEQ ID NO: 278756 - DNA, 327 bp, Morganella morganii
atgagtgcaggtaagttatgtgttaaaaccccaaatgcagctgatgataaatacattacatatataaatgtatttgattttaaagagcaaaagactatcgcggatatagattatagcggcagtccggttaaattaaatgaaaacaagtgcctgcctgcacctgatattcagtatcaggataatggaaaatatgcgtacacagcctcaatagttttacaaaaaaagcaggcaaaaaaaattaatcctcacaggcgatcgattggggttacatttttcattaaagatgtcgacggtgataaacaggctgttgatgttttaaatatgtaa

SEQ ID NO: 278757 - DNA, 291 bp, Morganella morganii
atgattgattacaatgaaatggtaaaaaatgaatcgatggaagatgttatcctgtttctggttgccaggcgtgaaagtggtcttatttacccggcaatagatcgttttttttatcgtcataatggcccggataaatatgagtcgtgtaatattatgattctccgcgaaacgcaccggcttctgaatgaagaaaaaataatgtgcggaggagagaaaggcggcctttatatgaaaggaccaaaatggattgagcccgattttatgtcagaaggaaaatatgagatagattaa

SEQ ID NO: 278758 - DNA, 2697 bp, Morganella morganii
atgactgtcaacgttaaccgcactgtcactccggctgtgcgcgataataatgctttccctgcggcggtatatgccgcaaaaacaccagacgaaacattagcagaattacattctgatatgctggggctggatgaaattgatgcccttgaccgcctgatagaacatcaggaaaacgtggtagcacatgacaaagcacctcccgcgtttattcagtttatttccgcatttcataatccgtttatttatgtattgctggcgctggccgttatcagctttatgacggattatctgatccccctgcaacagggcgaagacactgacctcaccggtgtactgatcatcggaacgatggtttttctgagtgtggtactgcgtttctggcaggaataccggaccaacaaagccgcagaagccctgaaatcactggtaaaaaccactgccacagtactccggcgtaaaaaaggacgatctgtccgggcagaactgccggtaaaatgtctggttccgggggatatagtagttctgagcgccggggatatgataccggcggacttgcggctgctccgttcccgtgatctttttatcagccaggccattctgaccggggaatcggttccggtagagaaatatgatactcagggcgatatccatgaaaaagatgccgcaacgataacggaaaacggacaatcactgacggaatcgggcaatatctgcctgatgggcaccaatgtggccagcggcacggcactgggtgttgtggtggcaaccggtgacaaaacctattttggctcactggcgaaatccattgtcggaacacgctcacagacgtcattcgatcgcggggtgaatagtgtcagtatcctgctgatccgctttatgttagtgatggtgccggttgtcctgctgattaacggatttaccaaaggcgactggtttgatgccacactctttgcacttgccgtcgcagtcgggttaaccccggaaatgctgccgatgattgtcagttcgaacctggcgaaaggcgcaattgcaatgtcgcggcggaaagttatcgttaagcggctgaatgcaatacaaaactttggcgcaatggatatcctgtgcacggataaaacaggaacgctgacacaggataatattatcctcgagcatcatcttgatacggagggtaataccgatgaagccatactgggactggcgtggctgaacagttttcaccagagtggcacacgtaacctgatggatcaggcgatcatccgtttcgggcgcggtaaagccgaaacagagtctctgcacaattatcagaaaattgacgaactgccgtttgattttgtccgcagacgtctgtctgtatccgtaagaaaaccggatggtaccgccttgcttatctgtaaaggtgcggcggaagagatgctggcgtgctgttctctgatccggaccggaaatcatatttctcctgcggatgatgagaaaaaacaggccattatggcgctggtcaatcattacaatgagaccggattcagagtactgctgctcgcagagcgggttctggatagcaaagagcagggattgccgctctccgcagacagtgaacaaaatatgattttatgcggaattctgaccttcctggatccgccgaaagacagtgcggcaaaagcccttaacgcactgaagcataacggggtaacggtaaaagtactgaccggggataatgccgttgtcacggcaaaaatctgtcgtgaagtcgggctggatgcctcgatgagtatcagtggtgatcagctggcgctcctcagtgatgaagagctgaaacaggtcgcacaaacacacactattttctgcaaactgacgccgctgcaaaaatcagccctggtcaggattttacaatcagccggccatactgttggtttcctcggggacggcattaatgacgcaccggcactgcgggatgcggacgtcggaatttccgtggacagcggaacggatatcgccaaagaatccgcggatattatcctgctggaaaaagatctgatggttctggaggagggggtcattaaagggcgcgagacattcggtaatattattaaatacctgaatatgaccgccagctctaacttcggtaatgtattttctgttcttatcgccagtgcctttattccgttcctgccgatgctggccattcagttactgattcagaacctgctttatgatatgtctcagcttgcgctgccgtgggataaaatggataaagaattcctgcgcaaaccccgtaaatgggatgcgggcaatatccggcgctttatgatctggattggcccgacatcgtctgtatttgatatcaccacctttgcattattatggtttgttttcggggcaaacagtccggacagtcaggttttattccattccggctggtttgttgaggggttattatcacaaacgctggtcgtgcatatgctgagaacacaacggatcccgtttattcagagcacagcaacactgccggtattattggttaccgggattgttatggccatcgggatctggctgccgttttcaccaatcggaagttatatcgggcttgagccgttaccgtgggaatatttcccgtggcttgctgctacgctggtcagctattgcggtctggcacaaatcatgaagggtatttatatccgccgtttcggaatgtggctgtaa

SEQ ID NO: 278759 - DNA, 486 bp, Morganella morganii
atgcacttagaatttaaacggctcactcagataaaaccggccgatattaccgcactgaacaatcacccgaaagtgttacagcaaatgccgctgggtagtccggattttgatgatggaaaaagccgcaactgggcagaagaaaaagacgctcagtgggaaataaatggatatggcccttgggcatttgtgatcgacgatgtgtttgcaggctggggagggcttcagaaagaaggtgatgatgctgacctggcgctggtacttcatcctgatttctggggaacgggaaaaatcatctgtgatgaaattatccgccacgcatttgatgaaatacacttaaccagtatcaccattttattaccgttatcccgaaaagtttcccggtttataacacgttacggatttcagccggatggttctgttaactatgatggtgtggatttccggcgattccggttattttcagatcatacagatggacatgattaa

SEQ ID NO: 278760 - DNA, 960 bp, Morganella morganii
atgaataaattaatgatacgtgtggcggcgctgttttttctgctgatggtgtctcaatctgtatatgcaagaggctgggtgggtgcaagatcaccttgtgcaaaaggaggtcacgaggtcagtccggggtcggggatggggatggattgtgaatggagacactctgccggtgcttattatggtgttaaccagcgtgttgagataagaccgaatatgtttaccgagggtgatgatcaggcttatgtgccgctttccggcctgtttgaattaaaaatgtactggtgtcccttaccggagaatatggatacctgcagcagagcaaacgggacattattgttatcgggtggtgtggttaagctgaactcttctatcccattgaaaaaacaggatattgttaagcggtttgccggtaacagatcgccatcagcaggcgggtattgtattacactcagtgacgttaataccggttatgaatacagaggtaatctgggttacgggcctgacggccggggtatattttgcggggatgtgtataaattacctatggaacccccgaaatgcctcctgaataatggcgctgatctggatgtcctgctgggtaaactggaacggaataatattgcggtaaaagccggttcatctgttcagtctgtttccaaagatatttcaataaactgcagcggaagtatggcttacaacgccaatatggaattgaagtataccccgctcatcgtcggtggtgaggaaatcatcagcacgacaacgaaggggctgggaatagctgttatctatagcggtaatgttgtcaggccggggaaaagctatccgctgagttatcagccgggtattcataccctgaagctgggttttgaagcagtgcgtgacccggctgttgcggcgacagacctgaaaaccggggattttacggcgaatgctgttttggttttcacggagcagtaa

SEQ ID NO: 278761 - DNA, 1752 bp, Morganella morganii
atgaccgttgagaagctgattaccgaccatatcgatatctggtcttctgccctgcaaacccgctccgcagccgggcgtggcagtaatggcaaaatcgatctctatggtattaagaaactgcgcgagctgattctggaactggcggtacgcggaaaactggtgccgcaggacccgaatgatgaaccggcgtcggagctgttaaaacgtattgcggctgagaaagcggagctggtaaaacaggggaaaattaaaaagcaaaaactacttcctgagattagcgaagatgagaagccgtttgagctgccggctgggtgggagtgggtgaggttgggttttattactaactatggcgagtgtgataaagcagaaccaacagatgcggatgcagatacgtggatagttgaacttgaagatatcgaaaagagtacatccagactcttaaatcgagttacgttctctgagcgtccatttaaaagttcaaagaataaatttaataaaaatgatgtcctctacgggaagttacgaccgtatctggataaagttttggttgctgatgatagtggtgtatgtacaactgaaattattccaataaaagtctacggcaatattctccctggttacctccgccttttacttaaatcaccaaggtttattgcttatgcaaatgaatcaacgcatggcatgaatttaccaaggttaggaacggataaagcaatccatgctgtggttgagttaacagcaattgcagaacaagtaaggattgtgaataaagttgacgaactgatgtccctctgcgaccaactggaacagcaatctctactcagcctggatgcccatcagcaactggtaaaaaccctgctggcaacgctgaccgatagccaaaatgccgaagaactcgccgaaaactgggcgcgaatcagccagcatttcgacacgttgtttaacaccgaagcgagtatcgatacgcttaaacaaaccattctgcaactggctgttatgggtaagctggtgccgcaggatcctaacgatgaaccggcatctgagctgcttaaacgtattgagcaagagaaagcggagctggtaaaagaagggaaaattaaaaaacaaaaaccactgccgccagtgagtgatgaggaaaagccatttgaattgccggaagggtgggtgtggtgtcgtttagcagaactcgttgctataaaaggcgggaaaagggtttcaaatggttataaattactaacagaaccaactcctcatgtctatattcgtgtggcggatatgaaagatgggactattgatttatctgatttaaaatatattgatgaagaaatgcaccaaaaaatcaagaactatataataactaaagatgatatttatatgacaattgttggtgcgacaattggtaaatgcggtactgttccggcgttgctggatggtatgaatcttactgagaatgcagctagactaataccatcaaaattaatttcaaaagactatttatatctgtgtttaagaagcgatctttgccaagaacaatttatagataaaacaatgcaggtaggtgtgcaaaaaatggctttaaatagattggctaatacacttattgcactgccttcaactaacgagagtttgagaataagggacagagttaaggaaatgaataaactatgttcaaaattggtatgtggaataattgaatcccaacaaaccaagcttcatctggtggatgcactcactgacgcagcattaaactaa

SEQ ID NO: 278762 - DNA, 1101 bp, Morganella morganii
atgccggttcatcatgctatctggcgggtcggagataaaccccagccgctgaccatcagcaaactcgccagtgagcagttgctggagaagatgattttaaacgaccccactatcctctctgatcagtggatgattatcggccatcaggaaaataccctcgataagggccgtattgatctgctggcgattgcgccggacgcatcactggtcctgatcgaacttaaacgtgatcgtacgccgcgtgaagtggtcgcacaggcactggactacgcctcctgggtggatgatcttactgctgaccgtctgtcgcagatttatgaaaaattctctggtggcggcaatctgggtgatgcattcaggctgcgtttcagtgctgagctggaggaagaatcgcttaatcagtcacatcaaatcattattgtggcggcagagctggacccgtccaccgagcgtattgtggattatctgagtaaaaatggtatctcaatcaacgtcctgttctttaaggtttttcagcatggagaagagcaattcttaagtcgcgcctggcttatcgacccgagtgaaacgcaaactaatgcggcacaggctaccgccacaagtgcgaatgcaaaagagccctggaatggtgagttttatgtctcgtttggcgacccgcaaagccgggtctgggaagaggctcgtcgttacggatttattagtgcgggcggcggaagctggtacagccagacgctgaaacaacttcagccgggggaccgggtgtgggtaaaaatcccggcgacgggttatgtcggcgttggtattgttcagagtgctgttgagcctgccggtagctttactatcaccacggaagagggtgaaaagctggcgatggatgtactcaggtacagggaactttatcagcggaatgccgatgaccctgataaatctgagtattttgtccctgtcaaatggctggaaacccgcagtgaacaagaggcggtaaatgaagtcggattcttcggtaaccaaaataccgtttgtaaacccacggcaccgaaatggcgccatactgtcgaaaaattaaaacgctattttaaaaactggaatgtgaaggagtaa

SEQ ID NO: 278763 - DNA, 438 bp, Morganella morganii
atggcgctggaaaccggttatacctttaccttcagtaatcagatctttatcacaccttacggacagttagcgtataaccgtatgggcagtaaagatatcaccctgaataatggtatggatgcagcaatcaagagccagacttcatttaccagcgaactgggtgtcaatgccggtaaagacttcagctttgataacggcctggtgttctctccgtatgtgaaagcggcgtggaatcatcagtatgaagacggtaacgaagttgaatttaaccgttacaacaccattaacctggatttatccggcagtaccggtaaattcggtgccggtttcaatgcccgctataacaacgtgaatatattcatgaaattacagcacattgccggtgatgcagtttattcaccaatcaacggacagattggtatccgttataacttctga

SEQ ID NO: 278764 - DNA, 1272 bp, Morganella morganii
atggctcttactgatgctaaagtcagggctgccaagcctttggataaatcgtataaattgaccgatggtgatggtatgcacttaatggtacataccaacggctcaaaatattggcgcttgcagtatcgctttggcggtaagcaaaaaatgttagcgttgggcgtttaccccgatatctcactcgcagaagcgagagaaaaaagagatgcagctagaaagttaattgcgaatggttttgatcccagtgaaaaacgcaaagaagttaaagaagagcaacagaaagaatttaatacattcgagaaggttgcacgtgattggcatgcaaccaataagaagtggtcggaagggcatagccatcgagtcctaaaaagccttgaggacaatatctttgctgctattggtaaacgcaatattgccgaactgaaaactcgcgatctcctcgaaccgattaaagcagtggagatgtctggacgtcttgaggtggctgcacgtttacaacagcgtgtgactggcattatgcgttatgccgtacaaagtggcttaatcgactataacccagcgcaagatatggcgggcgcagtcgccacaggtaaacgagtccatagagccgcattagagcttaaactcctacccgagttcttacaacgtattgatgattataaaggaagaccgttaactaaacttgcagtcaaacttatcttgttagtcttcattcgttctagtgaactgcgctttgctcgttgggatgaaatcgattttgaaaatgccatgtggacgatccccgctgaacgcgaagcgatagaaggggttaagcactcgcatcgcggatcaaaaatgcgtactacccatttagtccctttaagcaggcaagccattgagatcttaaaacagatctatcagttcagtggcaaccatgaactgatcttcatcggtgatcataaccctagaaaaccaatgagtgagaacacggtaaacaatgcactacgtgtgatgggttatgacactaagacggaagtgtgtggacatggtttcagaacaatggcgtgtagctcgttgattgagtcggggctatggtcgaaggatgcagtagaaaggcaaatgagccaccaagaacgcaactcagtacgagctgcttatattcataaggcggagcatattgaggaaaggcggttgatggtgcaatggtgggcggattatctggatgcgaatagggagagggagatttcgccctttagttttgcgaagtcggatgatccattaaaggtaatttaa

SEQ ID NO: 278765 - DNA, 213 bp, Morganella morganii
atgtatctttacgagtttcccaatgaggttcgcttaaaatatcatacatttcagcagactgagtataataatcttcatagctatccattctgtaattaccttattcaatttcctactaattatacatattgctcaaaattgtttgatgaaatatttagtttaaggcgtttttttattaatttaatggaaattagtactgcgataaaagtataa

SEQ ID NO: 278766 - DNA, 762 bp, Morganella morganii
atgaaaaaaagtaacaatactaaatcagggttagtggattttcattgccaccttgacctttatccgaatcatgagcaagctgtaaaagacgcagagttagcaggagtatttacacttgccgtaacaacgacaccacgagcttggcctcgtaataatgagttagcacaaaatacgaaatatgtccgtgcagcactaggattacaccctcaactaatctcagggcatgaagacgaaatcactatttgggataattacctatctgaaactcgttacattggtgaagtaggtcttgacgcagggcctcgtttttataaatctattgatgctcaaaaaagagtatttcgacatatattagaaagatgcgctgaaactggagataaaatcctctcggttcatagtgtaagagcctctaagttagttttggattatatagaggaatttctgccattagaaaaaggaaaaattgttttacactggttcactggatcaaaaaaagaagtacagcgagctgtcaagctgggatgctatttctcaataaattcagcgatgttctctaacgaacgacatctgcccatgattatggaaataccaatagatagaatactgacggaaactgatggcccttttacaaaatcaggtggtaggccatcaataccctctgacgtggttaatgtaatagatactcttgctcttcttcataaaaagaaaccatctgaactttcttcaattattagggataacttaaggagtctgttagcttaa

SEQ ID NO: 278767 - DNA, 1362 bp, Morganella morganii
atgaagcgacaattactagtaggtctgtttggagctgatgaccaaatagaaatatccatgggaagtgatgaacaaaaaacatttgtgcaacttattgaaggaaaaaatcatttagctcatggtattggaagcgcgttatcctgcttgaataaactaggaatttatccttctgagataggcttggatctactcattttagcagctcttgtccatgctgccgacacccgaatttcccgtgaacaacaatcacaagactcttggactagagaaattcgcctggtggtacctgttagtgatccagagaaatggaatgctactacaccaatattaaagaaaatgttgaactttttgactggagatttatgggaatttgggtttagaaatcgccccttaaaattccagtctctcgttgagcaaggagagggaaaccttgtagcaccttcttttgatacacttagtctattttctggggggcttgatagccttattggagcgattgatttattgcaaaataacaatataccactattgatcagccattcaggcgatggagctgcaagtaatgcacagaatcagttattttcaagtttaaaagatcactacaaggaaaattcttttgcccgtttacgcgtaaatatgaattttaaagaaggattagtcaagggagtcagttcagataaaaatacacgaggaagatctttcctcttctttactttaggtgtatttgcagggacaggttttaggcatcaatttacacttcgtgtccctgaaaatgggctgatcgcattgaatgtacctttagatcctctaaggctgggctctaatagcactagaactactcacccttattacatggctcgttggaatgaattattacaaagcttagacattaatggaaaagtactaaatccatattgggatcaaacgaaaggagagatggtatcaaactgtttagataaaaatttactaaaacaattggcgcccgattctttatcatgttcttcacctacaaaagggcgttggcaggggctgggaattgaacattgtggttattgccttccatgtataattagacgggctgcattagaaactgcactcggtaatgataccacccattacacagtttttgacttacactcgcgagaattaaatactcttaaagcagaaggtgttcaaattagatcgtttcaatatgcgattgagagactaaaaaaacaacgagtgcttgcaagtgtattaatccataaacccggttctcttgcggatgaaacaaaaaatttggatcaacttgctagtgtatactaccgtggtctgatggaagtcagtaagctaataaatggagtacaaactaggccaaaatga

SEQ ID NO: 278768 - DNA, 864 bp, Morganella morganii
atgggtacttcaacaacatatggtggccctagaggtgataccccattaattccatcttggttagataatactgcaggtacaggacctagccctgctcaagacggagcggatcctcctaatcctaatgattcaccaactcctccagataaaacacctattcctaaacctgccgattccaataggttttctggagctcgcggtaattttactaggtttgctaggtctggagggagtgatcgagcaagcctaggccgcgcaatttcaaattatgtatcaacctcttcaggaggagcccgccaagcagcacaacgaatgggggcttcaagaggggctggagcacggctacttggatttctttctgatgccaatacgagaggaatacgcgaggccctacatgaatttaatttagaatcaatggctgggcttccaatatcagaagtatttgttgctttagcagaccatatttgtcctggtgcaggtaccgtcgatgaaggaatagcaagagaagcctatattgaaacaatcattgatcttgctggtgaaggtttagcaagcttagattcttttactcccgaacaaatggatactgtttttgaactctatgctacacacgctattgaagccagaatttgcaatgacataggtactaaattagtaagtatgccttctaatgctaaaattgcacaccaagttgaaaagcaattacaagactttattcgaggagcagtaagtgatgcgcttataaaagcacgtgagggtaaaccgaacataactaatgaccaagcacttgcgtttgttgattcagtatacgaatcagcttttgctattttgaaatctttaggtgatgcggaggctgatcaatga

SEQ ID NO: 278769 - DNA, 1947 bp, Morganella morganii
atgatcctaactgataatgaaacaaaagttgatcttcttaataacgaagcaatcgctagtacgattatagaattattgcgctctcgacctaaccacccaatcactattggtgttcatggtgattggggagcaggtaaatccagtgtactagaaatgatcgagtcaggcttgaatgatacagaggaagtattgtgcctcaaattcaatggctggagatttcagggcttcgaagatgcaaaaattgcattaattgaaggtattgtatcaggcctagtagaaaaacgtcctacattaacaaaagctgctggaattgttaaagatatattccatcgcattgattggttaaagcttgctaagcgcgctggtggcctggcagtctctgcttttactggaattccaacggctgatcaaatcaagtctttagtaggctcacttcaatccatggcaagtgatcctgggaagtttgctacacaagaaaaccttttggctgccatcaatgagatacaaggggccttgaagcccagtgaagcaaggaatgttcctgaagaagtagaagctttccgaaaagcttttgataccctactcaaggaagcgggagttactcagcttattgttcttgttgatgatcttgaccgttgtttaccagacacagccattgaaacccttgaggctatccgactatttgtcttcacagcacagactgcgtttgttgtcgcagcggatgaagcaatgatcgaatattcggtgcgaaaacatttccctgatttaccagacagtacaggtccgagggattacgcccgtaattacctagaaaaactcatacaggtgccattccgtatacctgctcttggggaaacggaaactcgaatctatgtaacattactattggcaggaatagatctcggggaagatagtcccgattatataaagcttatagatgcagccagagcacaactaaaacgtccatggatgagtggtggcctgaatgcagcaattttccggagtgcattaggtaatagtgcagataaagcgaataatgcgcttgttttaagtgatcaaattgcacctattcttgctagtggaaccaaggggaatccgcgacaaataaaacgctttctcaatacgctacttttacgtgaacgtacagcaatcgctagagggtttggtgaagatatcaaacttcctattcttgcaaaattaatgcttgctgaacgatttatcccaaaacttttcgaacaaattgcctatgtagccgcgactaatcccaaaggtcaatgtgaagagattgaaaaacttgaagaaaatttaaaaattgtaattccaattgataattccaacattgatgataaaaccaaggtggcatcattaggcgcaccttccctctcagaagccacagtacttactgaatggaaagaaactcatgagatacgcgaatgggctctgttaacaccatatctagcaggtgtcgatttacgaccatacctcttcgtgaccaaggataagaaggattattttggaccagtatcaatcttaggacatttatccacagtggtcgataaactgttaggtggcaagatggttgtacaaggacttgaggcagagttgaagcaactagctcaaccagaggcggataaggtatttgaggccttacgtagtaagatcgtaagtgctggagactttagtgtaaaaccagagggcatagatggtctcatcgtactggtaaaatcccaaccctgtttgcagagccctctattagattttttggaatcattacctaaagataaatgcggggcttgggtggttggtgggtggcaagccgcaattaaagattcagagtccaagtcacgtttagctgctctactgaaagcatggagtaaagttacaaataatcagcttttaaaaattgcggcagaaaaaacgcttaatcaacctaaaggaggtcgttaa

SEQ ID NO: 278770 - DNA, 1266 bp, Morganella morganii
atgaatacattaatctcacataatgcagcaatgcgcgagtttttacgttcttcagataaagaacagttgcgaaatgcagttgatctggatgatatagatgtagttttaagaaagcttctttctatcgacgaaatgcgtgacgctgggagcttcttcactggtcaagctttagcatcaaaagtaatatcatctttcaataagccaattacagtgagatcaatcgttttggatccaacctgtggggctggtaacctgctcatcgaagtatctaggaagctaggtgtggaagcaacgttatctaaaaccttaaaagaatggggtaaagtgctctggggatttgatattcatcagcattttattgaagcagcaaagattcgcattgttattgaagcccttaacagaggtgttgaacaaaattgtagcttagaagaggcttttgagttgctttctcatatttatgtgaaagatgctttgacaattaatgcagaggaaattaaaaacgtaacacatgttgtcatgaatcctccttttaccatttggccttctccccaaaaaaattattggaaaaaaggaaatgtaaatgcagccggtattttagttgataattacttgagaattttaccaaagaactgcctaataagtgccatattaccagatgttcttcgctctggtagtcgatacaacgatttcagacaattcgtatcagattctgtggatgctaatgtaaagatttgggggcgatttaatagtaaaactgatgtggatgtatttttattatcaggagtgaagcaaagaaaccaacaaaggatacaatggcataatgcaataaataaaaattcttcaatagctgattactttgatgtcagaacggggccattagttgcttaccgtgatcctgagatagggaatgagtatgcatatttttatcctaagaattgtcccagatggggagttttaaaatcagcagtggacaggagaaagttttcaggaaaggttttacagccaccttttgttgttattaaaagaacatccagcccctctgatcgcagtagagcatcagctacactcataaacttaaatgagcccgtagccatagaaaatcacatgattgtagttacccctaaggatgggaaagtgaatacgtgtaaaaaacttatgcgaattctgcagagccaacaaacgaataattttttaaatgagcgaatacgattgcgtcacttaactgttggtgtaataagagatattccatttgttgaaggtacataa

SEQ ID NO: 278771 - DNA, 2280 bp, Morganella morganii
atggcacgtagatatttaggtaaaaaaccatttgatctttcagctcgtgttcctatgcaacttggtcgggagagcatttcaagctcaaccgttgcagtatcagagcttattaaaaatgggtatgatgctgatgctgaaagtgttcatgttgaattttttttgagggaatcccccgctctttctacattagttatcagggatgatgggaatggcatggatgctaatacaatttatgatcattggttaaaaattggcacagattttaagaatggcgtagaactatcattatacaagaagcgagttctaactggtgcaaagggtttagggcgacttggcttagacagactgagcaaaaaagttattttatatactaagaagaaaggaagtaattcagttattcaattaattgttgattggagaaaatatgaaggtacaaatgcttctatttctgagattcagcatgatatttacgaacaggatttaccactatcaagtaaatatggggaaatattttcttcagtggacgattcaggaacttatatggtattggtcgggcttaaagaccattggaactcaggctttattgaagatttaaaacaagaattacggctcttaatttccccctatagatctacgaatgatttttctattactatccatagaacaattaataatattatgtcttctagagaaatcgttgacactcaagagttacttaaagctgccagttgggaagtcaaggcaataatagaccatagtaataaagtaaaactttcttttaaaaataatacaacaggagagttaatagaacaaataccaactccttggaaaaattggatttcaaaacaaggtgataagcctttatttggaccattgaaatttgaatttcattatatggttagaaaaaaagagtttctttctaagattgatatgtctgctagaaactggtcaaaatttatggaattgaatcgaggagttcgtatttaccgagatgattttcgtgttcgaccatatggtgaacccacagggaaaggggattggttagatttaggctatcgaaaggcttccagtccgggagggataaaacaaggtggttggcggattgcacctaatcaaattattggtgcggtaagcatatccaaaaccactaatgctgttcttaatgaccaggctaatagggaaggcatagttgaaaatgaagcttacttacaacttcgcaatttcatattaaaagtaatttcttcatttgaagtacttgccacaagagatgctcagagtgatgaagatacagaccttgcagcggaattagagcgaatagtaaaagaaaaagactctgaattaaagggagcgattgacgatattaaaattttttctaaaaaaacaaaaagaaaaggaaaaaaaatacctcctgctcaggtcctaaatcaaaaattacgtgaattagagagagctaaggcctcacatcaaaaagcactagatgattattatttgtatttagaaaaagaacgtaaaaaattagaaggtgaaaaagatacgctttcaaatcttgcttctctcggtgtattaacagttagttttgggcatgaaattcgcacacactcagcattggcattaacgaactctaaaacgcttaaatattggattgaacgtgcagctactagtaatgagccaattgattatactaaatttatccgactaactgacttaatgataactggagcagaatatgttgatacattttctaagttagcgattaacaatataaaacctgataagcggactcgttcaaaagttaacgttcctaaaatttttaaatatatatttgatatgatgtctgcaacattttcaaaaatgggaattcaatatgaaattgaatttataaaaattttagaggaggattttaatgtccgatcgtttgaaattgattgggagagtatagcaattaatttgataaccaattctacatgggcattagaagatactaaaaaagaggaaagaaaaattaaaataatttttgagcgtgttggtggtactagattaagactgacatttatggattcaggttgtggtttagaagcaggccaggaaaatactatttttttaccaatgcatagccgtaaaactgatagtaaaggtaattctattggaacaggaatgggattatccataattaaaaatcaggtggaggaacatatgccatctggaacaattactgcccaacaatattctattttggggggcgcaggtttttatatagaagttttacaggataataaatga

SEQ ID NO: 278772 - DNA, 633 bp, Morganella morganii
atgaatacaataatttttattgatgatgatagtgatgtgagagaaacttatcaattagcgatgagccttatgttctcaaatgaatataaaattctatgcttagatgtagagccatctctagatagtatgattcaggtattaaataaaatacctaataaagttacgtattttattgatgagaagctaaagcattctggaatagcgtcatatacgggagttgaattaattgaaaaaattagattatttgattcaaaaattccaatttatattctgactagcttttctgatgagatagaaaaatactttggtgatatagaatttgttatagataagaacgattgggagctaaatgaaggtgaaaacaatctaattaaacggtttttacgacatataaatacatataaagatattaaatcaaaacaagcagaaagatttgagttgttgcttgaaaaatcaattttttctactttgtctgataaagagattgaggaatttaaagctcttgatttatccagggtgaaaaatgttcctggcgagggagttattagtgaagcttctctcgataaattaaaatccgcatcggataaattagatgaaatatatctagaacttaaagggaaggataatgagtga

SEQ ID NO: 278773 - DNA, 657 bp, Morganella morganii
atgagtgaattttattaccctgttttagtcaggcaggatatcactacctactgtaaagaagacggtaagttttatgctacttacaattgtaaaaaaaactatgataatataagtaaggactgtaagtttaggtgtgtatattgtgatgctcgtattgatgaatgcggtggtgagccattttcgctagatcattttagacctatggatgtttttttagataaatttgatgggatattaaaaatacatccattcaatcttcatctttcttgccagaagtgtaatgtattaaaaacaaatgattggaagggatgtaaggataaaatagatggtgcaacctatatatcaaggctaggatatattgaccgttttagagaagatataaataaatatataaaagtagatggtaatggattggttatatcaataaatagtaatgggcctggagattacatgatacgaaaaatgttattaaaccgtacaaatagagtatatcttaggaagagaagagttgtgaaggaaaaagcatcaagaattttaaaactattgttgcagaaacagaatgatatatttaattcaaataatatagatgtatatgagcttaagaaattacaagggctttttcatagatatgaacaacttaatttgttagagttatga

SEQ ID NO: 278774 - DNA, 312 bp, Morganella morganii
atgaccaaatcaaagaccaaagcagaacagcaatggctgtcggatgtggccgaactcggctgtatctgctgccgtaacatggggtacggggcatctcgtgcagaactgcatcatgtgagaaacgggcagggtatggggcaacgggcggatcattattccgtactcccgttgtgtccgcagcaccaccgggcatgctacgcaacgggattccatgcagcgccggaaacatggcagcagatccacggcagcgaacgtgaattgctggagcaggtaaaacaggaagttaaggagctgcgtttatgccgggtgtaa

SEQ ID NO: 278775 - DNA, 459 bp, Morganella morganii
atgctatatcatcaaacttttcacgaccgatcattaattgtatcctacaaaatatttggagttattatgaatataatgcaagaatttgaaatcgtcttttcaactggatatactgtgttcgccagtataacaaaactaggagatgggagatttttccctcaaatcacacaaccatatgaaaataaaaaaatcccttacattaaagagtatattacagctattgacccattagacccatcatctcccgctatagatagctgtgctaacgattcatatataaaaataaataaatctatagctcttttattatcaaaaataaaatcaactgatggcgagcagctaaaccataaaatttcttatattgataatatttgcaatgctccgctactctctattgaccaaataaaatcacactttgatagtcctgttgtggttaaactaaatggccaaatagtatag

SEQ ID NO: 278776 - DNA, 159 bp, Morganella morganii
atgtcacggaaccctttaacgctgatcatcattgcgatcaccctgctgactactgctctgctgtcggtttgctatctgtattcactcccgaatcactgtaagccgctgccgggtaacccgctggacggtgtgattcattatgggtgtgaagcgccatga

SEQ ID NO: 278777 - DNA, 1008 bp, Morganella morganii
atgaaaccggattggggggtgttacagcaacagttcctcgccgagcattcagtaacgggaatatccccgaaagaatggtgtgagatacagggactgaattacgcaactgcgcggagacacattaaaaagccagctgcgcagagtgcgcaaaaaactgcgcaaaagaaagtgcgcactgcgcagaaaaaagaatgcgcaaatgaaccggtgcgcaatagtgatataccggatgcgcaaggcaacaaatccgacaatgcgcagaatgatgaaacagagttcgatctgcgcaaatacgggcttaacgatatgcaggcacgttttgtcactgagtatcttatcgatatggacaagacagcggcataccaaagagcgggatataaaagtcagggtgaaacaggagcagctgcagccagacgcctgtatcgaaatgtatcggtgaaccgggcaatacgggatgccctcacagcacgggaacgccggactgaaatcacccaggacgcagtgttaaaaatgtggtgggacattgccactgcggatgtatctgagctgactgaataccgccggttatgttgccgctactgctggggctttggttttaactatcagtggcgtgactcgatagaatttgaggacgctgtcagtgaagcggctgcaaagaagcagaaggagccaaacgacaggggcggctacggttatgacagcacgcttgacccgaatcctgattgcccccgctgcaatggtgccggtattggtcgtcctcatttccacgatacacgggatttaaggggcgcaagccgccggttatttgccgggataaaagagggtaagttcggtaccgaggttatcacccgtaatcaggatgatgcgctgaagatggttgcgcagcatttgggcatggttaaaaaccggacggagcttaccggaaaagacggcgaacctatcaaagcggaagtggcaaacctgtcatcacaggaagccgcagatctgtataaaaaaatgatggggtag

SEQ ID NO: 278778 - DNA, 483 bp, Morganella morganii
atgtcaacaatgactgacccacacgaggggctggtaagttaccagcaagcgttaaatgaaaatttgatttcaccatcaccgtgctcactttacgaaaacatgactattcttcatgatgtcgcagagggaaatcaaagattgacctacgccataatggataatgatattgttaaggcaactgcggtttatatctttgcacctaacatagacggtattccttgctttgggattggttatgctgttgcaaaagagtatagaaaccaaggtatagctacccaaattgtcactgatagccttaaagaatttagtcacggaatgaaaggtaagataccttcgttttacatagaagccatgattgatgtaaataacatcgcatcccgaaaagtggccctaaaaacaattaatgacaccccaaaagagaccattgaccaagtgtcaggacaaccggcataccaattcatcaagctcatcaaaaataattaa

SEQ ID NO: 278779 - DNA, 1608 bp, Morganella morganii
atgccgatcccattcccgtttgacttcaaaaatccggactacaatgcggtatttgaatggcggatggagcggcttatgcgcatccgccaaaatcccgaagctataccggtaataaatgcttattataaagacaatccagctcaatttattattgactgggggatgacttacgatccgcgaaatcctgagcgtggtttaccctcttatattccatttctgctgtttccccggcaagaagaatgggtcgaatggtttatggagaggtggaaatcacaggagccaggtataacggaaaaaacccgtgatatggggatgagctggttaactgtaggtttggcttgctcggtatgtaattttaatcgcggtatcagtgtggggattggcagccgtaaagaagagtacgtcgataaaataggcgttcctaaatcgttgttagaaaaagcccgtatttttatgtcttatctaccggctgaatttcgtttcggttgggatcgtgccaaagacgcaccacatatgagaataaaattctctcataccgattcaatcatatcgggtgagtgtggtgatgggattggtcgcggagatcgtgtcagtttttatattgttgatgaatccgcatttcttgaacgacccgttttaattgatgcctcattgtcagcgacaaccaattgccgacaagatatttcaacgcctaatggtaatgctaacagttttgctatccgcaggcacagcggcaaaattcaggtattcacgttccactggcgggatgatccacgtaaagatcagcagtggtacgacaaacaagttgaattattagacccagtgaccgttgcacaagaaattgatattgattacaacgcttcagttgaaggtgtgattattccttctgcctggatccagtccgccattgatgctcatattaaattaggtgttgaacctacaggcaagcgcatgggagcacttgacgttgccgatgaaggtattgataaaaacgcctttgtatcaggcaggggaatattaattgatgcttgtgaagaatggagtggtaaaggtgctgatatatatcaaactgttgttaaagcgactaatttagccagcgattatggctgcaatgaagtgttatacgatgctgatggcattggagctggttgtcgcggtgactcaaggcaagtcaatgaagatagaaaacgatcaggtctgaatccagttgtattctcagcttataaaggtagctctggtgtgcttaatccagacaaggttctgatgaaggatgctactggcaggaatattactaataaagattttttccaaaactttaaatctcaatcatggtggcatctgaggacattatttttaaatactcacagggctgtcaatgggatggcatatgacgcggatgagataatttcgctgtcttcccgaatatcatcattatcaagattaacttccgaacttagccagccaacctacagtaaaaactcgtcgggtaagattgttgtggataaaaagccaagtggtgcaatgtctccaaactgtgctgatgctttagttattcttaaatcccctgagaaaaaatctggcggattcttttcacgtaagaggacataa

SEQ ID NO: 278780 - DNA, 597 bp, Morganella morganii
atgaaaaaaatattgttgtgcctttttttaattcacacggatactgcatactcagcgaattgtgagctcgatactcaggattcggcattatgcgaggcggcaaatggtggtgacgctggtgcccaggttacaatcggatcttattactactacggtaatggtgctcccatagattataaaacggtggctgactggtatacaaaagctgcggtacaggggaatgagtacgcacaatattctctgggggagatgtattttcagggggagggagtgcaacaggattaccggcaggctattgagtgggttcataaatcaggtgagcagggaaatgcattttctcaataccagcttgcgaaaatgtattattacgggaagggaatagaacagaattaccgcgttgcagcggagtggtataagaaagcggccgatcaaaaatatgcatttgcactggcaaagttggcagagatgcatctctctggggaaggcgttgaaaaaagccaaccaaaggccgggtcattgtatgatgaagcatgttttggtgggtttcaatcggcatgtgacagccttgcgaagctgaataaaaaaaaccagcactaa

SEQ ID NO: 278781 - DNA, 441 bp, Morganella morganii
atgtataagaatattctggtaccgattgacacttctaataaagcactggttaaccatgtcatccctcacatcgaatctctttcaaagtttgatgacccgcacatacattttttagtcgttataccaagctacaaaatgtttatcggcctttcatacggcatagaaaaagaaatcattacagaagataatcaacgattgaagttagcagaagctgaccttaaaaatgaagtttcaagatttaatcttccggaagatcgggttcattatcatgcaattcttgacactccgatagatgggattttgactaccgcagaaaaaatacacgctgatttaataatcatcagctcaagatcaccaaatatttcaaccaaatatctacttgggtctactgcatcagctgtagtccgctatgcagaaacatccgtcctggttgtccgctaa

SEQ ID NO: 278782 - DNA, 459 bp, Morganella morganii
atgcagaacattagttctttttcattatttccggcattatctgatagtttgctgtcaaatcgctttgaccagatggatcgtttattcagtcaacttacgggcaacaggccaataacctcagaacatccatataacctgaagcaattaaatgatgcgcactatcaactgacggttagtgttcccggatacagggaagatgatcttgaggtatcattgaaaggtggcaaacttagtattcagggtaaacaacctgcagaagtagttaatgaatcagagaaatgggtacaccaagggatattaaaaagccagttttcattagaatttaaccttggtaagaatgtcaaaattcggaatgcagaattatcctgcggattgctgacattggatatagagtatgaaattccggaagaagaaaaaccacagttgatagctattgaaaataaagatataaaggcttag

SEQ ID NO: 278783 - DNA, 366 bp, Morganella morganii
gtggggcagggcgcaccaaaaccgctgaccaaattcgattttcagtctgttcagctgggggttgccaaagttgctaacattgctgtactgacggatgagctggtcagattcagtaacccggcagccgatacactggtccgtaatgcgctggcttcggccattattgaacggattgatattgactttatcgatccggctaaagccgaagtggcacaggtatccccggcatccgttaccaacggggtaacggctattccgtccaccagtaatccggaggcggatgttgaggcattatttgaagcgtttttgaaagccaacctgtccccgaggtggtgtatatctgtttgtttttattttggatgttaa

SEQ ID NO: 278784 - DNA, 1437 bp, Morganella morganii
atgaatatatggttaatggggattcgtgattttcttgcacgttataaattagtttggagtgaaacctggaatatcagacatcaattagatactcctgtacgtgaaaaagatgaaagtgaatttttaccggctcatttagagctgattgaaactccggtatctaagcgacctcgcctggtggcttattttattatggcatttctgagtattgctattattttatctatattaggtaaggttgagattgttgctacggctaatggtaaattaacattaagtggtcggagcaaggaaatcaaaccaattgaaaactcaatagtaaaaaaaataatggtaagtgaaggcgattttgtaaaaaaaggagatgtattactggagttaactgcgctgggggctgaggctgatacactgaaggctcagtcttcattactacaggcaaaattggagcagtttcgttatcagactttgtctcgcgccatagaatcaaatcaactggtagagattaagctgcctgatgatcaggatcttagaggagtttctgatgaagaaattttccgtctgacatcattaattaaagagcaattcttaacctggcaaaatcaaaagcatcagaaagaattaaatttaaataaaaaaatgtctgaaaaacaagcaatactcacaagaataaacagatataatagtttatctcatattgaaaaaagtcgtttagatgacttcagaagtttattgcaaaaacaagctgtttcaaaacatgctgtacttgagcaagaaaataaatatcttgaggcatttaatgaacttcgtgtttataaatctcaattggagcaaattgaaagtgatattttgttagcaaaagaagattatcaacttgttactcaatcattaaaaaacgaagttttggataagttgcggcaatcaacagataatattaggttattgacactggagttggataagaataaacaacgccagcaagcctctgttattactgctcctgttaccggaaaagttcagcaacttaaggttcatactgaaggtggtgttgtcacaaccgctgaaactctgatgattatcgtcccggaaaacgacatactagaagtgaccgcattagtacaaaataaagatattggttttattaatgttggtcaggaagttattattaaagtagaagcatttccttataccagatacgggtatttaattggtaaggtgaaagatattaatttggatgccattgaaaatcagcagttgggtctggtatttaacgttattatttcaattgagaaaaataaactttcaattggtaacaaaaatattcctttaagttcaggcatggctgtaatagcagaaataaaaacaggaatgcgcagtattattagttatctccttagtcctttggaggaatctgtaacagaaagtctacgggaaagataa

SEQ ID NO: 278785 - DNA, 1269 bp, Morganella morganii
atgtggcattacagtccgaaacttacgttagttattttattttcattaccttgttatgcggcatggtcgatttttatcagccctattttacgacgccgtttagatgaaaagttttcccgtaatgcagataatcaggcgtttttggttgaatctgtcacagctattaatacaattaaagctatggctgtttcccctcagatgactaatatatgggataaacaattagctggttatgtggctgccgggttcagggtcacggtattagcaactattggtcagcagggggttcagttaatacaaaaaacagtgatggttatcaatctttggttgggtgctcatctggttatttctggtgatttaagtattggccaattaattgcgtttaatatgttagctgggcaaattgtttctcctgttatcagattagctcaaatttggcaggattttcagcaggtaggtatttctgtgtcccggttgggggatgtgttaaactctcccactgaaagttatcagggcaaattagcattaccagaaattaagggtaatatcacatttcgtaatattcgttttcgttacaaacctgattcacctgttattttgaatgatattaatctggatattcaggaaggtgaagttatcggtattgttgggcggtcaggttcaggaaaaagcacattaactaaattaattcagcgtttttatatccctgaaaatggacaggtattaattgatggtcatgatcttgcattagctgatccaaattggttacggcgtcaggttggtgtggttttacaggacaatgtccttcttaaccgaaccattatagataatattgcactggctgatcccggtatgcctgtggaaagagttattcaggctgcaaaattatcaggcgcccatgattttatttctgaattacgtgaaggttataatacgattgttggggaacagggggctggtctgtcaggagggcagcgtcagcgtattgctattgccagggcattagtcaacaaccccaaaattttaatttttgatgaggccactagtgccctggattatgaatccgagcatgtaattatgcgcaatatgcacaaaatttgtcagggcagaacggttatcatcatagctcaccgcttatcaacagtaaaaaatgcagatcgcattattgtgatggaaaaaggacaaattattgagcaaggaaaacacaaggatctcctctgtaatcctgaaagcctttatcactatttatatcagttacaatcagattag

SEQ ID NO: 278786 - DNA, 525 bp, Morganella morganii
atgaaaaaggcaatcacgatattacttaacgggtgggtgtgggctgttgtgtttttcggtctgtggatattcagcatgctgtcagccgaacaaacggaaagccaacataaagataaggttatcactgaccagcaaaaagtgattgataacgcccacaccagcatcgatattttcgaacgcgtggcaaccgcaaacgccaaccggaatgttcaggcggaagccaaatcacaggagaagcagattgaataccgtaccattatccggaaagaggctacctgcaatttgtatatccctcagcctgtttctgacgggttgctcagccacgtctactccatccgtgaatcagcaatgcgttccgctcccggcatcactgacacaaccggtactggcaccgctgccacccgccgactgacatactgccaggtggttgagtggatagagccgctgctgatggcactggataaggcgaacgggcagttaatggatatccggaaagcggatactgagagaaacagacgaaagtaa

SEQ ID NO: 278787 - DNA, 1401 bp, Morganella morganii
atggatatcaatgtcgatctgtttgatcaagaagttcgcagagagatagcgcggcgcagcctgcatgaattcatccggtacattaaccctgaatacatcaccagtcacttttcggaaacggtttgtgcatcactggataactttctgattgagatgatggccggtaagcggccgattctgattctcggcgcaccgccgcagcatggtaaatccgatattgtatcgcggtatcttccggcgtatttcttcggtaagtatccggataaacgtgtaggcgcattgtcctattcgtcagatctggccggtgacatgaacactgatgttcagcgcatcatgtcgtcagatgagtaccggaagctgtttcctcaaagctggttaggtaataaaccgactgacggtgtggcggttaagcgtaataccgaagaattcgggattgccaatcacaggggaacatacgtctgtgccggtgttggcggcccgctgacaggtaaaaaagttgatctcgggattattgatgacccgataaaaaactcaaaggaagcgctcagtcccacggttaaaaagtcaatttggaactggtacgcatcaacgtttaaaacccgcctgtcccggaacagcggcgagatcatcatggcgacccgctgggcaacagatgacctttccggccgggtaaaagagaaaacaccaaaagccagagtgctggcatttccggccatcaacgaacagggtgaagcgcttgtccctgagttgcatccactggaccaactgctcgaaacaaaagccattctcggtgattacttctggtctgccatgtaccagcagacaccaaaaccgggagacgggcagatattccacgaagaattcgcccggtactacctgccgaaagatctgccggacacctttgatgaagtcattcacagctgggatatgacgtttaaggacagtgacggcacggactatgttgtcggtcaggtatggggcaagaagggcgcaaatgcctatctgctgtatcagatccgcaaacgcatgagttttaccgaaaccctgaaagccgtgaaattactggttgataaatacccgcaggcgcggcgcaagctggtggaggataaagccaacggaccggcggtcatagatacgcttaaaaccactgtatcaggattggtgcccatagagccggacggcagtaaaatcgcccgtgctcacgcctgcaccgctgaatgggaagccgggaacgtctggctgccccataaagatattgcaccgtgggtcaccgaaacggtggaagaaatcacaacattcccgtttgccgggcacgatgacaccgtggatgccatgacacaggcactgcggtatctgttccagaagaaaggcggcggattcttttcacgcaagaggacataa

SEQ ID NO: 278788 - DNA, 213 bp, Morganella morganii
atgtctaatacaatgactggttcagtaaaatggtttaacgaatcgaaaggttttggcttcatctctccggcagatggtagcaaagatgtgtttgttcacttctctgcgattcagagtgacagcttcaaaacattatttgaaggtcagaatgttaccttcaatattgaagacggggcaaaaggtccgtctgcatcaaatgtggtgggtctctaa

SEQ ID NO: 278789 - DNA, 192 bp, Morganella morganii
atgcgcatgtccgacaaatattccagccctacagcatacgcctgggggcttataacctctgcctttggcattttatctctggatcagtgggctattgttgccgggatcatctgtaccgtcggtacgttcctggttaactggtattacaaacggaaggaatttcagctgaaagccggagaacatcatgaataa

SEQ ID NO: 278790 - DNA, 3075 bp, Morganella morganii
atgccgacattaacaactgcacaaattaaatcatcactgaactcagctaaacaatcagcaggtaaaaagctgcaatcagctggagcatcaacaaaagatgctttaaaaaaagcagccgaacaatttcgtaatgcaggtaataagcttattttgtttatacccaaagattatcagggacagggttcaggtcttaatgatctggtcaaagcagcagatgaattaggtattgaggttcagtacgaggaaaaaaatggtacggcgatagcaaagcaagtatttggtacaacagaaaaactgtttggcctgactgagcgtggtatcgctatatttgcacctcagctagataagttgatgcagaaacatcaaaatatcggtaataaactgggaggaagtgcagaaaacttggggaataacctgagtaaagcagggggcgtattatcaactctgcagaattttttaggaattgcactgtcttcaatggaattagatgacttattaaaaaaacaacataaaggtgaagatgttagttcgaatgaactggcaaaagccagtatcgagcttattaaccaactggtggatacagcagcaagtgttaacaataatattgatgcattttcagagcaaatcaataaattaggtggtttgttgtctaatacaaaacatttgaaaggtatcggcaacaaattacaaaatctaccggatcttggaaaattgggtacagggttagatactatttccggtattttatcagcaatttcagctggttttattttgggaaatgaaaatgcagatggaggaaccaaagctgctgccggtgttgaattaactacaaaaatattaggaaacgtaggtaaagctgtatctcagtatattctcgcacaacgtgtggcacaggggttgtcaactactgctgccggggctggtctgattgcttcagcggttgcattggcgatcagtccgctgtcattcctggcagtcgctgacaaatttaaacgtgcgcgtcaaattgaagagtattctcagcgttttaaaaaatttggttatgaaggtgatagcttacttgcttctttccataaagaaaccggcgctattgatgcatcattaaccaccatcagtacggtgttaagttctgtatcggcaggtgttggtgcagctgcaactgcatcacttgtgggtgcaccgataagtgcgttggtaggtgctattacgggtattatttccggtatactggaagcctcaaaacaggcaatgtttgaacatgttgctaataaaatggctaataccattgctgaatgggaaaaaaaacatggtaaaaactattttgaaaatgggtatgacgcccgccactctgcatttttagaagataactttaagttattatctaaatataacgaggaatattctgttgaacgggctgttcttatcactcagcaacactgggatgaattaattggtgaactggccggtgttactaaaaatggagacagagctcttagtggtaagggctatgttgattattatgaagaaggaaagcgtctggaaaagaaaccagatgaatttaaaaagcaggtttttgatccattaaaaggaaatattgatctttctgacagcacatcttcgacattacttaaatttgttacaccattgttaactccgggggaggaaacccgcagcagaagacaatccggtaaatatgagtatatgacggaattgttagttaaaggagtagataaatggactgtcaaaggtgtcagggataaaggctctgtatacgattattctaacttaatccagcatgctgtggttggtcataaccaataccgggaaattcgtattgagtcacagttaggtgatggcgatgataaaatatttttatctgccggttctgccaatatttacgcaggtaaggggcatgatgttgtttattacgataaaacagatactggttatttaactattgatggaactaaagcaaccgaagccggtcgttatactgttacccgtgaactggggggcgatgttcaaattctgcaggaagttgtgaaggaacaagagactaaagtcgggaaaagaactgagaaaactcagtatcgccattatgagcttaaacatatcaacggaaattctctgacatcagtagataatttacattctgtggaagaaattatcggtagtagccgtggagatacgtttttaggcagccggttcggtgatattttccatggtgcagatggtgatgataaaattgagggaaatgacggtaatgatcgcttatatggtgacaaaggtaatgataccttaagaggtgataatggagatgatcaattatatggcggtgatggtaacgataaattaattggcggtaccggtaataattaccttcacggtggtgatggtgatgatgaactgcaggtacacggtagtaatacccggaatgttttattgggaggtaaaggcaacgataagctatatggcagtgaggggtctgatctgcttgatggtggggaaggaaatgatgtactgaagggtgggtatggtgatgatatctatcgctatctttcaggttatgggcatcatattattgaagatgaaggtggtaaaaatgataagctaagtttagctgacattgatttccgagatgttaccttcagacaggaaggtgatgaccttgtcatgtataaagcagagaataatgtagtttcgtttggtcataaaaatggtattacttttaaaaactggtttaaacaaacatcaaatgaaatttcaaatcataaaatagagcagattattgataagaaagggagagtcattaccccggactcactaaaaaaagcacttgaataccaaagcaaaaataatcatttaaactatgtggatggacataatgcagcaacctatgaaaatgaaaataatcttaatttattaagaaatgatattagtaaaataatttcagcagctggcagctttgatatcagggatacaagacctgctgatatttcatcattactgacttctcatggtatcagtaatttttcttatagcaacagtgcactgactgtaacctcattagtgtaa

SEQ ID NO: 278791 - DNA, 513 bp, Morganella morganii
atgaataaaaacaatccattaaatgtattggggaatattgtatggttatgggctagttctcctttgcacaggaattggccggtatctttatttgctataaatgtattacctgcaatacaaactaatcaatatgcgctactaactcgtgatggatttccggtggcatattgcagctgggcggatctaagcctggaaaatgaagttaaatatctgaacgatgtaacttccttaattgcggaggattggacatctggtgaccgaaaatggttcattgactggattgctccttttggagacagcggtgcattatataaatatatgcgaaaaaattatcccaatgatttgtttcgggctatcagggtagatcctgaaactcaggttggcaaagtatctgaatatcacggaggtaaaattgataaaaaactagcaaataagatatttaaacaatatcaccatgagttaataaacgaagttaaaaataaaccagactttaagttttcattaataagttaa

SEQ ID NO: 278792 - DNA, 1188 bp, Morganella morganii
atggctgactataaatacattacctcatccggtgtgattattccggataccgcagaactgcgggcggcagttgaggatgaattcagagccgtatttggtcaggatctggatgtctccccggaaaccccgcagggggcactgatcacaatggaaacggaaaaccgtgacgcggtagtccgtaataatgcggaactggcaaaccagattaacccggacattgccggcggtgtttttctggatgccatctggtcgctgatgggcggtcagcgctgggatgccactcagtcgatactgacgcaggttgaattcggcggtgtccccggaactatcatcccgaaaggttcactggctgaaacgcgggccggtgatcagtttgccacaacaaagccgttgattatcggtaaagacgggaaaataaccggcgatatgcgggcggttgaaaccggccctgttgagtgtccggccggtaaattaaacacggtggcaagttcggttctcggctgggaaacggtatccaacccgaccagtgcggtattggggcgtgttgccgaatctgatttacagtcccgccgccgccggaaactgacactggcaaaaaataccgtcagtgtcggtgaggcgattacctccgcgttatatgagctggaaggcgtccgttcgctggcataccgcgaaaattatactgataccccgatgagcctggacgggatcacgctggtgccgcacagcgtatacgtgtgtgttgagggcggggaaagcggggaaattgcccgtgctctgctgcgcaccaaaacaatcggggcggctttcaacggcagtgaggaggttgaagtaccggagccggtcagcggacagacctataccgtaaaatttgatcgcgctaaagagattgtcctgttctgccgcgtgacagtgaaaaaaacatcactggatgcgcagacggttattcctgcggcggttgagtcatgggcccggggcgaaaccgaaggggatggcgggctggttgtcggccgcgaagtttccccgtttgaaatatcggccggtattaatgcttctgaaccgcgtctgtttgtcacacgggtggaactgtcaaccaacggtacggactggtcatccgatacttatccggtaaagctgactgaggttgccggaatcagacgcagtgcggtacaggtggtgtttgtatga

SEQ ID NO: 278793 - DNA, 693 bp, Morganella morganii
atgaacaaaccaaacagtgaccaggcgaatgacggcagtctcgccgggcagtttatggctgcgttccgtaatctgctgatgaatattgatgacatgcttcccgccaccgttgtgagttacgacgatgcgacaaaccgggcggtaattaaacccctggtgatgatggtcaccacggaagggaagaaaatcggacgtggtgcgctgccgaatatcccggtattccggtttggcggcggcggattctttatccggatgccggtaaaaccgggggatttcggctggctgaaagcgaacgaccgggatatcagcctgatttttcagcgcggcggcctggaggatgaaccgaatacggccaggctgcatacattcagtgatgccatgtttttccctgacacgctcaaaggctggatgatcgacggcaaaaatgcggacgcactggtggtgcagtcaacagacggttctgtgtgcttatccctgcatgccgataaagcggtgctggacacaccgttgtttgaggttaatgcgccggaaaccatttacaccgggaatgtgacaattaacggtaaccacgcggtcaacggcaacagtgattcaaacggcggcaccatgaggcataacggtaaagatatcggatctgcccacaggcattccggtgttcagggagggaacggaaattcaggagagccggtatga

SEQ ID NO: 278794 - DNA, 651 bp, Morganella morganii
atgctttccgtgcccttatcgcaacggataccgagtttttccacaccgtattccgccacctgctgttttgtcatcgctgcatggtcaaacaccccggtaaacggtgtcagcttttgcgccagtgcatcacgctcaccgatctgctttaataattcgccggtgtccgtcgtcggtctggctttctccagacgggcgattttgcgtttcatcgcggacatctcatccatagacgcaataccgcgtttcagacgtttaaggcgacgggtcagactgtcggttgttgcctggtcaagttcttctttggcttcagcaatggcttcctctgcggcttcaatcgccacttccgccgcttctaccgcttccgggtcaccggattccgctttttcggcttccgcttctgcgccttcaacggctttttccgcatcggctccggcatctgccgttttcttttcaggatcagactcttcgtcggtcgtttcctttttttcaggatcttcatccgttgccggtgtaccggcagccagcgcagacacaacgatttgtttaatctgttcgacctgctccggcgtaaaaccgccgtcgtctgtggtttttttgtcttcttcgttcatacgaataagttcctttgtatcaatggttacaacaagatga

SEQ ID NO: 278795 - DNA, 831 bp, Morganella morganii
atgccccggaaaatacgggtacgaacccgccgggcggttatgaagggcaaacccctgctgtatccggcagcggcccggagccgttatcagcgtgacatgtcacggcttatctgtgcgatggttgctgattatgaaaaggttttcagccgtctgcatgaagattttgacggcgtgactatggatgccagccttgccagtcagaccagaatctggctgaaccggctgaaacgtaagtgggataagatttttaacagtaaggccgcagagatggcggataagttcacctcacaggtggacatgaacgcacagcgcagcctgaacgattccctgaaacagctctccggcggtatcacgataaaaaccccggccatgccggaagccctgaaagacaaaatgattgccgcaacggcagaaaacgtatccctgattaaatccatcccgcagcagtttcattcccgtatcgagggcgcagcgttgcgttcggtcagccggatcggcagcggcagtaaaacgctgctggatgaaatacgggatatcggcggggtaacagagaaacgggcggcatttattgccgttgaccagacccggaaaattaccacggcggcaaactatgagcggatgaagtcagccgggatccgcaaagctgtctggcatcactcggcaggcagtgctgaaccgcgagaattacatctgcgtctggacggggaggtgtttgacctggataacccgccggtcattgatgaaaaaaccggtgagcgcggattacccggtcagttaccgaactgcaaatgcttctggacaccggtcatcgactttggtgaggagacatga

SEQ ID NO: 278796 - DNA, 1188 bp, Morganella morganii
atggctgactataaatacattacctcatcaggtgtgattattccggataccgcagaactgcgggcggcagttgaggatgaattcagagccgtatttggtcaggatctggatgtctccccggaaaccccgcagggggcgctgatcacaatggaaacggaaaaccgtgatgcggtagtccgtaataatgcggaactggcaaaccagattaacccggacattgccggcggtgtttttctggatgccatctggtcgctgatgggcggtcagcgctgggatgccactcagtcgatactgacgcaggttgaattcggcggtgtccccggaactatcatcccgaaaggttcactggctgaaacgcgggccggtgatcagtttgccacaacaaagccgttgattatcggtaaagacgggaaaataaccggcgatatgcgggcggttgaaaccggccctgttgagtgtccggccggtaaattaaacacggtggcaagttcggttctcggctgggaaacggtatccaacccgaccagtgcggtattggggcgtgttgccgaatctgatttacagtcccgccgccgccggaaactgacactggcaaaaaataccgtcagtgtcggtgaggcgattacctccgcgttatatgagctggaaggcgtccgttcgctggcataccgcgaaaattatactgataccccgatgagcctggacgggatcacgctggtgccgcacagcgtatacgtgtgtgttgagggcggggaaagcggggaaattgcccgtgctctgctgcgcaccaaaacaatcggggcggctttcaacggcagtgaggaggttgaggttccagagccggtcagcggacagacctataccgtaaaatttgatcgcgctaaagagattgtcctgttctgccgcgtgacagtgaaaaaaacatcactggatgcgcagacggttattcctgcggcggttgagtcatgggcccggggcgaaaccgaaggggatggcgggctggttgtcggccgcgaagtttccccgtttgaaatatcggccggtattaatgcttctgaaccgcgtctgtttgtcacacgggtggaactgtcaaccaacggtacggactggtcatccgatacttatccggtaaagctgactgaggttgccggaatcagacgcagtgcggtacaggtggtgtttgtatga

SEQ ID NO: 278797 - DNA, 216 bp, Morganella morganii
atgctgcacaagctggataaggggatcccgtactggaaaaccaccttcgggcgacaggctgatctgccgctgtttgaatccgcgttccgcgagcgtatgcgggaaattccgcaggtgaccgccgtcgtgtcattcagagccacgctgaatgataacgaactgaactatgtggctgtcctgcagacagaatacgggagcattacgttaaatggctga

SEQ ID NO: 278798 - DNA, 357 bp, Morganella morganii
atgaataaaaaagaaaaaataaaatttcatgttttaaatattttgtttttatctagcgataataaattagatagctactcattgtttaaacgttctaagcttgcattttcgtacttcactaatataacacaatcgcttgaacgtgatgagtttataaaaataaatggaattattatagaaataaccaacattggaagagaatacattcttatgaatcataattattttgaagcacaagaaaaaagttggagaaaagtgcctgagtcaatgcttggacctaagcttagcccaggttacaagtatgttcccagcctaagattacttgatagacaattaaaaataattgacaatgaatga

SEQ ID NO: 278799 - DNA, 909 bp, Morganella morganii
atgattaatgaagtcattgcattatggtctgagttattaggtcgtgaggtcaatagcacaaatgatttcttccgttctggaggagatagtttgattgcaaccaaaatgatcagccaattacatcaacggggatatccggcaacattacaacagatttttacctatccatgcttagccgatttttgtgctcatttagagcaggaaaagcaatcacaacgagagtactcctctttgatacctctaagcgctgtatctgctccaaaaccttaccactactttatggtgcatgcttctgatggtgatcccggtgtttacctacctcttgctgagtcgttaaataatacagtgtggggattaacagttacagatgcttcaaaactaactgatttggatacattgttatcattacatttatctagcataaaaacagcacagcagactggcccttatattcttattggttggtcatatggcgcttttattgccagttaccttgcagaacaactctcgcaacaaaatcagtctgtattattagtattaatagatcccgtctatcgacatgattttattaaattttgccatgatgactcagatagttcatcagatgaaaataagcagcttgcatgcactaaaaggcttatgtcattcctacctgaaagtgacctaccattatctgatgatatcgcctgtttatggctggaagccaccaaccacccaacagaatggacatcacctgaaaaagagtggtaccaacgattaccgccacatacccaacatcactatttttcaggggagcactggtcaatactgcaagatcgcgctaccagcacacatctggccgaaatcattgatcagtgggtgcaacaaaaactttctaataacggatatccatccgaaggaggtaattaa

SEQ ID NO: 278800 - DNA, 243 bp, Morganella morganii
atgttcctgatcctgcccgtaagatgccagcgggatattggtatgatcgccgtacagctccgctttaccggccggagtcgccacattcaggataatctcctcgtcatgccactgaccggcattcagtacaccggtgatttcatccagcacgcggacccgggtcgcggtacggataagccccggcagcacatgctgcaacatctcacgctgaatgaacccgccggacacggccgggccggttaa

SEQ ID NO: 278801 - DNA, 855 bp, Morganella morganii
atgccccggaaaatacgggtacgaaccaaacgggcacggtgggcggcatcccgtcaggcagttatgaagggcaagccgctgcaatattcggcagcagcccaaagccgttaccagcgtgacatgtcacaactgattaaaggcatgattgcagattacgaaaagacgttcagcagtctgcatgaggattttgacggcgtgaccatggatgccagctttgccagccagaccaaaatctggctgaaccggcttaaacgcaagtgggataagatttttaacagtaaggccgcagagatggcggataagttcacctcgcaggtggacatgaacgcacagcgcagcctggacgattcactgaaacaactctccggcggtattacgataaaaaccccggccatgcccgaagccctgaaagacaaaatgattgccgcaacggcagaaaacgtatccctgattaaatccatcccgcagcagtttcattcccgcatcgagggcgcagcattgcgttcggtcagtcagaccggcagcggcagtaaaaccctgctggatgaaatacgggatatcggcggggtgacagagaaacgggctaattttattgccgttgaccagacccgcaaaattaccacggcggcgaactatgagcggatgaagtctgccgggatccgcaaagcgatatggcatcactcggcaggcagtgccgaaccgcgtgaattacatctgcgtctggacggggaagtgtttgacctggataacccgccggtcattgatgaaaagaccggtgagcgcggattacccgggcagttaccgaactgcaaatgcttctggacaccggttatcgactttggtgaggagacatga

SEQ ID NO: 278802 - DNA, 198 bp, Morganella morganii
atgaatgaaacagtggttcatcaagctccatcgtggcaggagattgatacatggcttttttactatcttggtgatgatgaatataaagcgcattattccattctactggcccatagcttccagcgagagttaaataaccagctggccagcctaatatcatatgatgcatcacgaggctatgctgatcaggatcgttag

SEQ ID NO: 278803 - DNA, 264 bp, Morganella morganii
atgaccagacacatgtacaccccgcgcggccgtgtgactgaaatcagtgatgaacagtacacgcagctgaaaaataaccacgtctttatgctgcataaagaaaacgggtttatcgcggtggagaaccgcagagaggatccggacaaagtggcgaccgatatggaagccagcgacaaatccgccccgctgaccgaagaacaactagtcgcggaggggacagagccgccggtcagcaacaacggcaaaaagaacagtaaaaaataa

SEQ ID NO: 278804 - DNA, 429 bp, Morganella morganii
gtgaacccgaccgactttccgttagtgtctttccgggcaatttataaggtatttggtgcggtaccggatgatgaggtatccgctgtggcgcaggaggcactgaactacttttctccctgtcggggggcctgcacaaattctgcgtggatgctggtcgtcgcgcatatgctcgacctgaacggccgtattgctgacggggaatcaccgaccggtgtcgtgaccagtgtcacgatagataaagtcagtgtgtcctacaccgcgccgcctgccagttccgactggtctcactggttcaagatgagtacctacggccagcagtttctggccctgataaaacggtgcagcgtgccgcgttaccacggcggtggcggggagcgtgcggcatttcgcggcgcgttcgggcgcttcacgcggggaggccaccggtga

SEQ ID NO: 278805 - DNA, 369 bp, Morganella morganii
atgttcggaaatctgcaccggattgcctcgcgctatattcctcagcagccggtactctggtaccggttcagagagcgcgtgacggatgagcgggggcatgaccggaatatttattatgaaccgatctgtgtgcatggcagctggcaggcggtggatactcagaatattcagtctatggggctggataccggtcaggtataccgtcgtttgtatacgtcacacgatatcaaagccattcagcgtgggtcttcaccggattacctggtctgcggcggtaagcgttatgacgtgatcggggatgctgactggtatgcacaggacggctggaagtcggttatctgtattgaggctggcaatcatgacggataa

SEQ ID NO: 278806 - DNA, 747 bp, Morganella morganii
atgaatttcatcgacggtaacgattcgatgattggccggatcctggataaatatcccggactgaaagccgtcattctggcgctgtgggacgttttcaaaaaactgtttaatttcattattgatgttgccgttattgtcggcaaagcggcagctgatgctttcaatctcattattgacgccggtaaattgttgtggaactggctgctcggttttatcaaaagtctggggaactggggaaaaagctttcagggggttttcgataacgtctccaatgctgtggttggtattttcaaatggctgtggaaacagatagaagcttaccttggctggatcaacaaagggctgaataagattaaagagggctgggcggcctttaaaagctggtttggtgccggtgatgatgatattgaggttgaccagaccgttaaccgaacggtgaatgaacaggggcagatcgggtacgacatgccacctgaaaaaacgatcagtgaggaggacgcggcaaaaatggcgcaggccatgaccgcacatctttacggtgtgtcaaatgacccgatgaaccctgtcaccagtcaggcgatcagcaatcagtcgacgaccagtaatgaaacaaacatcagtatcggtgaacttaaggtcgaaacacaggcaacggatgcacagggtatggcggcgggagccaaagatgcactcggatctcagttgcaggactttggacatcagacaaatacggggctggggaaatga

SEQ ID NO: 278807 - DNA, 744 bp, Morganella morganii
atgaatttcatcgacggcaacgattcgatgattggccggatcctggataaataccccgcgctgaaaacggtcattcttgccttgtgggaggcttttaaagtcctgtttgattttattaaagcggtcgtgaaagttgtggcggatattgtggtggatgcgtacaacaccatgaataaagcgctgaatgactttatcggctggctgacaggcagtattaagggggtaatagcctggggtaaagacttcggaaaagtgttcagtgcagtttcagataccgtggttggtattttcaaatggctgtggaaacagatagaagcataccttggctggatcaacaaagggctggataagattaaagaaggctgggcggcttttaaaagctggttcggtgccggggatgatattgaggttgagcagaccgttaaccgcacagtgaatgaacaggggcagattgagtatgacatgccgccggataaaacgaccagcgaggaggatgcggccaaaatggcgcaggccatgaccgcgcagctgtacggcatgtcaaatcacccgctgaaccctgtcaccagtcaggcgatcagcaaccagtcagctgtccgtaatgaaacgaacgtcagtatcggtgagcttaaggttgaaacacaggcaacggatgcgcaggggatggcggcgggagctaaagatgcactcggctctcagttacaggatttggggcaccagacaaatacggggctggggaaatga

SEQ ID NO: 278808 - DNA, 264 bp, Morganella morganii; identical to SEQ ID NO: 278803

SEQ ID NO: 278809 - DNA, 315 bp, Morganella morganii
atgtttttccctgacacgctcaaaggctggatgatcgacggcaaaaatgcggacgcactggtggtgcagtcaacagacggttctgtgtgcttatccctgcataatgataaagcagtctttgacggcccgaaatttatctctaatgcgccggaaaacgaatttaacggcaatgtgatcgtcaacggcaaccacgccgtaaacggtaacagtgaatcaaacggcggcactatgacgcataacggtaaaaatatcgggtctacccataaacattccggtgttcaggggggcaatagtgattcaggagagccggtatga

SEQ ID NO: 278810 - DNA, 270 bp, Morganella morganii
atggcaaaactaaacatccgcaacagcgatatgcatgatctgctttttgattactatgttttcggtaagacgtttattcagttggccaagaaatacgggtgctcagacactcacatagggaaaaaactccagaaggcagaagggctggtggaaggaatgctcataatgggagatgtaaaactggaaatggacggtacatcacatcatggaggtatgcggacatttatgaacaaattacatgatttaaaaattaatactttacgatcgtaa

SEQ ID NO: 278811 - DNA, 174 bp, Morganella morganii
gtggatgatggctcaacggccaccagtgcggttcttctccaggtggtaccggtgaaataccagctgctgggttcagagagcaaagtcaaaggctacctggaagatgccaccaacgcgaccgccggtatcatcgtcacccgtccgtgggccatcacccgcctgaccgggatttga

SEQ ID NO: 278812 - DNA, 294 bp, Morganella morganii
atgagcgcctctgcccttgtcggtgagtctgttgcccgtgctgctgaaatcgaatcactggataaattcggcaaaaaaatcaatgttgccgcggcggatgtggatgcctttgccggatctgtggctgaactcggcggtacccgggaggctgctcaggcagatatggaagcaatggcgaagtcgtttggttttgccggtaactccatggaaaaaattctgcggacggctgacaaagtgaagggaatgaagttcgataaggccaaagccacagtcggcgcttggtgtgtcggatga

SEQ ID NO: 278813 - DNA, 234 bp, Morganella morganii
gtgaaagccgcagtgaaaggcaatatcgccatcactgacgggctgacgcaagtcggcgcaaaagcagcaggtgatgtgaagatggtaattaaatctgtcaccacaccgccgcttaaggataccacggtagccgcccgtgcccgtcggcacagcaaagggaaagccaccagtaagccgctggttgactccggtctgatgctgcaatccgtcacttttgccgtggaggataaataa

SEQ ID NO: 278814 - DNA, 234 bp, Morganella morganii
gtgaaagccgcagtgaaaggcaatatcaccatcactgacggactgacgcaagtcggcgcaaaagcagcgggtgacgtgaagatgatgattaaatcggtcaccacgccaccgcttaaggatgccacggtagctgcccgtgcccggcggcacagtaaagggaaagcctccggtaagccgctggttgactccggcctgatgctgcaatccgtcacttttgccgtggaggataaataa

SEQ ID NO: 278815 - DNA, 354 bp, Morganella morganii
atgaaatattacaaaacgaaaactaatgaagtttatgcacttgaagataacgactctgcaaaagagtggataaaagaaaaagtgactgaaatcaccaaagaggaagctgataacatcacaaatccgcgaccaacgaaagaacaactgatcgcaaaagcggaatacgataagcaggcgctgattacagaggttcaggctgagactcagttactgcaaacaaaactggcacttggccgtatcagtgataatgaaaaggcgcggttaaacgcctggctggattatctggacgaactggaggcagtggacgtatccaccgccccggatattatctggccggtgaagccggaggtatag

SEQ ID NO: 278816 - DNA, 675 bp, Morganella morganii
atgactgccattgttttccctcatgtttgctgtaatgacgggattattacggatttatccggttatggctgcattcccggaaaccttggtttgagagaactttaccttgcactgactggcgggacgctgaaagggccgttaaatatcgaatatgttggaggtcggggattaactacaggagcaacagccggaacatcaatttatcatgaactgtatctgcttggaaaactggttgcctggtggggaattataaacagtaacgaattagtgcttgaaaacagagtcgctggtaaaaaattaattattggccccgatggtttcaaagttgatggtaaagacattgcgactactgagcaacttttcggtgttggtcagacctacagaaacctaacgaccagccgtcaaaataaagtctggtacaccaacaccgacagcaagccccggattgttcatgtcgaaacgaacataacaggtactcagtatcctttcagtattgatattcaggtaattcataacggagtacagcatcgtgctgattaccgctggacaactgctgatgaagttatttgtttaactgctgtgattccgcccggcgcaagatatagcgtcaacggaggatggggacagccgacagaatggattgttattaatttctggctggagtactcgctatga

SEQ ID NO: 278817 - DNA, 462 bp, Morganella morganii
atgagcggtaaatccgccgtcaggccgggactgaaacgggcattaaaggccattcagccgggcgatacactcgcagtgtggaaactggacaggctcgggcgcagtgtcaaaaacctgatagcgctgatatctgatctgcacgaacgcggcgcacattttcggtcactgacggacagtatcgacaccagcaccgctatggggcgctttttctttcacgtcatgtcagcgctggcagaaatggaacgtgagctgatagtagagcgtacactggcaggcttggccgcagcgagagcgcagggaagaattggcggaagacccgcagcactgacacagaatgaccgggagcaaatcggccgtctgctggataaagggcattcacggcagcagatggcgattatttatggtgtgggggtatcgacaatttaccggtattttcctattgggcgacgcagcgagagttaa

SEQ ID NO: 278818 - DNA, 888 bp, Morganella morganii
atgatcggacaaacaagcgcagaaaaacaaactgtactgatcaccggagcaaccggtcaggtgggaacactgctgatacagtacctgcgcgaacgcggaaatgtgaatattattctggctgcccgtgacccgcaaaagcttgcagacagcggcctgccggtgcgttatttcgattatgataatccggcatcattgttaccggcgctgcacggtgtggatacggtttttatgatgaccggctacaccctcgccatgctggaacagagcaaagtatttatcgatgaggcacgtaaatccggtgtccgccatattgttcatctcggcgcctgcggtgacgataatacccgtgtcgcgcactgggcgtggcatcagctgattgaacgctatattgagtgggctgggtttgattacacacatctgcgcccggaatcctatatgcagaatctgctcggctatcagggggataatcagcatccggcgggggtactgagagattatttcggcgatgccaccctgagctgggtgtcctgtgaggatgtcgcagaagtcgctgccacctgtttatccgccccggcagagcaccgtaaccgtgtgtaccgtttgggctatgatgcgaaaaactatcacgaaattgcagcgattatcagcgaaatcaccggcattgattaccggtatgaagcattatcaccagaggtattccgtgagtttgcgcaaaaacaggggctggacacggcgtatatgaaaagtatttatgatcattatatcgccttcagtgaattccggatccctggtgcgggaaccacttttgataatttcgcggcaatcaccggaaaacaaccaatgtccgtgtccggttttatccgtaaataccgccatcgtttccgctga

SEQ ID NO: 278819 - DNA, 531 bp, Morganella morganii
atgcgtatcaccctgcctttaatattaagttcagtattattactgtccgcatgtgaatcaatgagccgcggcccggaagtatccctgaaaaacgttcaatcgatggaaggtactgagtttgaggttccgcctgtaccggcaggaacaaaagatggtgaatatctgcgccactataatgacggaacgatcagatttaaatcctgggtaaaaaatggctgctatgaccgttatgtatatgcttattatggcggcggaagaccacaaatgaccatgccgctgaaaaactgcaaagttaacggcgttgtaaaaaattatctgcagaatggtaatttaaaaagtgaagtaactgtccgtgacggacggttatatggcccgttcaaatattatcacgactccgccagtaatggggtctatatacaaggtacaatggaaaacggtgcccttaccggctcagttaaacaattcgatactgccggaaaattagtcagtgaaggtaaggtgactaacggaagaatgcagatcctgaagtaa

SEQ ID NO: 278820 - DNA, 474 bp, Morganella morganii
atgaatctgaaaaagcaggcagcgagacgtcttatttttgtactctcatttttctttatagccggatgtaaaccaggtaatccctcagaacagcctgaaaaaatcatccggtttgatggcgtttatgtatgcagtataagcaggtcatttaatcaaatcgcaattgaacagaaaaataaacacgtttttccgtctgtactgacaaaaaccaccattacagttaaagatggcattatgacggttcatggtatgacgtcaggtgattacgtcactcatcagatgtcgctgactgaaccaccggttaccggcaacggccgtgtgctgtattcagaagtggagctgcgttataaaaacggaaacgtacagcaagatttcacaaaaaatatggcattgcgtcgatatcagaaggcgatccttttgataaaggatttatgcagcaactcagcagttgcaggttgtcaccggatggggtga
